(19) United States
(12) Patent Application Publication
(10) Pub. No.: US 2022/0333131 A1
(43) Pub. Date: Oct. 20, 2022

(54) MODULATORY POLYNUCLEOTIDES

(71) Applicant: VOYAGER THERAPEUTICS, INC., Cambridge, MA (US)

(72) Inventors: Jinzhao Hou, Lexington, MA (US); Xin Wang, Arlington, MA (US); Pengcheng Zhou, Lexington, MA (US); Xiao-Qin Ren, North Attleboro, MA (US); Dinah Wen-Yee Sah, Hopkinton, MA (US)

(21) Appl. No.: 17/561,252

(22) Filed: Dec. 23, 2021

Related U.S. Application Data
(63) Continuation of application No. 16/611,046, filed on Nov. 5, 2019, now abandoned.
(60) Provisional application No. 62/520,093, filed on Jun. 15, 2017.
(60) Provisional application No. 62/507,923, filed on May 18, 2017.
(60) Provisional application No. 62/501,787, filed on May 5, 2017.

(51) Int. Cl. C12N 15/86; C12N 7/00; C12N 15/113

(52) U.S. Cl. CPC C12N 15/86; C12N 7/00; C12N 15/113; C12N 2310/11; C12N 2310/531; C12N 2750/14143

(57) ABSTRACT

The present invention relates to adeno-associated viral (AAV) particles modulatory polynucleotides encoding at least one siRNA molecules and methods of use thereof.

### CROSS REFERENCE TO RELATED APPLICATIONS

[0001] This application is a continuation of U.S. patent application Ser. No. 16/611,046, filed Nov. 5, 2019, which is a U.S. National Stage Application under 35 U.S.C. § 371 of International Application No. PCT/US2018/031108, filed May 4, 2018, which claims the benefit of U.S. Provisional Patent Application No. 62/501,787, filed May 5, 2017, U.S. Provisional Patent Application No. 62/507,923, filed May 18, 2017, and U.S. Provisional Patent Application No. 62/520,093, filed Jun. 15, 2017, the contents of each of which is incorporated by reference herein in its entirety.

### REFERENCE TO THE SEQUENCE LISTING

[0002] The instant application contains a Sequence Listing which has been submitted electronically in ASCII format and is hereby incorporated by reference in its entirety. Said ASCII copy, created on Dec. 23, 2021 is named 2057_1045USCON_SL and is 6,814,412 bytes in size.

### FIELD OF THE INVENTION

[0003] The present invention relates to compositions, methods and processes for the design, preparation, manufacture, use and/or formulation of AAV particles comprising modulatory polynucleotides, e.g., polynucleotides encoding at least one small interfering RNA (siRNA) molecules which targets at least one gene of interest. Targeting the gene of interest may interfere with the gene expression and the resultant protein production. The AAV particles comprising modulatory polynucleotides encoding at least one siRNA molecules may be inserted into recombinant adeno-associated virus (AAV) vectors. Methods for using the AAV particles to inhibit the expression of the gene of interest in a subject are also disclosed.

### BACKGROUND OF THE INVENTION

[0004] MicroRNAs (or miRNAs or miRs) are small, non-coding, single stranded ribonucleic acid molecules (RNAs), which are usually 19-25 nucleotides in length. More than a thousand microRNAs have been identified in mammalian genomes. The mature microRNAs primarily bind to the 3′ untranslated region (3′-UTR) of target messenger RNAs (mRNAs) through partially or fully pairing with the complementary sequences of target mRNAs, promoting the degradation of target mRNAs at a post-transcriptional level, and in some cases, inhibiting the initiation of translation. MicroRNAs play a critical role in many key biological processes, such as the regulation of cell cycle and growth, apoptosis, cell proliferation and tissue development.

[0005] miRNA genes are generally transcribed as long primary transcripts of miRNAs (i.e. pri-miRNAs). The pri-miRNA is cleaved into a precursor of a miRNA (i.e. pre-miRNA) which is further processed to generate the mature and functional miRNA.

[0006] While many target expression strategies employ nucleic acid based modalities, there remains a need for improved nucleic acid modalities which have higher specificity and with fewer off target effects.

[0007] The present invention provides such improved modalities in the form of artificial pri-, pre- and mature microRNA constructs and methods of their design. These novel constructs may be synthetic stand-alone molecules or be encoded in a plasmid or expression vector for delivery to cells. Such vectors include, but are not limited to adeno-associated viral vectors such as vector genomes of any of the AAV serotypes or other viral delivery vehicles such as lentivirus, etc.

### SUMMARY OF THE INVENTION

[0008] Described herein are methods, processes, compositions, kits and devices for the administration of AAV particles comprising modulatory polynucleotides encoding at least one siRNA molecule for the treatment, prophylaxis, palliation and/or amelioration of a disease and/or disorder.

[0009] The details of various embodiments of the invention are set forth in the description below. Other features, objects, and advantages of the invention will be apparent from the description and the drawings, and from the claims.

[0010] Set forth below are non-limiting embodiments that are representative of the subject matter description herein:

[0011] 1. An adeno-associated viral (AAV) viral genome comprising a nucleic acid sequence positioned between two inverted terminal repeats (ITRs), wherein said nucleic acid when expressed inhibits or suppresses the expression of a target gene in a cell, wherein said nucleic acid sequence comprises, in a 5′ to 3′ order: a first region encoding a first sense strand sequence, a second region encoding a first antisense strand sequence, a third region encoding a second sense strand, and a fourth region encoding a second antisense strand sequence, wherein the first and second sense strand sequences comprise at least 15 contiguous nucleotides and the first and second antisense strand sequences are complementary to an mRNA produced by the target gene and comprise at least 15 contiguous nucleotides, and wherein said first sense strand sequence and first antisense strand sequence share a region of complementarity of at least four nucleotides in length and said second sense strand sequence and second antisense strand sequence share a region of complementarity of at least four nucleotides in length.

[0012] 2. An adeno-associated viral (AAV) viral genome comprising a nucleic acid sequence positioned between two inverted terminal repeats (ITRs), wherein said nucleic acid when expressed inhibits or suppresses the expression of a first target gene and a second target gene in a cell, wherein said nucleic acid sequence comprises, in a 5′ to 3′ order: a first region encoding a first sense strand sequence, a second region encoding a first antisense strand sequence, a third region encoding a second sense strand, and a fourth region encoding a second antisense strand sequence, wherein the first and second sense strand sequences comprise at least 15 contiguous nucleotides and the first antisense strand sequence is complementary to an mRNA produced by the first target gene and the second antisense strand sequence is complementary to an mRNA produced by the second target gene and comprise at least 15 contiguous nucleotides, and wherein said first sense strand sequence and first antisense strand sequence share a region of complementarity of at least four nucleotides in length and said second sense strand sequence and second antisense strand sequence share a region of complementarity of at least four nucleotides in length.

[0013] 3. The AAV viral genome of embodiment 2, further comprising, in a 5′ to 3′ order, a fifth region encoding a third sense strand sequence and a sixth region encoding a third antisense strand sequence, wherein the third sense strand sequence comprises at least 15 contiguous nucleotides and the third antisense strand sequence is complementary to an mRNA produced by a third target gene and comprises at least 15 contiguous nucleotides, and wherein said third sense strand sequence and third antisense strand sequence share a region of complementarity of at least four nucleotides.

[0014] 4. The AAV viral genome of embodiment 3, further comprising, in a 5′ to 3′ order, a seventh region encoding a fourth sense strand sequence and a eighth region encoding a fourth antisense strand sequence, wherein the fourth sense strand sequence comprises at least 15 contiguous nucleotides and the fourth antisense strand sequence is complementary to an mRNA produced by a fourth target gene and comprises at least 15 contiguous nucleotides, and wherein said fourth sense strand sequence and fourth antisense strand sequence share a region of complementarity of at least four nucleotides.

[0015] 5. The AAV viral genome of embodiment 2, wherein the first target gene is the same as the second target gene.

[0016] 6. The AAV viral genome of embodiment 3, wherein the third target gene is the same as the first target gene.

[0017] 7. The AAV viral genome of embodiment 3, wherein the third target gene is the same as the second target gene.

[0018] 8. The AAV viral genome of embodiment 3, wherein the first target gene, the second target gene and the third target gene are the same.

[0019] 9. The AAV viral genome of embodiment 4, wherein the fourth target gene is the same as the first target gene.

[0020] 10. The AAV viral genome of embodiment 4, wherein the fourth target gene is the same as the second target gene.

[0021] 11. The AAV viral genome of embodiment 4, wherein the fourth target gene is the same as the third target gene.

[0022] 12. The AAV viral genome of embodiment 4, wherein the fourth target gene is the same as the first target gene and the second target gene.

[0023] 13. The AAV viral genome of embodiment 4, wherein the fourth target gene is the same as the second target gene and the third target gene.

[0024] 14. The AAV viral genome of embodiment 4, wherein the fourth target gene is the same as the first target gene, the second target gene and the third target gene.

[0025] 15. The AAV viral genome of any one of embodiments 1-14 wherein the first target gene, the second target gene, the third target gene and/or the fourth target gene is Huntingtin.

[0026] 16. The AAV viral genome of any one of embodiments 1-14 wherein the first target gene, the second target gene, the third target gene and/or the fourth target gene is SOD1.

[0027] 17. The AAV viral genome of any one of embodiments 1-14 wherein the first target gene, the second target gene, the third target gene and/or the fourth target gene is Huntingtin or SOD1.

[0028] 18. The AAV viral genome of embodiment 1 or 2, wherein the region of complementarity between the first sense strand and the first antisense strand is at least 12 nucleotides in length.

[0029] 19. The AAV viral genome of embodiment 18, wherein the region of complementarity between the first sense strand and the first antisense strand is between 14 and 21 nucleotides in length.

[0030] 20. The AAV viral genome of embodiment 19, wherein the region of complementarity between the first sense strand and the first antisense strand is 19 nucleotides in length.

[0031] 21. The AAV viral genome of embodiment 1 or 2, wherein the region of complementarity between the second sense strand and the second antisense strand is at least 12 nucleotides in length.

[0032] 22. The AAV viral genome of embodiment 21, wherein the region of complementarity between the second sense strand and the second antisense strand is between 14 and 21 nucleotides in length.

[0033] 23. The AAV viral genome of embodiment 22, wherein the region of complementarity between the second sense strand and the second antisense strand is 19 nucleotides in length.

[0034] 24. The AAV viral genome of embodiment 3, wherein the region of complementarity between the third sense strand and the third antisense strand is at least 12 nucleotides in length.

[0035] 25. The AAV viral genome of embodiment 24, wherein the region of complementarity between the third sense strand and the third antisense strand is between 14 and 21 nucleotides in length.

[0036] 26. The AAV viral genome of embodiment 25, wherein the region of complementarity between the third sense strand and the third antisense strand is 19 nucleotides in length.

[0037] 27. The AAV viral genome of embodiment 4, wherein the region of complementarity between the fourth sense strand and the fourth antisense strand is at least 12 nucleotides in length.

[0038] 28. The AAV viral genome of embodiment 27, wherein the region of complementarity between the fourth sense strand and the fourth antisense strand is between 14 and 21 nucleotides in length.

[0039] 29. The AAV viral genome of embodiment 25, wherein the region of complementarity between the fourth sense strand and the fourth antisense strand is 19 nucleotides in length.

[0040] 30. The AAV viral genome of embodiment 1 or 2, wherein the first sense strand sequence, the second sense strand sequence, the first antisense strand sequence, and the second antisense strand sequence are, independently, 30 nucleotides or less.

[0041] 31. The AAV viral genome of embodiment 3, wherein the first sense strand sequence, the second sense strand sequence, the third sense strand sequence, the first antisense strand sequence, the second antisense strand sequence and the third antisense strand sequence, are, independently, 30 nucleotides or less.

[0042] 32. The AAV viral genome of embodiment 4 wherein the first sense strand sequence, the second sense strand sequence, the third sense strand sequence, the fourth sense strand sequence, the first antisense strand sequence, the second antisense strand sequence, the third antisense strand sequence and the fourth antisense strand sequence, are, independently, 30 nucleotides or less.

[0043] 33. The AAV viral genome of embodiment 1 or 2, wherein at least one of the first sense strand sequence and the first antisense strand sequence or the second sense strand sequence and the second antisense strand sequence comprise a 3′ overhang of at least 1 nucleotide.

[0044] 34. The AAV viral genome of embodiment 1 or 2, wherein at least one of the first sense strand sequence and the first antisense strand sequence or the second sense strand sequence and the second antisense strand sequence comprise a 3′ overhang of at least 2 nucleotides.

[0045] 35. The AAV viral genome of embodiment 3, wherein the third sense strand sequence and the third antisense strand sequence comprise a 3′ overhang of at least 1 nucleotide.

[0046] 36. The AAV viral genome of embodiment 3, wherein the third sense strand sequence and the third antisense strand sequence comprise a 3′ overhang of at least 2 nucleotides.

[0047] 37. The AAV viral genome of embodiment 4 wherein the fourth sense strand sequence and the fourth antisense strand sequence comprise a 3′ overhang of at least 1 nucleotide.

[0048] 38. The AAV viral genome of embodiment 4 wherein the fourth sense strand sequence and the fourth antisense strand sequence comprise a 3′ overhang of at least 2 nucleotides.

[0049] 39. The AAV viral genome of any one of embodiments 1-38, wherein the first region comprises, a promoter 5′ of the first sense strand sequence followed by the first sense strand sequence, and the second region comprises the first antisense strand sequence followed by a promoter terminator 3′ of the first antisense strand sequence; or the third region comprises a promoter 5′ of the second sense strand sequence followed by the second sense strand sequence, and the fourth region comprises the second antisense strand sequence followed by a promoter terminator 3′ of the second antisense strand sequence.

[0050] 40. The AAV viral genome of any one of embodiments 1-38, wherein the first region comprises, a promoter 5′ of the first sense strand sequence followed by the first sense strand sequence, and the second region comprises the first antisense strand sequence followed by a promoter terminator 3′ of the first antisense strand sequence; and the third region comprises a promoter 5′ of the second sense strand sequence followed by the second sense strand sequence, and the fourth region comprises the second antisense strand sequence followed by a promoter terminator 3′ of the second antisense strand sequence.

[0051] 41. The AAV viral genome of any one of embodiments 3-40, wherein the fifth region comprises a promoter 5′ of the third sense strand sequence followed by the third sense strand sequence and the sixth region comprises the third antisense strand sequence followed by a promoter terminator 3′ of the third antisense strand sequence.

[0052] 42. The AAV viral genome of any one of embodiments 4-41 wherein the seventh region comprises a promoter 5′ of the fourth sense strand sequence followed by the fourth sense strand sequence and the eighth region comprises the fourth antisense strand sequence followed by a promoter terminator 3′ of the fourth antisense strand sequence.

[0053] 43. The AAV viral genome of embodiment 3, wherein the fifth region is 3′ of the fourth region.

[0054] 44. The AAV viral genome of embodiment 4, wherein the seventh region is 3′ of the sixth region.

[0055] 45. The AAV viral genome of any one of embodiments 39-44 wherein a promoter is a Pol III promoter and the promoter terminator is a Pol III promoter terminator.

[0056] 46. The AAV viral genome of embodiment 45, wherein the Pol III promoter is a U3, U6, U7, 7SK, H1, or MRP, EBER, seleno-cysteine tRNA, 7SL, adenovirus VA-1, or telomerase gene promoter, and the Pol III promoter terminator is a U3, U6, U7, 7SK, H1, or MRP, EBER, seleno-cysteine tRNA, 7SL, adenovirus VA-1, or telomerase gene promoter terminator, respectively.

[0057] 47. The AAV viral genome of embodiment 46, wherein the Pol III promoter is an H1 promoter and the Pol III promoter terminator is an H1 promoter terminator.

[0058] 48. The AAV viral genome of any one of embodiments 1-47, wherein the AAV viral genome is a monospecific polycistronic AAV viral genome.

[0059] 49 The AAV viral genome of any one of embodiments 1-47, wherein the AAV viral genome is a bispecific polycistronic AAV viral genome.

[0060] 50. The AAV viral genome of embodiment 1 or 2, wherein the first region and the second region encode a first siRNA molecule, and the third region and the fourth region encode a second siRNA molecule, wherein the first and the second siRNA molecules target a different target gene.

[0061] 51. The AAV viral genome of embodiment 3, wherein the fifth region and the sixth region encode a third siRNA molecule, wherein the first siRNA molecule, the second siRNA molecule and the third siRNA molecule each target a different target gene.

[0062] 52. The AAV viral genome of embodiment 4, wherein the seventh region and the eighth region encode a fourth siRNA molecule, wherein the first siRNA molecule, the second siRNA molecule, the third siRNA molecule and the fourth siRNA molecule each target a different target gene.

[0063] 53. An adeno-associated viral (AAV) viral genome comprising a nucleic acid sequence positioned between two inverted terminal repeats (ITRs), wherein said nucleic acid sequence comprises a first molecular scaffold region and a second molecular scaffold region, wherein said first molecular scaffold region comprises a first molecular scaffold nucleic acid sequence encoding:
[0064] (a) a first stem and loop to form a first stem-loop structure, the sequence of said first stem-loop structure from 5′ to 3′ comprising:
   [0065] i. a first UG motif at or near the base of the first 5′ stem of the first stem-loop structure;
   [0066] ii. a first 5′ stem arm comprising a first sense strand and optional first 5′ spacer region, wherein said first 5′ spacer region, when present, is located between said first UG motif and said first sense strand;
   [0067] iii. a first loop region comprising a first UGUG motif at the 5′ end of said first loop region;
   [0068] iv. a first 3′ stem arm comprising a first antisense strand and optionally a first 3′ spacer region, wherein a uridine is present at the 5′ end of said first antisense strand and wherein said first 3′ spacer region, when present, has a length sufficient to form one helical turn;
[0069] (b) a first 5′ flanking region located 5′ to said first stem-loop structure; and
[0070] (c) a first 3′ flanking region located 3′ to said first stem-loop structure, said first 3′ flanking region comprising a CNNC motif, and
   a second molecular scaffold region comprising a second molecular scaffold nucleic acid sequence encoding
[0071] (d) a second stem and loop to form a second stem-loop structure, the sequence of said second stem-loop structure from 5′ to 3′ comprising:
   [0072] v. a second UG motif at or near the base of the second 5′ stem of the second stem-loop structure;
   [0073] vi. a second 5′ stem arm comprising a second sense strand and optional second 5′ spacer region, wherein said second 5′ spacer region, when present, is located between said second UG motif and said second sense strand;
   [0074] vii. a second loop region comprising a second UGUG motif at the 5′ end of said second loop region;
   [0075] viii. a second 3′ stem arm comprising a second antisense strand and optionally a second 3′ spacer region, wherein a uridine is present at the 5′ end of said second antisense strand and wherein said second 3′ spacer region, when present, has a length sufficient to form one helical turn;
   [0076] ix. a second 5′ flanking region located 5′ to said second stem-loop structure; and
[0077] (e) a second 3′ flanking region located 3′ to said second stem-loop structure, said second 3′ flanking region comprising a CNNC motif, and
   wherein said first antisense strand and said first sense strand form a first siRNA duplex and said second antisense strand and said second sense strand form a second siRNA duplex, where the first siRNA duplex, when expressed, inhibits or suppresses the expression of a first target gene in a cell, and the second siRNA duplex, when expressed, inhibits or suppresses the expression of a second target gene in a cell, wherein the first and second sense strand sequences comprise at least 15 nucleotides, the first antisense strand sequence is complementary to an mRNA produced by the first target gene and second antisense strand sequences is complementary to an mRNA produced by the second target gene, and wherein said first sense strand sequence and first antisense strand sequence share a region of complementarity of at least four nucleotides in length and said second sense strand sequence and second antisense strand sequence share a region of complementarity of at least four nucleotides in length.

[0078] 54. Adeno-associated viral (AAV) viral genome comprising a nucleic acid sequence positioned between two inverted terminal repeats (ITRs), wherein said nucleic acid sequence comprises a first molecular scaffold region and a second molecular scaffold region, wherein said first molecular scaffold region comprises a first molecular scaffold nucleic acid sequence encoding:
[0079] (a) a first stem and loop to form a first stem-loop structure, the sequence of said first stem-loop structure from 5′ to 3′ comprising:
   [0080] i. a first UG motif at or near the base of the first 5′ stem of the first stem-loop structure;
   [0081] ii. a first 5′ stem arm comprising a first antisense strand and optional first 5′ spacer region, wherein said first 5′ spacer region, when present, is located between said first UG motif and said first antisense strand;
   [0082] iii. a first loop region comprising a first UGUG motif at the 5′ end of said first loop region;
   [0083] iv. a first 3′ stem arm comprising a first sense strand and optionally a first 3′ spacer region, wherein a uridine is present at the 5′ end of said first sense strand and wherein said first 3′ spacer region, when present, has a length sufficient to form one helical turn;
[0084] (b) a first 5′ flanking region located 5′ to said first stem-loop structure; and
[0085] (c) a first 3′ flanking region located 3′ to said first stem-loop structure, said first 3′ flanking region comprising a CNNC motif, and
   a second molecular scaffold region comprising a second molecular scaffold nucleic acid sequence encoding
[0086] (d) a second stem and loop to form a second stem-loop structure, the sequence of said second stem-loop structure from 5′ to 3′ comprising:
   [0087] v. a second UG motif at or near the base of the second 5′ stem of the second stem-loop structure;
   [0088] vi. a second 5′ stem arm comprising a second antisense strand and optional second 5′ spacer region, wherein said second 5′ spacer region, when present, is located between said second UG motif and said second antisense strand;
   [0089] vii. a second loop region comprising a second UGUG motif at the 5′ end of said second loop region;
   [0090] viii. a second 3′ stem arm comprising a second sense strand and optionally a second 3′ spacer region, wherein a uridine is present at the 5′ end of said second sense strand and wherein said second 3′ spacer region, when present, has a length sufficient to form one helical turn;
[0091] (e) a second 5′ flanking region located 5′ to said second stem-loop structure; and
[0092] (f) a second 3′ flanking region located 3′ to said second stem-loop structure, said second 3′ flanking region comprising a CNNC motif, and
   wherein said first antisense strand and said first sense strand form a first siRNA duplex and said second antisense strand and said second sense strand form a second siRNA duplex, where the first siRNA duplex, when expressed, inhibits or suppresses the expression of a first target gene in a cell, and the second siRNA duplex, when expressed, inhibits or suppresses the expression of a second target gene in a cell, wherein the first and second sense strand sequences comprise at least 15 nucleotides, the first antisense strand sequence is complementary to an mRNA produced by the first target gene and second antisense strand sequences is complementary to an mRNA produced by the second target gene, and wherein said first sense strand sequence and first antisense strand sequence share a region of complementarity of at least four nucleotides in length and said second sense strand sequence and second antisense strand sequence share a region of complementarity of at least four nucleotides in length.

[0093] 55. The AAV viral genome of embodiment 53 or 54, wherein the first antisense strand sequence or the second antisense strand sequence inhibits or suppresses the expression of Huntingtin.

[0094] 56. The AAV viral genome of embodiment 53 or 54, wherein the first antisense strand sequence and the second antisense sequence strand inhibits or suppresses the expression of Huntingtin.

[0095] 57. The AAV viral genome of embodiment 53 or 54, wherein the first antisense strand sequence or the second antisense strand sequence inhibits or suppresses the expression of SOD1.

[0096] 58. The AAV viral genome of embodiment 53 or 54, wherein the first antisense strand sequence and the second antisense strand sequence inhibits or suppresses the expression of SOD1.

[0097] 59. The AAV viral genome of embodiment 53 or 54, wherein the first 5′ flanking region is selected from the sequences listed in Table 10.

[0098] 60. The AAV viral genome of embodiment 53 or 54, wherein the second 5′ flanking region is selected from the sequences listed in Table 10.

[0099] 61. The AAV viral genome of embodiment 59, wherein the second 5′ flanking region is selected from the sequences listed in Table 10.

[0100] 62. The AAV viral genome of embodiment 53 or 54, wherein the first loop region is selected from the sequences listed in Table 11.

[0101] 63. The AAV viral genome of embodiment 53 or 54, wherein the second loop region is selected from the sequences listed in Table 11.

[0102] 64. The AAV viral genome of embodiment 62, wherein the second loop region is selected from the sequences listed in Table 11.

[0103] 65. The AAV viral genome of embodiment 53 or 54, wherein the first 3′ flanking region is selected from the sequences listed in Table 12.

[0104] 66. The AAV viral genome of embodiment 53 or 54, wherein the second 3′ flanking region is selected from the sequences listed in Table 12.

[0105] 67. The AAV viral genome of embodiment 65, wherein the second 3′ flanking region is selected from the sequences listed in Table 12.

[0106] 68. The AAV viral genome of embodiment 53 or 54, wherein the nucleic acid sequence comprises a promoter sequence between the first molecular scaffold nucleic acid sequence and the second molecular scaffold nucleic acid sequence.

[0107] 69. The AAV viral genome of embodiment 53 or 54, further comprising, in (b), a promoter 5′ of the first 5′ flanking region followed by the first 5′ flanking region and in (c) the first 3′ flanking region followed by a promoter terminator 3′ of the first '3 flanking region, and in (d), a promoter 5′ of the second 5′ flanking region followed by the second 5′ flanking region and in (e) the second 3′ flanking region followed by a promoter terminator 3′ of the second 3′ flanking region.

[0108] 70. The AAV viral genome of embodiment 69, wherein the promoter is a Pol III promoter.

[0109] 71. The AAV viral genome of embodiment 70, wherein the Pol III promoter sequence is a U3, U6, U7, 7SK, H1, or MRP, EBER, seleno-cysteine tRNA, 7SL, adenovirus VA-1, or telomerase gene promoter.

[0110] 72. The AAV viral genome of embodiment 71, wherein the Pol III promoter is an H1 promoter.

[0111] 73. The AAV viral genome of embodiment 53, wherein the nucleic acid sequence further comprises a third molecular scaffold region comprising a third molecular scaffold nucleic acid sequence encoding:
[0112] (g) a third stem and loop to form a third stem-loop structure, the sequence of said third stem-loop structure from 5′ to 3′ comprising:
   [0113] ix. a third UG motif at or near the base of the third 5′ stem of the third stem-loop structure;
   [0114] x. a third 5′ stem arm comprising a third sense strand and optional third 5′ spacer region, wherein said third 5′ spacer region, when present, is located between said third UG motif and said third sense strand;
   [0115] xi. a third loop region comprising a third UGUG motif at the 5′ end of said third loop region;
   [0116] xii. a third 3′ stem arm comprising a third antisense strand and optionally a third 3′ spacer region, wherein a uridine is present at the 5′ end of said third antisense strand and wherein said third 3′ spacer region, when present, has a length sufficient to form one helical turn;
[0117] (h) a third 5′ flanking region located 5′ to said third stem-loop structure; and
[0118] (i) a third 3′ flanking region located 3′ to said third stem-loop structure, said third 3′ flanking region comprising a CNNC motif, and
   wherein said third antisense strand and said third sense strand form a third siRNA duplex, wherein the third siRNA duplex, when expressed, inhibits or suppresses the expression of a third target gene in a cell, wherein the third sense strand sequence comprises at least 15 nucleotides, the third antisense strand sequence is complementary to an mRNA produced by the third target gene, and wherein said third sense strand sequence and third antisense strand sequence share a region of complementarity of at least four nucleotides in length.

[0119] 74. The AAV viral genome of embodiment 73, further comprising, in (h), a promoter 5′ of the third 5′ flanking region followed by the third 5′ flanking region, and in (i) the third 3′ flanking region followed by a promoter terminator 3′ of the third '3 flanking region.

[0120] 75. The AAV viral genome of embodiment 74, wherein the promoter is a Pol III promoter.

[0121] 76. The AAV viral genome of embodiment 75, wherein the Pol III promoter sequence is a U3, U6, U7, 7SK, H1, or MRP, EBER, seleno-cysteine tRNA, 7SL, adenovirus VA-1, or telomerase gene promoter.

[0122] 77. The AAV viral genome of embodiment 76, wherein the Pol III promoter is an H1 promoter.

[0123] 78. The AAV viral genome of embodiment 73, wherein the nucleic acid sequence further comprises a fourth molecular scaffold region comprising a fourth molecular scaffold nucleic acid sequence encoding
[0124] (j) a fourth stem and loop to form a fourth stem-loop structure, the sequence of said fourth stem-loop structure from 5′ to 3′ comprising:
   [0125] xiii. a fourth UG motif at or near the base of the fourth 5′ stem of the fourth stem-loop structure;
   [0126] xiv. a fourth 5′ stem arm comprising a fourth sense strand and optional fourth 5′ spacer region, wherein said fourth 5′ spacer region, when present, is located between said fourth UG motif and said fourth sense strand;
   [0127] xv. a fourth loop region comprising a fourth UGUG motif at the 5′ end of said fourth loop region;
   [0128] xvi. a fourth 3′ stem arm comprising a fourth antisense strand and optionally a fourth 3′ spacer region, wherein a uridine is present at the 5′ end of said fourth antisense strand and wherein said fourth 3′ spacer region, when present, has a length sufficient to form one helical turn;
[0129] (k) a fourth 5′ flanking region located 5′ to said fourth stem-loop structure; and
[0130] (l) a fourth 3′ flanking region located 3′ to said fourth stem-loop structure, said fourth 3′ flanking region comprising a CNNC motif, and
   wherein said fourth antisense strand and said fourth sense strand form a fourth siRNA duplex, wherein the fourth siRNA duplex, when expressed, inhibits or suppresses the expression of a fourth target gene in a cell, wherein the fourth sense strand sequence comprises at least 15 nucleotides, the fourth antisense strand sequence is complementary to an mRNA produced by the fourth target gene, and wherein said fourth sense strand sequence and fourth antisense strand sequence share a region of complementarity of at least four nucleotides in length.

[0131] 79. The AAV viral genome of embodiment 78, further comprising, in (k), a promoter 5′ of the fourth 5′ flanking region followed by the fourth 5′ flanking region, and in (l) the fourth 3′ flanking region followed by a promoter terminator 3′ of the fourth '3 flanking region.

[0132] 80. The AAV viral genome of embodiment 79, wherein the promoter is a Pol III promoter.

[0133] 81. The AAV viral genome of embodiment 80, wherein the Pol III promoter sequence is a U3, U6, U7, 7SK, H1, or MRP, EBER, seleno-cysteine tRNA, 7SL, adenovirus VA-1, or telomerase gene promoter.

[0134] 82. The AAV viral genome of embodiment 81, wherein the Pol III promoter is an H1 promoter.

[0135] 83. The AAV viral genome of any one of embodiments 53-82, wherein the first target gene is the same as the second target gene.

[0136] 84. The AAV viral genome of any one of embodiments 53-82, wherein the third target gene is the same as the first target gene.

[0137] 85. The AAV viral genome of any one of embodiments 53-82, wherein the third target gene is the same as the second target gene.

[0138] 86. The AAV viral genome of any one of embodiments 53-82, wherein the first target gene, the second target gene and the third target gene are the same.

[0139] 87. The AAV viral genome of any one of embodiments 53-82, wherein the fourth target gene is the same as the first target gene.

[0140] 88. The AAV viral genome of any one of embodiments 53-82, wherein the fourth target gene is the same as the second target gene.

[0141] 89. The AAV viral genome of any one of embodiments 53-82, wherein the fourth target gene is the same as the third target gene.

[0142] 90. The AAV viral genome of any one of embodiments 53-82, wherein the fourth target gene is the same as the first target gene and the second target gene.

[0143] 91. The AAV viral genome of embodiment 53-82, wherein the fourth target gene is the same as the second target gene and the third target gene.

[0144] 92. The AAV viral genome of embodiment 53-82, wherein the fourth target gene is the same as the first target gene and the third target gene.

[0145] 93. The AAV viral genome of any one of embodiments 53-82, wherein the fourth target gene is the same as the first target gene, the second target gene and the third target gene.

[0146] 94. The AAV viral genome of any one of embodiments 53-93 wherein the first target gene, the second target gene, the third target gene and/or the fourth target gene is Huntingtin.

[0147] 95. The AAV viral genome of any one of embodiments 53-93 wherein the first target gene, the second target gene, the third target gene and/or the fourth target gene is SOD1.

[0148] 96. The AAV viral genome of any one of embodiments 53-93 wherein the first target gene, the second target gene, the third target gene and/or the fourth target gene is Huntingtin or SOD1.

[0149] 97. A method for inhibiting the expression of a gene of a target gene in a cell comprising administering to the cell a composition comprising an AAV viral genome of any one of embodiments 1-96.

[0150] 98. The method of embodiment 97, wherein the cell is a mammalian cell.

[0151] 99. The method of embodiment 98, wherein the mammalian cell is a medium spiny neuron.

[0152] 100. The method of embodiment 98, wherein the mammalian cell is a cortical neuron.

[0153] 101. The method of embodiment 98, wherein the mammalian cell is a motor neuron.

[0154] 102. The method of embodiment 98, wherein the mammalian cell is an astrocyte.

[0155] 103. A method for treating a disease and/or disorder in a subject in need thereof, the method comprising administering to the subject a therapeutically effective amount of a composition comprising an AAV viral genome of any one of embodiments 1-96.

[0156] 104. The method of embodiment 103, wherein the expression of a target gene is inhibited or suppressed.

[0157] 105. The method of embodiment 104, wherein the expression of a target gene of interest is inhibited or suppressed by about 30% to about 70%.

[0158] 106. The method of embodiment 104, wherein the expression of a target gene is inhibited or suppressed by about 50% to about 90%.

[0159] 107. A method for inhibiting the expression of a target gene in a cell wherein the target gene causes a gain of function effect inside the cell, comprising administering to the cell a composition comprising an AAV viral genome of any one of embodiments 1-96.

[0160] 108. The method of embodiment 107, wherein the cell is a mammalian cell.

[0161] 109. The method of embodiment 108, wherein the mammalian cell is a medium spiny neuron.

[0162] 110. The method of embodiment 108, wherein the mammalian cell is a cortical neuron.

[0163] 111. The method of embodiment 108, wherein the mammalian cell is a motor neuron.

[0164] 112. The method of embodiment 108, wherein the mammalian cell is an astrocyte.

### BRIEF DESCRIPTION OF THE DRAWINGS

[0165] The foregoing and other objects, features and advantages will be apparent from the following description of particular embodiments of the invention, as illustrated in the accompanying drawings. The drawings are not necessarily to scale, emphasis instead being placed upon illustrating the principles of various embodiments of the invention.

[0166] FIG. 1 is a schematic of a viral genome of the invention.

[0167] FIG. 2 is a schematic of a viral genome of the invention.

[0168] FIG. 3 is a schematic of a viral genome of the invention.

[0169] FIG. 4 is a schematic of a viral genome of the invention.

[0170] FIG. 5 is a schematic of a viral genome of the invention.

[0171] FIG. 6 is a schematic of a viral genome of the invention.

[0172] FIG. 7 is a schematic of a viral genome of the invention.

[0173] FIG. 8 is a schematic of a viral genome of the invention.

[0174] FIG. 9 is a schematic of a viral genome of the invention.

[0175] The details of one or more embodiments of the invention are set forth in the accompanying description below. Although any materials and methods similar or equivalent to those described herein can be used in the practice or testing of the present invention, the preferred materials and methods are now described. Other features, objects and advantages of the invention will be apparent from the description. In the description, the singular forms also include the plural unless the context clearly dictates otherwise. Unless defined otherwise, all technical and scientific terms used herein have the same meaning as commonly understood by one of ordinary skill in the art to which this invention belongs. In the case of conflict, the present description will control.

### DETAILED DESCRIPTION OF THE INVENTION

### I. Compositions of the Invention

[0176] According to the present invention, compositions for delivering modulatory polynucleotides and/or modulatory polynucleotide-based compositions by adeno-associated viruses (AAVs) are provided. AAV particles of the invention may be provided via any of several routes of administration, to a cell, tissue, organ, or organism, in vivo, ex vivo or in vitro.

[0177] As used herein, an “AAV particle” is a virus which comprises a viral genome with at least one payload region and at least one inverted terminal repeat (ITR) region.

[0178] As used herein, “viral genome” or “vector genome” or “viral vector” refers to the nucleic acid sequence(s) encapsulated in an AAV particle. Viral genomes comprise at least one payload region encoding polypeptides or fragments thereof.

[0179] As used herein, a “payload” or “payload region” is any nucleic acid molecule which encodes one or more polypeptides of the invention. At a minimum, a payload region comprises nucleic acid sequences that encode a sense and antisense sequence, an siRNA-based composition, or a fragment thereof, but may also optionally comprise one or more functional or regulatory elements to facilitate transcriptional expression and/or polypeptide translation.

[0180] The nucleic acid sequences and polypeptides disclosed herein may be engineered to contain modular elements and/or sequence motifs assembled to enable expression of the modulatory polynucleotides and/or modulatory polynucleotide-based compositions of the invention. In some embodiments, the nucleic acid sequence comprising the payload region may comprise one or more of a promoter region, an intron, a Kozak sequence, an enhancer or a polyadenylation sequence. Payload regions of the invention typically encode at least one sense and antisense sequence, an siRNA-based composition, or fragments of the foregoing in combination with each other or in combination with other polypeptide moieties.

[0181] The payload regions of the invention may be delivered to one or more target cells, tissues, organs or organisms within the viral genome of an AAV particle.

### Adeno-Associated Viruses (AAVs) and AAV Particles

[0182] Viruses of the Parvoviridae family are small non-enveloped icosahedral capsid viruses characterized by a single stranded DNA genome. Parvoviridae family viruses consist of two subfamilies: Parvovirinae, which infect vertebrates, and Densovirinae, which infect invertebrates. Due to its relatively simple structure, easily manipulated using standard molecular biology techniques, this virus family is useful as a biological tool. The genome of the virus may be modified to contain a minimum of components for the assembly of a functional recombinant virus, or viral particle, which is loaded with or engineered to express or deliver a desired payload, which may be delivered to a target cell, tissue, organ, or organism.

[0183] The parvoviruses and other members of the Parvoviridae family are generally described in Kenneth I. Berns, “Parvoviridae: The Viruses and Their Replication,” Chapter 69 in FIELDS VIROLOGY (3d Ed. 1996), the contents of which are incorporated by reference in their entirety.

[0184] The Parvoviridae family comprises the Dependovirus genus which includes adeno-associated viruses (AAV) capable of replication in vertebrate hosts including, but not limited to, human, primate, bovine, canine, equine, and ovine species.

[0185] The AAV viral genome is a linear, single-stranded DNA (ssDNA) molecule approximately 5,000 nucleotides (nt) in length. The AAV viral genome can comprise a payload region and at least one inverted terminal repeat (ITR) or ITR region. ITRs traditionally flank the coding nucleotide sequences for the non-structural proteins (encoded by Rep genes) and the structural proteins (encoded by capsid genes or Cap genes). While not wishing to be bound by theory, an AAV viral genome typically comprises two ITR sequences. The AAV viral genome comprises a characteristic T-shaped hairpin structure defined by the self-complementary terminal 145 nt of the 5′ and 3′ ends of the ssDNA which form an energetically stable double stranded region. The double stranded hairpin structures comprise multiple functions including, but not limited to, acting as an origin for DNA replication by functioning as primers for the endogenous DNA polymerase complex of the host viral replication cell.

[0186] In addition to the encoded heterologous payload, AAV vectors may comprise the viral genome, in whole or in part, of any naturally occurring and/or recombinant AAV serotype nucleotide sequence or variant. AAV variants may have sequences of significant homology at the nucleic acid (genome or capsid) and amino acid levels (capsids), to produce constructs which are generally physical and functional equivalents, replicate by similar mechanisms, and assemble by similar mechanisms. Chiorini et al., J. Vir. 71: 6823-33(1997); Srivastava et al., J. Vir. 45:555-64 (1983); Chiorini et al., J. Vir. 73:1309-1319 (1999); Rutledge et al., J. Vir. 72:309-319 (1998); and Wu et al., J. Vir. 74: 8635-47 (2000), the contents of each of which are incorporated herein by reference in their entirety.

[0187] In one embodiment, AAV particles of the present invention are recombinant AAV vectors which are replication defective, lacking sequences encoding functional Rep and Cap proteins within their viral genome. These defective AAV vectors may lack most or all parental coding sequences and essentially carry only one or two AAV ITR sequences and the nucleic acid of interest for delivery to a cell, a tissue, an organ or an organism.

[0188] In one embodiment, the viral genome of the AAV particles of the present invention comprise at least one control element which provides for the replication, transcription and translation of a coding sequence encoded therein. Not all of the control elements need always be present as long as the coding sequence is capable of being replicated, transcribed and/or translated in an appropriate host cell. Non-limiting examples of expression control elements include sequences for transcription initiation and/or termination, promoter and/or enhancer sequences, efficient RNA processing signals such as splicing and polyadenylation signals, sequences that stabilize cytoplasmic mRNA, sequences that enhance translation efficacy (e.g., Kozak consensus sequence), sequences that enhance protein stability, and/or sequences that enhance protein processing and/or secretion.

[0189] According to the present invention, AAV particles for use in therapeutics and/or diagnostics comprise a virus that has been distilled or reduced to the minimum components necessary for transduction of a nucleic acid payload or cargo of interest. In this manner, AAV particles are engineered as vehicles for specific delivery while lacking the deleterious replication and/or integration features found in wild-type viruses.

[0190] AAV vectors of the present invention may be produced recombinantly and may be based on adeno-associated virus (AAV) parent or reference sequences. As used herein, a “vector” is any molecule or moiety which transports, transduces or otherwise acts as a carrier of a heterologous molecule such as the nucleic acids described herein.

[0191] In addition to single stranded AAV viral genomes (e.g., ssAAVs), the present invention also provides for self-complementary AAV (scAAVs) viral genomes. scAAV viral genomes contain DNA strands which anneal together to form double stranded DNA. By skipping second strand synthesis, scAAVs allow for rapid expression in the cell.

[0192] In one embodiment, the AAV particle of the present invention is an scAAV.

[0193] In one embodiment, the AAV particle of the present invention is an ssAAV.

[0194] Methods for producing and/or modifying AAV particles are disclosed in the art such as pseudotyped AAV vectors (PCT Patent Publication Nos. WO200028004; WO200123001; WO2004112727; WO 2005005610 and WO 2005072364, the content of each of which is incorporated herein by reference in its entirety).

[0195] AAV particles may be modified to enhance the efficiency of delivery. Such modified AAV particles can be packaged efficiently and be used to successfully infect the target cells at high frequency and with minimal toxicity. In some embodiments the capsids of the AAV particles are engineered according to the methods described in US Publication Number US 20130195801, the contents of which are incorporated herein by reference in their entirety.

[0196] In one embodiment, the AAV particles comprising a payload region encoding the polypeptides of the invention may be introduced into mammalian cells.

### AAV Serotypes

[0197] AAV particles of the present invention may comprise or be derived from any natural or recombinant AAV serotype. According to the present invention, the AAV particles may utilize or be based on a serotype selected from any of the following AAV1, AAV2, AAV2G9, AAV3, AAV3a, AAV3b, AAV3-3, AAV4, AAV4-4, AAV5, AAV6, AAV6.1, AAV6.2, AAV6.1.2, AAV7, AAV7.2, AAV8, AAV9, AAV9.11, AAV9.13, AAV9.16, AAV9.24, AAV9.45, AAV9.47, AAV9.61, AAV9.68, AAV9.84, AAV9.9, AAV10, AAV11, AAV12, AAV16.3, AAV24.1, AAV27.3, AAV42.12, AAV42-1b, AAV42-2, AAV42-3a, AAV42-3b, AAV42-4, AAV42-5a, AAV42-5b, AAV42-6b, AAV42-8, AAV42-10, AAV42-11, AAV42-12, AAV42-13, AAV42-15, AAV42-aa, AAV43-1, AAV43-12, AAV43-20, AAV43-21, AAV43-23, AAV43-25, AAV43-5, AAV44.1, AAV44.2, AAV44.5, AAV223.1, AAV223.2, AAV223.4, AAV223.5, AAV223.6, AAV223.7, AAV1-7/rh.48, AAV1-8/rh.49, AAV2-15/rh.62, AAV2-3/rh.61, AAV2-4/rh.50, AAV2-5/rh.51, AAV3.1/hu.6, AAV3.1/hu.9, AAV3-9/rh.52, AAV3-11/rh.53, AAV4-8/r11.64, AAV4-9/rh.54, AAV4-19/rh.55, AAV5-3/rh.57, AAV5-22/rh.58, AAV7.3/hu.7, AAV16.8/hu.10, AAV16.12/hu.11, AAV29.3/bb.1, AAV29.5/bb.2, AAV106.1/hu.37, AAV114.3/hu.40, AAV127.2/hu.41, AAV127.5/hu.42, AAV128.3/hu.44, AAV130.4/hu.48, AAV145.1/hu.53, AAV145.5/hu.54, AAV145.6/hu.55, AAV161.10/hu.60, AAV161.6/hu.61, AAV33.12/hu.17, AAV33.4/hu.15, AAV33.8/hu.16, AAV52/hu.19, AAV52.1/hu.20, AAV58.2/hu.25, AAVA3.3, AAVA3.4, AAVA3.5, AAVA3.7, AAVC1, AAVC2, AAVC5, AAV-DJ, AAV-DJ8, AAVF3, AAVF5, AAVH2, AAVrh.72, AAVhu.8, AAVrh.68, AAVrh.70, AAVpi.1, AAVpi.3, AAVpi.2, AAVrh.60, AAVrh.44, AAVrh.65, AAVrh.55, AAVrh.47, AAVrh.69, AAVrh.45, AAVrh.59, AAVhu.12, AAVH6, AAVLK03, AAVH-1/hu.1, AAVH-5/hu.3, AAVLG-10/rh.40, AAVLG-4/rh.38, AAVLG-9/hu.39, AAVN721-8/rh.43, AAVCh.5, AAVCh.5R1, AAVcy.2, AAVcy.3, AAVcy.4, AAVcy.5, AAVCy.5R1, AAVCy.5R2, AAVCy.5R3, AAVCy.5R4, AAVcy.6, AAVhu.1, AAVhu.2, AAVhu.3, AAVhu.4, AAVhu.5, AAVhu.6, AAVhu.7, AAVhu.9, AAVhu.10, AAVhu.11, AAVhu.13, AAVhu.15, AAVhu.16, AAVhu.17, AAVhu.18, AAVhu.20, AAVhu.21, AAVhu.22, AAVhu.23.2, AAVhu.24, AAVhu.25, AAVhu.27, AAVhu.28, AAVhu.29, AAVhu.29R, AAVhu.31, AAVhu.32, AAVhu.34, AAVhu.35, AAVhu.37, AAVhu.39, AAVhu.40, AAVhu.41, AAVhu.42, AAVhu.43, AAVhu.44, AAVhu.44R1, AAVhu.44R2, AAVhu.44R3, AAVhu.45, AAVhu.46, AAVhu.47, AAVhu.48, AAVhu.48R1, AAVhu.48R2, AAVhu.48R3, AAVhu.49, AAVhu.51, AAVhu.52, AAVhu.54, AAVhu.55, AAVhu.56, AAVhu.57, AAVhu.58, AAVhu.60, AAVhu.61, AAVhu.63, AAVhu.64, AAVhu.66, AAVhu.67, AAVhu.14/9, AAVhu.t 19, AAVrh.2, AAVrh.2R, AAVrh.8, AAVrh.8R, AAVrh.10, AAVrh.12, AAVrh.13, AAVrh.13R, AAVrh.14, AAVrh.17, AAVrh.18, AAVrh.19, AAVrh.20, AAVrh.21, AAVrh.22, AAVrh.23, AAVrh.24, AAVrh.25, AAVrh.31, AAVrh.32, AAVrh.33, AAVrh.34, AAVrh.35, AAVrh.36, AAVrh.37, AAVrh.37R2, AAVrh.38, AAVrh.39, AAVrh.40, AAVrh.46, AAVrh.48, AAVrh.48.1, AAVrh.48.1.2, AAVrh.48.2, AAVrh.49, AAVrh.51, AAVrh.52, AAVrh.53, AAVrh.54, AAVrh.56, AAVrh.57, AAVrh.58, AAVrh.61, AAVrh.64, AAVrh.64R1, AAVrh.64R2, AAVrh.67, AAVrh.73, AAVrh.74, AAVrh8R, AAVrh8R A586R mutant, AAVrh8R R533A mutant, AAAV, BAAV, caprine AAV, bovine AAV, ovine AAV, AAVhE1.1, AAVhEr1.5, AAVhER1.14, AAVhEr1.8, AAVhEr1.16, AAVhEr1.18, AAVhEr1.35, AAVhEr1.7, AAVhEr1.36, AAVhEr2.29, AAVhEr2.4, AAVhEr2.16, AAVhEr2.30, AAVhEr2.31, AAVhEr2.36, AAVhER1.23, AAVhEr3.1, AAV2.5T, AAV-PAEC, AAV-LK01, AAV-LK02, AAV-LK03, AAV-LK04, AAV-LK05, AAV-LK06, AAV-LK07, AAV-LK08, AAV-LK09, AAV-LK10, AAV-LK11, AAV-LK12, AAV-LK13, AAV-LK14, AAV-LK15, AAV-LK16, AAV-LK17, AAV-LK18, AAV-LK19, AAV-PAEC2, AAV-PAEC4, AAV-PAEC6, AAV-PAEC7, AAV-PAEC8, AAV-PAEC11, AAV-PAEC12, AAV-2-pre-miRNA-101, AAV-8h, AAV-8b, AAV-h, AAV-b, AAV SM 10-2, AAV Shuffle 100-1, AAV Shuffle 100-3, AAV Shuffle 100-7, AAV Shuffle 10-2, AAV Shuffle 10-6, AAV Shuffle 10-8, AAV Shuffle 100-2, AAV SM 10-1, AAV SM 10-8, AAV SM 100-3, AAV SM 100-10, BNP61 AAV, BNP62 AAV, BNP63 AAV, AAVrh.50, AAVrh.43, AAVrh.62, AAVrh.48, AAVhu.19, AAVhu.11, AAVhu.53, AAV4-8/rh.64, AAVLG-9/hu.39, AAV54.5/hu.23, AAV54.2/hu.22, AAV54.7/hu.24, AAV54.1/hu.21, AAV54.4R/hu.27, AAV46.2/hu.28, AAV46.6/hu.29, AAV128.1/hu.43, true type AAV (ttAAV), UPENN AAV 10, Japanese AAV 10 serotypes, AAV CBr-7.1, AAV CBr-7.10, AAV CBr-7.2, AAV CBr-7.3, AAV CBr-7.4, AAV CBr-7.5, AAV CBr-7.7, AAV CBr-7.8, AAV CBr-B7.3, AAV CBr-B7.4, AAV CBr-E1, AAV CBr-E2, AAV CBr-E3, AAV CBr-E4, AAV CBr-E5, AAV CBr-e5, AAV CBr-E6, AAV CBr-E7, AAV CBr-E8, AAV CHt-1, AAV CHt-2, AAV CHt-3, AAV CHt-6.1, AAV CHt-6.10, AAV CHt-6.5, AAV CHt-6.6, AAV CHt-6.7, AAV CHt-6.8, AAV CHt-P1, AAV CHt-P2, AAV CHt-P5, AAV CHt-P6, AAV CHt-P8, AAV CHt-P9, AAV CKd-1, AAV CKd-10, AAV CKd-2, AAV CKd-3, AAV CKd-4, AAV CKd-6, AAV CKd-7, AAV CKd-8, AAV CKd-B1, AAV CKd-B2, AAV CKd-B3, AAV CKd-B4, AAV CKd-B5, AAV CKd-B6, AAV CKd-B7, AAV CKd-B8, AAV CKd-H1, AAV CKd-H2, AAV CKd-H3, AAV CKd-H4, AAV CKd-H5, AAV CKd-H6, AAV CKd-N3, AAV CKd-N4, AAV CKd-N9, AAV CLg-F1, AAV CLg-F2, AAV CLg-F3, AAV CLg-F4, AAV CLg-F5, AAV CLg-F6, AAV CLg-F7, AAV CLg-F8, AAV CLv-1, AAV CLv1-1, AAV Clv1-10, AAV CLv1-2, AAV CLv-12, AAV CLv1-3, AAV CLv-13, AAV CLv1-4, AAV Clv1-7, AAV Clv1-8, AAV Clv1-9, AAV CLv-2, AAV CLv-3, AAV CLv-4, AAV CLv-6, AAV CLv-8, AAV CLv-D1, AAV CLv-D2, AAV CLv-D3, AAV CLv-D4, AAV CLv-D5, AAV CLv-D6, AAV CLv-D7, AAV CLv-D8, AAV CLv-E1, AAV CLv-K1, AAV CLv-K3, AAV CLv-K6, AAV CLv-L4, AAV CLv-L5, AAV CLv-L6, AAV CLv-M1, AAV CLv-M11, AAV CLv-M2, AAV CLv-M5, AAV CLv-M6, AAV CLv-M7, AAV CLv-M8, AAV CLv-M9, AAV CLv-R1, AAV CLv-R2, AAV CLv-R3, AAV CLv-R4, AAV CLv-R5, AAV CLv-R6, AAV CLv-R7, AAV CLv-R8, AAV CLv-R9, AAV CSp-1, AAV CSp-10, AAV CSp-11, AAV CSp-2, AAV CSp-3, AAV CSp-4, AAV CSp-6, AAV CSp-7, AAV CSp-8, AAV CSp-8.10, AAV CSp-8.2, AAV CSp-8.4, AAV CSp-8.5, AAV CSp-8.6, AAV CSp-8.7, AAV CSp-8.8, AAV CSp-8.9, AAV CSp-9, AAV.hu.48R3, AAV.VR-355, AAV3B, AAV4, AAV5, AAVF1/HSC1, AAVF11/HSC11, AAVF12/HSC12, AAVF13/HSC13, AAVF14/HSC14, AAVF15/HSC15, AAVF16/HSC16, AAVF17/HSC17, AAVF2/HSC2, AAVF3/HSC3, AAVF4/HSC4, AAVF5/HSC5, AAVF6/HSC6, AAVF7/HSC7, AAVF8/HSC8, AAVF9/HSC9, AAV-PHP.B (PHP.B), AAV-PHP.A (PHP.A), G2B-26, G2B-13, TH1.1-32, TH1.1-35, AAVPHP.B2, AAVPHP.B3, AAVPHP.N/PHP.B-DGT, AAVPHP.B-EST, AAVPHP.B-GGT, AAVPHP.B-ATP, AAVPHP.B-ATT-T, AAVPHP.B-DGT-T, AAVPHP.B-GGT-T, AAVPHP.B-SGS, AAVPHP.B-AQP, AAVPHP.B-QQP, AAVPHP.B-SNP(3), AAVPHP.B-SNP, AAVPHP.B-QGT, AAVPHP.B-NQT, AAVPHP.B-EGS, AAVPHP.B-SGN, AAVPHP.B-EGT, AAVPHP.B-DST, AAVPHP.B-DST, AAVPHP.B-STP, AAVPHP.B-PQP, AAVPHP.B-SQP, AAVPHP.B-QLP, AAVPHP.B-TMP, AAVPHP.B-TTP, AAVPHP.S/G2A12, AAVG2A15/G2A3, AAVG2B4, AAVG2B5 and variants thereof.

[0198] In some embodiments, the AAV serotype may be, or have, a sequence as described in United States Publication No. US20030138772, the contents of which are herein incorporated by reference in their entirety, such as, but not limited to, AAV1 (SEQ ID NO: 6 and 64 of US20030138772), AAV2 (SEQ ID NO: 7 and 70 of US20030138772), AAV3 (SEQ ID NO: 8 and 71 of US20030138772), AAV4 (SEQ ID NO: 63 of US20030138772), AAV5 (SEQ ID NO: 114 of US20030138772), AAV6 (SEQ ID NO: 65 of US20030138772), AAV7 (SEQ ID NO: 1-3 of US20030138772), AAV8 (SEQ ID NO: 4 and 95 of US20030138772), AAV9 (SEQ ID NO: 5 and 100 of US20030138772), AAV10 (SEQ ID NO: 117 of US20030138772), AAV11 (SEQ ID NO: 118 of US20030138772), AAV12 (SEQ ID NO: 119 of US20030138772), AAVrh10 (amino acids 1 to 738 of SEQ ID NO: 81 of US20030138772), AAV16.3 (US20030138772 SEQ ID NO: 10), AAV29.3/bb.1 (US20030138772 SEQ ID NO: 11), AAV29.4 (US20030138772 SEQ ID NO: 12), AAV29.5/bb.2 (US20030138772 SEQ ID NO: 13), AAV1.3 (US20030138772 SEQ ID NO: 14), AAV13.3 (US20030138772 SEQ ID NO: 15), AAV24.1 (US20030138772 SEQ ID NO: 16), AAV27.3 (US20030138772 SEQ ID NO: 17), AAV7.2 (US20030138772 SEQ ID NO: 18), AAVC1 (US20030138772 SEQ ID NO: 19), AAVC3 (US20030138772 SEQ ID NO: 20), AAVC5 (US20030138772 SEQ ID NO: 21), AAVF1 (US20030138772 SEQ ID NO: 22), AAVF3 (US20030138772 SEQ ID NO: 23), AAVF5 (US20030138772 SEQ ID NO: 24), AAVH6 (US20030138772 SEQ ID NO: 25), AAVH2 (US20030138772 SEQ ID NO: 26), AAV42-8 (US20030138772 SEQ ID NO: 27), AAV42-15 (US20030138772 SEQ ID NO: 28), AAV42-5b (US20030138772 SEQ ID NO: 29), AAV42-1b (US20030138772 SEQ ID NO: 30), AAV42-13 (US20030138772 SEQ ID NO: 31), AAV42-3a (US20030138772 SEQ ID NO: 32), AAV42-4 (US20030138772 SEQ ID NO: 33), AAV42-5a (US20030138772 SEQ ID NO: 34), AAV42-10 (US20030138772 SEQ ID NO: 35), AAV42-3b (US20030138772 SEQ ID NO: 36), AAV42-11 (US20030138772 SEQ ID NO: 37), AAV42-6b (US20030138772 SEQ ID NO: 38), AAV43-1 (US20030138772 SEQ ID NO: 39), AAV43-5 (US20030138772 SEQ ID NO: 40), AAV43-12 (US20030138772 SEQ ID NO: 41), AAV43-20 (US20030138772 SEQ ID NO: 42), AAV43-21 (US20030138772 SEQ ID NO: 43), AAV43-23 (US20030138772 SEQ ID NO: 44), AAV43-25 (US20030138772 SEQ ID NO: 45), AAV44.1 (US20030138772 SEQ ID NO: 46), AAV44.5 (US20030138772 SEQ ID NO: 47), AAV223.1 (US20030138772 SEQ ID NO: 48), AAV223.2 (US20030138772 SEQ ID NO: 49), AAV223.4 (US20030138772 SEQ ID NO: 50), AAV223.5 (US20030138772 SEQ ID NO: 51), AAV223.6 (US20030138772 SEQ ID NO: 52), AAV223.7 (US20030138772 SEQ ID NO: 53), AAVA3.4 (US20030138772 SEQ ID NO: 54), AAVA3.5 (US20030138772 SEQ ID NO: 55), AAVA3.7 (US20030138772 SEQ ID NO: 56), AAVA3.3 (US20030138772 SEQ ID NO: 57), AAV42.12 (US20030138772 SEQ ID NO: 58), AAV44.2 (US20030138772 SEQ ID NO: 59), AAV42-2 (US20030138772 SEQ ID NO: 9), or variants thereof.

[0199] In some embodiments, the AAV serotype may be, or have, a sequence as described in United States Publication No. US20150159173, the contents of which are herein incorporated by reference in their entirety, such as, but not limited to, AAV2 (SEQ ID NO: 7 and 23 of US20150159173), rh20 (SEQ ID NO: 1 of US20150159173), rh32/33 (SEQ ID NO: 2 of US20150159173), rh39 (SEQ ID NO: 3, 20 and 36 of US20150159173), rh46 (SEQ ID NO: 4 and 22 of US20150159173), rh73 (SEQ ID NO: 5 of US20150159173), rh74 (SEQ ID NO: 6 of US20150159173), AAV6.1 (SEQ ID NO: 29 of US20150159173), rh.8 (SEQ ID NO: 41 of US20150159173), rh.48.1 (SEQ ID NO: 44 of US20150159173), hu.44 (SEQ ID NO: 45 of US20150159173), hu.29 (SEQ ID NO: 42 of US20150159173), hu.48 (SEQ ID NO: 38 of US20150159173), rh54 (SEQ ID NO: 49 of US20150159173), AAV2 (SEQ ID NO: 7 of US20150159173), cy.5 (SEQ ID NO: 8 and 24 of US20150159173), rh.10 (SEQ ID NO: 9 and 25 of US20150159173), rh.13 (SEQ ID NO: 10 and 26 of US20150159173), AAV1 (SEQ ID NO: 11 and 27 of US20150159173), AAV3 (SEQ ID NO: 12 and 28 of US20150159173), AAV6 (SEQ ID NO: 13 and 29 of US20150159173), AAV7 (SEQ ID NO: 14 and 30 of US20150159173), AAV8 (SEQ ID NO: 15 and 31 of US20150159173), hu.13 (SEQ ID NO: 16 and 32 of US20150159173), hu.26 (SEQ ID NO: 17 and 33 of US20150159173), hu.37 (SEQ ID NO: 18 and 34 of US20150159173), hu.53 (SEQ ID NO: 19 and 35 of US20150159173), rh.43 (SEQ ID NO: 21 and 37 of US20150159173), rh2 (SEQ ID NO: 39 of US20150159173), rh.37 (SEQ ID NO: 40 of US20150159173), rh.64 (SEQ ID NO: 43 of US20150159173), rh.48 (SEQ ID NO: 44 of US20150159173), ch.5 (SEQ ID NO 46 of US20150159173), rh.67 (SEQ ID NO: 47 of US20150159173), rh.58 (SEQ ID NO: 48 of US20150159173), or variants thereof including, but not limited to Cy5R1, Cy5R2, Cy5R3, Cy5R4, rh.13R, rh.37R2, rh.2R, rh.8R, rh.48.1, rh.48.2, rh.48.1.2, hu.44R1, hu.44R2, hu.44R3, hu.29R, ch.5R1, rh64R1, rh64R2, AAV6.2, AAV6.1, AAV6.12, hu.48R1, hu.48R2, and hu.48R3.

[0200] In some embodiments, the AAV serotype may be, or have, a sequence as described in U.S. Pat. No. 7,198,951, the contents of which are herein incorporated by reference in their entirety, such as, but not limited to, AAV9 (SEQ ID NO: 1-3 of U.S. Pat. No. 7,198,951), AAV2 (SEQ ID NO: 4 of U.S. Pat. No. 7,198,951), AAV1 (SEQ ID NO: 5 of U.S. Pat. No. 7,198,951), AAV3 (SEQ ID NO: 6 of U.S. Pat. No. 7,198,951), and AAV8 (SEQ ID NO: 7 of U.S. Pat. No. 7,198,951).

[0201] In some embodiments, the AAV serotype may be, or have, a mutation in the AAV9 sequence as described by N Pulicherla et al. (Molecular Therapy 19(6):1070-1078 (2011), herein incorporated by reference in its entirety), such as but not limited to, AAV9.9, AAV9.11, AAV9.13, AAV9.16, AAV9.24, AAV9.45, AAV9.47, AAV9.61, AAV9.68, AAV9.84.

[0202] In some embodiments, the AAV serotype may be, or have, a sequence as described in U.S. Pat. No. 6,156,303, the contents of which are herein incorporated by reference in their entirety, such as, but not limited to, AAV3B (SEQ ID NO: 1 and 10 of U.S. Pat. No. 6,156,303), AAV6 (SEQ ID NO: 2, 7 and 11 of U.S. Pat. No. 6,156,303), AAV2 (SEQ ID NO: 3 and 8 of U.S. Pat. No. 6,156,303), AAV3A (SEQ ID NO: 4 and 9, of U.S. Pat. No. 6,156,303), or derivatives thereof.

[0203] In some embodiments, the AAV serotype may be, or have, a sequence as described in United States Publication No. US20140359799, the contents of which are herein incorporated by reference in their entirety, such as, but not limited to, AAV8 (SEQ ID NO: 1 of US20140359799), AAVDJ (SEQ ID NO: 2 and 3 of US20140359799), or variants thereof.

[0204] In some embodiments, the serotype may be AAVDJ (AAV-DJ) or a variant thereof, such as AAVDJ8 (or AAV-DJ8), as described by Grimm et al. (Journal of Virology 82(12): 5887-5911 (2008), herein incorporated by reference in its entirety). The amino acid sequence of AAVDJ8 may comprise two or more mutations in order to remove the heparin binding domain (HBD). As a non-limiting example, the AAV-DJ sequence described as SEQ ID NO: 1 in U.S. Pat. No. 7,588,772, the contents of which are herein incorporated by reference in their entirety, may comprise two mutations: (1) R587Q where arginine (R; Arg) at amino acid 587 is changed to glutamine (Q; Gln) and (2) R590T where arginine (R; Arg) at amino acid 590 is changed to threonine (T; Thr). As another non-limiting example, may comprise three mutations: (1) K406R where lysine (K; Lys) at amino acid 406 is changed to arginine (R; Arg), (2) R587Q where arginine (R; Arg) at amino acid 587 is changed to glutamine (Q; Gln) and (3) R590T where arginine (R; Arg) at amino acid 590 is changed to threonine (T; Thr).

[0205] In some embodiments, the AAV serotype may be, or have, a sequence of AAV4 as described in International Publication No. WO1998011244, the contents of which are herein incorporated by reference in their entirety, such as, but not limited to AAV4 (SEQ ID NO: 1-20 of WO1998011244).

[0206] In some embodiments, the AAV serotype may be, or have, a mutation in the AAV2 sequence to generate AAV2G9 as described in International Publication No. WO2014144229 and herein incorporated by reference in its entirety.

[0207] In some embodiments, the AAV serotype may be, or have, a sequence as described in International Publication No. WO2005033321, the contents of which are herein incorporated by reference in their entirety, such as, but not limited to AAV3-3 (SEQ ID NO: 217 of WO2005033321), AAV1 (SEQ ID NO: 219 and 202 of WO2005033321), AAV106.1/hu.37 (SEQ ID No: 10 of WO2005033321), AAV114.3/hu.40 (SEQ ID No: 11 of WO2005033321), AAV127.2/hu.41 (SEQ ID NO:6 and 8 of WO2005033321), AAV128.3/hu.44 (SEQ ID No: 81 of WO2005033321), AAV130.4/hu.48 (SEQ ID NO: 78 of WO2005033321), AAV145.1/hu.53 (SEQ ID No: 176 and 177 of WO2005033321), AAV145.6/hu.56 (SEQ ID NO: 168 and 192 of WO2005033321), AAV16.12/hu.11 (SEQ ID NO: 153 and 57 of WO2005033321), AAV16.8/hu.10 (SEQ ID NO: 156 and 56 of WO2005033321), AAV161.10/hu.60 (SEQ ID No: 170 of WO2005033321), AAV161.6/hu.61 (SEQ ID No: 174 of WO2005033321), AAV1-7/rh.48 (SEQ ID NO: 32 of WO2005033321), AAV1-8/rh.49 (SEQ ID NOs: 103 and 25 of WO2005033321), AAV2 (SEQ ID NO: 211 and 221 of WO2005033321), AAV2-15/rh.62 (SEQ ID No: 33 and 114 of WO2005033321), AAV2-3/rh.61 (SEQ ID NO: 21 of WO2005033321), AAV2-4/rh.50 (SEQ ID No: 23 and 108 of WO2005033321), AAV2-5/rh.51 (SEQ ID NO: 104 and 22 of WO2005033321), AAV3.1/hu.6 (SEQ ID NO: 5 and 84 of WO2005033321), AAV3.1/hu.9 (SEQ ID NO: 155 and 58 of WO2005033321), AAV3-11/rh.53 (SEQ ID NO: 186 and 176 of WO2005033321), AAV3-3 (SEQ ID NO: 200 of WO2005033321), AAV33.12/hu.17 (SEQ ID NO:4 of WO2005033321), AAV33.4/hu.15 (SEQ ID No: 50 of WO2005033321), AAV33.8/hu.16 (SEQ ID No: 51 of WO2005033321), AAV3-9/rh.52 (SEQ ID NO: 96 and 18 of WO2005033321), AAV4-19/rh.55 (SEQ ID NO: 117 of WO2005033321), AAV4-4 (SEQ ID NO: 201 and 218 of WO2005033321), AAV4-9/rh.54 (SEQ ID NO: 116 of WO2005033321), AAV5 (SEQ ID NO: 199 and 216 of WO2005033321), AAV52.1/hu.20 (SEQ ID NO: 63 of WO2005033321), AAV52/hu.19 (SEQ ID NO: 133 of WO2005033321), AAV5-22/rh.58 (SEQ ID No: 27 of WO2005033321), AAV5-3/rh.57 (SEQ ID NO: 105 of WO2005033321), AAV5-3/rh.57 (SEQ ID No: 26 of WO2005033321), AAV58.2/hu.25 (SEQ ID No: 49 of WO2005033321), AAV6 (SEQ ID NO: 203 and 220 of WO2005033321), AAV7 (SEQ ID NO: 222 and 213 of WO2005033321), AAV7.3/hu.7 (SEQ ID No: 55 of WO2005033321), AAV8 (SEQ ID NO: 223 and 214 of WO2005033321), AAVH-1/hu.1 (SEQ ID No: 46 of WO2005033321), AAVH-5/hu.3 (SEQ ID No: 44 of WO2005033321), AAVhu.1 (SEQ ID NO: 144 of WO2005033321), AAVhu.10 (SEQ ID NO: 156 of WO2005033321), AAVhu.11 (SEQ ID NO: 153 of WO2005033321), AAVhu.12 (WO2005033321 SEQ ID NO: 59), AAVhu.13 (SEQ ID NO: 129 of WO2005033321), AAVhu.14/AAV9 (SEQ ID NO: 123 and 3 of WO2005033321), AAVhu.15 (SEQ ID NO: 147 of WO2005033321), AAVhu.16 (SEQ ID NO: 148 of WO2005033321), AAVhu.17 (SEQ ID NO: 83 of WO2005033321), AAVhu.18 (SEQ ID NO: 149 of WO2005033321), AAVhu.19 (SEQ ID NO: 133 of WO2005033321), AAVhu.2 (SEQ ID NO: 143 of WO2005033321), AAVhu.20 (SEQ ID NO: 134 of WO2005033321), AAVhu.21 (SEQ ID NO: 135 of WO2005033321), AAVhu.22 (SEQ ID NO: 138 of WO2005033321), AAVhu.23.2 (SEQ ID NO: 137 of WO2005033321), AAVhu.24 (SEQ ID NO: 136 of WO2005033321), AAVhu.25 (SEQ ID NO: 146 of WO2005033321), AAVhu.27 (SEQ ID NO: 140 of WO2005033321), AAVhu.29 (SEQ ID NO: 132 of WO2005033321), AAVhu.3 (SEQ ID NO: 145 of WO2005033321), AAVhu.31 (SEQ ID NO: 121 of WO2005033321), AAVhu.32 (SEQ ID NO: 122 of WO2005033321), AAVhu.34 (SEQ ID NO: 125 of WO2005033321), AAVhu.35 (SEQ ID NO: 164 of WO2005033321), AAVhu.37 (SEQ ID NO: 88 of WO2005033321), AAVhu.39 (SEQ ID NO: 102 of WO2005033321), AAVhu.4 (SEQ ID NO: 141 of WO2005033321), AAVhu.40 (SEQ ID NO: 87 of WO2005033321), AAVhu.41 (SEQ ID NO: 91 of WO2005033321), AAVhu.42 (SEQ ID NO: 85 of WO2005033321), AAVhu.43 (SEQ ID NO: 160 of WO2005033321), AAVhu.44 (SEQ ID NO: 144 of WO2005033321), AAVhu.45 (SEQ ID NO: 127 of WO2005033321), AAVhu.46 (SEQ ID NO: 159 of WO2005033321), AAVhu.47 (SEQ ID NO: 128 of WO2005033321), AAVhu.48 (SEQ ID NO: 157 of WO2005033321), AAVhu.49 (SEQ ID NO: 189 of WO2005033321), AAVhu.51 (SEQ ID NO: 190 of WO2005033321), AAVhu.52 (SEQ ID NO: 191 of WO2005033321), AAVhu.53 (SEQ ID NO: 186 of WO2005033321), AAVhu.54 (SEQ ID NO: 188 of WO2005033321), AAVhu.55 (SEQ ID NO: 187 of WO2005033321), AAVhu.56 (SEQ ID NO: 192 of WO2005033321), AAVhu.57 (SEQ ID NO: 193 of WO2005033321), AAVhu.58 (SEQ ID NO: 194 of WO2005033321), AAVhu.6 (SEQ ID NO: 84 of WO2005033321), AAVhu.60 (SEQ ID NO: 184 of WO2005033321), AAVhu.61 (SEQ ID NO: 185 of WO2005033321), AAVhu.63 (SEQ ID NO: 195 of WO2005033321), AAVhu.64 (SEQ ID NO: 196 of WO2005033321), AAVhu.66 (SEQ ID NO: 197 of WO2005033321), AAVhu.67 (SEQ ID NO: 198 of WO2005033321), AAVhu.7 (SEQ ID NO: 150 of WO2005033321), AAVhu.8 (WO2005033321 SEQ ID NO: 12), AAVhu.9 (SEQ ID NO: 155 of WO2005033321), AAVLG-10/rh.40 (SEQ ID No: 14 of WO2005033321), AAVLG-4/rh.38 (SEQ ID NO: 86 of WO2005033321), AAVLG-4/rh.38 (SEQ ID No: 7 of WO2005033321), AAVN721-8/rh.43 (SEQ ID NO: 163 of WO2005033321), AAVN721-8/rh.43 (SEQ ID No: 43 of WO2005033321), AAVpi.1 (WO2005033321 SEQ ID NO: 28), AAVpi.2 (WO2005033321 SEQ ID NO: 30), AAVpi.3 (WO2005033321 SEQ ID NO: 29), AAVrh.38 (SEQ ID NO: 86 of WO2005033321), AAVrh.40 (SEQ ID NO: 92 of WO2005033321), AAVrh.43 (SEQ ID NO: 163 of WO2005033321), AAVrh.44 (WO2005033321 SEQ ID NO: 34), AAVrh.45 (WO2005033321 SEQ ID NO: 41), AAVrh.47 (WO2005033321 SEQ ID NO: 38), AAVrh.48 (SEQ ID NO: 115 of WO2005033321), AAVrh.49 (SEQ ID NO: 103 of WO2005033321), AAVrh.50 (SEQ ID NO: 108 of WO2005033321), AAVrh.51 (SEQ ID NO: 104 of WO2005033321), AAVrh.52 (SEQ ID NO: 96 of WO2005033321), AAVrh.53 (SEQ ID NO: 97 of WO2005033321), AAVrh.55 (WO2005033321 SEQ ID NO: 37), AAVrh.56 (SEQ ID NO: 152 of WO2005033321), AAVrh.57 (SEQ ID NO: 105 of WO2005033321), AAVrh.58 (SEQ ID NO: 106 of WO2005033321), AAVrh.59 (WO2005033321 SEQ ID NO: 42), AAVrh.60 (WO2005033321 SEQ ID NO: 31), AAVrh.61 (SEQ ID NO: 107 of WO2005033321), AAVrh.62 (SEQ ID NO: 114 of WO2005033321), AAVrh.64 (SEQ ID NO: 99 of WO2005033321), AAVrh.65 (WO2005033321 SEQ ID NO: 35), AAVrh.68 (WO2005033321 SEQ ID NO: 16), AAVrh.69 (WO2005033321 SEQ ID NO: 39), AAVrh.70 (WO2005033321 SEQ ID NO: 20), AAVrh.72 (WO2005033321 SEQ ID NO: 9), or variants thereof including, but not limited to, AAVcy.2, AAVcy.3, AAVcy.4, AAVcy.5, AAVcy.6, AAVrh.12, AAVrh.17, AAVrh.18, AAVrh.19, AAVrh.21, AAVrh.22, AAVrh.23, AAVrh.24, AAVrh.25, AAVrh.25/42 15, AAVrh.31, AAVrh.32, AAVrh.33, AAVrh.34, AAVrh.35, AAVrh.36, AAVrh.37, AAVrh14. Non limiting examples of variants include SEQ ID NO: 13, 15, 17, 19, 24, 36, 40, 45, 47, 48, 51-54, 60-62, 64-77, 79, 80, 82, 89, 90, 93-95, 98, 100, 101, 109-113, 118-120, 124, 126, 131, 139, 142, 151,154, 158, 161, 162, 165-183, 202, 204-212, 215, 219, 224-236, of WO2005033321, the contents of which are herein incorporated by reference in their entirety.

[0208] In some embodiments, the AAV serotype may be, or have, a sequence as described in International Publication No. WO2015168666, the contents of which are herein incorporated by reference in their entirety, such as, but not limited to, AAVrh8R (SEQ ID NO: 9 of WO2015168666), AAVrh8R A586R mutant (SEQ ID NO: 10 of WO2015168666), AAVrh8R R533A mutant (SEQ ID NO: 11 of WO2015168666), or variants thereof.

[0209] In some embodiments, the AAV serotype may be, or have, a sequence as described in U.S. Pat. No. 9,233,131, the contents of which are herein incorporated by reference in their entirety, such as, but not limited to, AAVhE1.1 (SEQ ID NO:44 of U.S. Pat. No. 9,233,131), AAVhEr1.5 (SEQ ID NO:45 of U.S. Pat. No. 9,233,131), AAVhER1.14 (SEQ ID NO:46 of U.S. Pat. No. 9,233,131), AAVhEr1.8 (SEQ ID NO:47 of U.S. Pat. No. 9,233,131), AAVhEr1.16 (SEQ ID NO:48 of U.S. Pat. No. 9,233,131), AAVhEr1.18 (SEQ ID NO:49 of U.S. Pat. No. 9,233,131), AAVhEr1.35 (SEQ ID NO:50 of U.S. Pat. No. 9,233,131), AAVhEr1.7 (SEQ ID NO:51 of U.S. Pat. No. 9,233,131), AAVhEr1.36 (SEQ ID NO:52 of U.S. Pat. No. 9,233,131), AAVhEr2.29 (SEQ ID NO:53 of U.S. Pat. No. 9,233,131), AAVhEr2.4 (SEQ ID NO:54 of U.S. Pat. No. 9,233,131), AAVhEr2.16 (SEQ ID NO:55 of U.S. Pat. No. 9,233,131), AAVhEr2.30 (SEQ ID NO:56 of U.S. Pat. No. 9,233,131), AAVhEr2.31 (SEQ ID NO:58 of U.S. Pat. No. 9,233,131), AAVhEr2.36 (SEQ ID NO:57 of U.S. Pat. No. 9,233,131), AAVhER1.23 (SEQ ID NO:53 of U.S. Pat. No. 9,233,131), AAVhEr3.1 (SEQ ID NO:59 of U.S. Pat. No. 9,233,131), AAV2.5T (SEQ ID NO:42 of U.S. Pat. No. 9,233,131), or variants thereof.

[0210] In some embodiments, the AAV serotype may be, or have, a sequence as described in United States Patent Publication No. US20150376607, the contents of which are herein incorporated by reference in their entirety, such as, but not limited to, AAV-PAEC (SEQ ID NO:1 of US20150376607), AAV-LK01 (SEQ ID NO:2 of US20150376607), AAV-LK02 (SEQ ID NO:3 of US20150376607), AAV-LK03 (SEQ ID NO:4 of US20150376607), AAV-LK04 (SEQ ID NO:5 of US20150376607), AAV-LK05 (SEQ ID NO:6 of US20150376607), AAV-LK06 (SEQ ID NO:7 of US20150376607), AAV-LK07 (SEQ ID NO:8 of US20150376607), AAV-LK08 (SEQ ID NO:9 of US20150376607), AAV-LK09 (SEQ ID NO:10 of US20150376607), AAV-LK10 (SEQ ID NO:11 of US20150376607), AAV-LK11 (SEQ ID NO:12 of US20150376607), AAV-LK12 (SEQ ID NO:13 of US20150376607), AAV-LK13 (SEQ ID NO:14 of US20150376607), AAV-LK14 (SEQ ID NO:15 of US20150376607), AAV-LK15 (SEQ ID NO:16 of US20150376607), AAV-LK16 (SEQ ID NO:17 of US20150376607), AAV-LK17 (SEQ ID NO:18 of US20150376607), AAV-LK18 (SEQ ID NO:19 of US20150376607), AAV-LK19 (SEQ ID NO:20 of US20150376607), AAV-PAEC2 (SEQ ID NO:21 of US20150376607), AAV-PAEC4 (SEQ ID NO:22 of US20150376607), AAV-PAEC6 (SEQ ID NO:23 of US20150376607), AAV-PAEC7 (SEQ ID NO:24 of US20150376607), AAV-PAEC8 (SEQ ID NO:25 of US20150376607), AAV-PAEC11 (SEQ ID NO:26 of US20150376607), AAV-PAEC12 (SEQ ID NO:27, of US20150376607), or variants thereof.

[0211] In some embodiments, the AAV serotype may be, or have, a sequence as described in U.S. Pat. No. 9,163,261, the contents of which are herein incorporated by reference in their entirety, such as, but not limited to, AAV-2-pre-miRNA-101 (SEQ ID NO: 1 U.S. Pat. No. 9,163,261), or variants thereof.

[0212] In some embodiments, the AAV serotype may be, or have, a sequence as described in United States Patent Publication No. US20150376240, the contents of which are herein incorporated by reference in their entirety, such as, but not limited to, AAV-8h (SEQ ID NO: 6 of US20150376240), AAV-8b (SEQ ID NO: 5 of US20150376240), AAV-h (SEQ ID NO: 2 of US20150376240), AAV-b (SEQ ID NO: 1 of US20150376240), or variants thereof.

[0213] In some embodiments, the AAV serotype may be, or have, a sequence as described in United States Patent Publication No. US20160017295, the contents of which are herein incorporated by reference in their entirety, such as, but not limited to, AAV SM 10-2 (SEQ ID NO: 22 of US20160017295), AAV Shuffle 100-1 (SEQ ID NO: 23 of US20160017295), AAV Shuffle 100-3 (SEQ ID NO: 24 of US20160017295), AAV Shuffle 100-7 (SEQ ID NO: 25 of US20160017295), AAV Shuffle 10-2 (SEQ ID NO: 34 of US20160017295), AAV Shuffle 10-6 (SEQ ID NO: 35 of US20160017295), AAV Shuffle 10-8 (SEQ ID NO: 36 of US20160017295), AAV Shuffle 100-2 (SEQ ID NO: 37 of US20160017295), AAV SM 10-1 (SEQ ID NO: 38 of US20160017295), AAV SM 10-8 (SEQ ID NO: 39 of US20160017295), AAV SM 100-3 (SEQ ID NO: 40 of US20160017295), AAV SM 100-10 (SEQ ID NO: 41 of US20160017295), or variants thereof.

[0214] In some embodiments, the AAV serotype may be, or have, a sequence as described in United States Patent Publication No. US20150238550, the contents of which are herein incorporated by reference in their entirety, such as, but not limited to, BNP61 AAV (SEQ ID NO: 1 of US20150238550), BNP62 AAV (SEQ ID NO: 3 of US20150238550), BNP63 AAV (SEQ ID NO: 4 of US20150238550), or variants thereof.

[0215] In some embodiments, the AAV serotype may be or may have a sequence as described in United States Patent Publication No. US20150315612, the contents of which are herein incorporated by reference in their entirety, such as, but not limited to, AAVrh.50 (SEQ ID NO: 108 of US20150315612), AAVrh.43 (SEQ ID NO: 163 of US20150315612), AAVrh.62 (SEQ ID NO: 114 of US20150315612), AAVrh.48 (SEQ ID NO: 115 of US20150315612), AAVhu.19 (SEQ ID NO: 133 of US20150315612), AAVhu.11 (SEQ ID NO: 153 of US20150315612), AAVhu.53 (SEQ ID NO: 186 of US20150315612), AAV4-8/rh.64 (SEQ ID No: 15 of US20150315612), AAVLG-9/hu.39 (SEQ ID No: 24 of US20150315612), AAV54.5/hu.23 (SEQ ID No: 60 of US20150315612), AAV54.2/hu.22 (SEQ ID No: 67 of US20150315612), AAV54.7/hu.24 (SEQ ID No: 66 of US20150315612), AAV54.1/hu.21 (SEQ ID No: 65 of US20150315612), AAV54.4R/hu.27 (SEQ ID No: 64 of US20150315612), AAV46.2/hu.28 (SEQ ID No: 68 of US20150315612), AAV46.6/hu.29 (SEQ ID No: 69 of US20150315612), AAV128.1/hu.43 (SEQ ID No: 80 of US20150315612), or variants thereof.

[0216] In some embodiments, the AAV serotype may be, or have, a sequence as described in International Publication No. WO2015121501, the contents of which are herein incorporated by reference in their entirety, such as, but not limited to, true type AAV (ttAAV) (SEQ ID NO: 2 of WO2015121501), “UPenn AAV10” (SEQ ID NO: 8 of WO2015121501), “Japanese AAV10” (SEQ ID NO: 9 of WO2015121501), or variants thereof.

[0217] According to the present invention, AAV capsid serotype selection or use may be from a variety of species. In one embodiment, the AAV may be an avian AAV (AAAV). The AAAV serotype may be, or have, a sequence as described in U.S. Pat. No. 9,238,800, the contents of which are herein incorporated by reference in their entirety, such as, but not limited to, AAAV (SEQ ID NO: 1, 2, 4, 6, 8, 10, 12, and 14 of U.S. Pat. No. 9,238,800), or variants thereof.

[0218] In one embodiment, the AAV may be a bovine AAV (BAAV). The BAAV serotype may be, or have, a sequence as described in U.S. Pat. No. 9,193,769, the contents of which are herein incorporated by reference in their entirety, such as, but not limited to, BAAV (SEQ ID NO: 1 and 6 of U.S. Pat. No. 9,193,769), or variants thereof. The BAAV serotype may be or have a sequence as described in U.S. Pat. No. 7,427,396, the contents of which are herein incorporated by reference in their entirety, such as, but not limited to, BAAV (SEQ ID NO: 5 and 6 of U.S. Pat. No. 7,427,396), or variants thereof.

[0219] In one embodiment, the AAV may be a caprine AAV. The caprine AAV serotype may be, or have, a sequence as described in U.S. Pat. No. 7,427,396, the contents of which are herein incorporated by reference in their entirety, such as, but not limited to, caprine AAV (SEQ ID NO: 3 of U.S. Pat. No. 7,427,396), or variants thereof.

[0220] In other embodiments the AAV may be engineered as a hybrid AAV from two or more parental serotypes. In one embodiment, the AAV may be AAV2G9 which comprises sequences from AAV2 and AAV9. The AAV2G9 AAV serotype may be, or have, a sequence as described in United States Patent Publication No. US20160017005, the contents of which are herein incorporated by reference in its entirety.

[0221] In one embodiment, the AAV may be a serotype generated by the AAV9 capsid library with mutations in amino acids 390-627 (VP1 numbering) as described by Pulicherla et al. (Molecular Therapy 19(6):1070-1078 (2011), the contents of which are herein incorporated by reference in their entirety. The serotype and corresponding nucleotide and amino acid substitutions may be, but is not limited to, AAV9.1 (G1594C; D532H), AAV6.2 (T1418A and T1436X; V473D and I479K), AAV9.3 (T1238A; F413Y), AAV9.4 (T1250C and A1617T; F417S), AAV9.5 (A1235G, A1314T, A1642G, C1760T; Q412R, T548A, A587V), AAV9.6 (T1231A; F411I), AAV9.9 (G1203A, G1785T; W595C), AAV9.10 (A1500G, T1676C; M559T), AAV9.11 (A1425T, A1702C, A1769T; T568P, Q590L), AAV9.13 (A1369C, A1720T; N457H, T574S), AAV9.14 (T1340A, T1362C, T1560C, G1713A; L447H), AAV9.16 (A1775T; Q592L), AAV9.24 (T1507C, T1521G; W503R), AAV9.26 (A1337G, A1769C; Y446C, Q590P), AAV9.33 (A1667C; D556A), AAV9.34 (A1534G, C1794T; N512D), AAV9.35 (A1289T, T1450A, C1494T, A1515T, C1794A, G1816A; Q430L, Y484N, N98K, V6061), AAV9.40 (A1694T, E565V), AAV9.41 (A1348T, T1362C; T450S), AAV9.44 (A1684C, A1701T, A1737G; N562H, K567N), AAV9.45 (A1492T, C1804T; N498Y, L602F), AAV9.46 (G1441C, T1525C, T1549G; G481R, W509R, L517V), 9.47 (G1241A, G1358A, A1669G, C1745T; S414N, G453D, K557E, T582I), AAV9.48 (C1445T, A1736T; P482L, Q579L), AAV9.50 (A1638T, C1683T, T1805A; Q546H, L602H), AAV9.53 (G1301A, A1405C, C1664T, G1811T; R134Q, S469R, A555V, G604V), AAV9.54 (C1531A, T1609A; L511I, L537M), AAV9.55 (T1605A; F535L), AAV9.58 (C1475T, C1579A; T492I, H527N), AAV.59 (T1336C; Y446H), AAV9.61 (A1493T; N498I), AAV9.64 (C1531A, A1617T; L511I), AAV9.65 (C1335T, T1530C, C1568A; A523D), AAV9.68 (C1510A; P504T), AAV9.80 (G1441A; G481R), AAV9.83 (C1402A, A1500T; P468T, E500D), AAV9.87 (T1464C, T1468C; S490P), AAV9.90 (A1196T; Y399F), AAV9.91 (T1316G, A1583T, C1782G, T1806C; L439R, K528I), AAV9.93 (A1273G, A1421G, A1638C, C1712T, G1732A, A1744T, A1832T; S425G, Q474R, Q546H, P571L, G578R, T582S, D611V), AAV9.94 (A1675T; M559L) and AAV9.95 (T1605A; F535L).

[0222] In some embodiments, the AAV serotype may be, or have, a sequence as described in International Publication No. WO2016049230, the contents of which are herein incorporated by reference in their entirety, such as, but not limited to AAVF1/HSC1 (SEQ ID NO: 2 and 20 of WO2016049230), AAVF2/HSC2 (SEQ ID NO: 3 and 21 of WO2016049230), AAVF3/HSC3 (SEQ ID NO: 5 and 22 of WO2016049230), AAVF4/HSC4 (SEQ ID NO: 6 and 23 of WO2016049230), AAVF5/HSC5 (SEQ ID NO: 11 and 25 of WO2016049230), AAVF6/HSC6 (SEQ ID NO: 7 and 24 of WO2016049230), AAVF7/HSC7 (SEQ ID NO: 8 and 27 of WO2016049230), AAVF8/HSC8 (SEQ ID NO: 9 and 28 of WO2016049230), AAVF9/HSC9 (SEQ ID NO: 10 and 29 of WO2016049230), AAVF11/HSC11 (SEQ ID NO: 4 and 26 of WO2016049230), AAVF12/HSC12 (SEQ ID NO: 12 and 30 of WO2016049230), AAVF13/HSC13 (SEQ ID NO: 14 and 31 of WO2016049230), AAVF14/HSC14 (SEQ ID NO: 15 and 32 of WO2016049230), AAVF15/HSC15 (SEQ ID NO: 16 and 33 of WO2016049230), AAVF16/HSC16 (SEQ ID NO: 17 and 34 of WO2016049230), AAVF17/HSC17 (SEQ ID NO: 13 and 35 of WO2016049230), or variants or derivatives thereof.

[0223] In some embodiments, the AAV serotype may be, or have, a sequence as described in U.S. Pat. No. 8,734,809, the contents of which are herein incorporated by reference in their entirety, such as, but not limited to, AAV CBr-E1 (SEQ ID NO: 13 and 87 of U.S. Pat. No. 8,734,809), AAV CBr-E2 (SEQ ID NO: 14 and 88 of U.S. Pat. No. 8,734,809), AAV CBr-E3 (SEQ ID NO: 15 and 89 of U.S. Pat. No. 8,734,809), AAV CBr-E4 (SEQ ID NO: 16 and 90 of U.S. Pat. No. 8,734,809), AAV CBr-E5 (SEQ ID NO: 17 and 91 of U.S. Pat. No. 8,734,809), AAV CBr-e5 (SEQ ID NO: 18 and 92 of U.S. Pat. No. 8,734,809), AAV CBr-E6 (SEQ ID NO: 19 and 93 of U.S. Pat. No. 8,734,809), AAV CBr-E7 (SEQ ID NO: 20 and 94 of U.S. Pat. No. 8,734,809), AAV CBr-E8 (SEQ ID NO: 21 and 95 of U.S. Pat. No. 8,734,809), AAV CLv-D1 (SEQ ID NO: 22 and 96 of U.S. Pat. No. 8,734,809), AAV CLv-D2 (SEQ ID NO: 23 and 97 of U.S. Pat. No. 8,734,809), AAV CLv-D3 (SEQ ID NO: 24 and 98 of U.S. Pat. No. 8,734,809), AAV CLv-D4 (SEQ ID NO: 25 and 99 of U.S. Pat. No. 8,734,809), AAV CLv-D5 (SEQ ID NO: 26 and 100 of U.S. Pat. No. 8,734,809), AAV CLv-D6 (SEQ ID NO: 27 and 101 of U.S. Pat. No. 8,734,809), AAV CLv-D7 (SEQ ID NO: 28 and 102 of U.S. Pat. No. 8,734,809), AAV CLv-D8 (SEQ ID NO: 29 and 103 of U.S. Pat. No. 8,734,809), AAV CLv-E1 (SEQ ID NO: 13 and 87 of U.S. Pat. No. 8,734,809), AAV CLv-R1 (SEQ ID NO: 30 and 104 of U.S. Pat. No. 8,734,809), AAV CLv-R2 (SEQ ID NO: 31 and 105 of U.S. Pat. No. 8,734,809), AAV CLv-R3 (SEQ ID NO: 32 and 106 of U.S. Pat. No. 8,734,809), AAV CLv-R4 (SEQ ID NO: 33 and 107 of U.S. Pat. No. 8,734,809), AAV CLv-R5 (SEQ ID NO: 34 and 108 of U.S. Pat. No. 8,734,809), AAV CLv-R6 (SEQ ID NO: 35 and 109 of U.S. Pat. No. 8,734,809), AAV CLv-R7 (SEQ ID NO: 36 and 110 of U.S. Pat. No. 8,734,809), AAV CLv-R8 (SEQ ID NO: 37 and 111 of U.S. Pat. No. 8,734,809), AAV CLv-R9 (SEQ ID NO: 38 and 112 of U.S. Pat. No. 8,734,809), AAV CLg-F1 (SEQ ID NO: 39 and 113 of U.S. Pat. No. 8,734,809), AAV CLg-F2 (SEQ ID NO: 40 and 114 of U.S. Pat. No. 8,734,809), AAV CLg-F3 (SEQ ID NO: 41 and 115 of U.S. Pat. No. 8,734,809), AAV CLg-F4 (SEQ ID NO: 42 and 116 of U.S. Pat. No. 8,734,809), AAV CLg-F5 (SEQ ID NO: 43 and 117 of U.S. Pat. No. 8,734,809), AAV CLg-F6 (SEQ ID NO: 43 and 117 of U.S. Pat. No. 8,734,809), AAV CLg-F7 (SEQ ID NO: 44 and 118 of U.S. Pat. No. 8,734,809), AAV CLg-F8 (SEQ ID NO: 43 and 117 of U.S. Pat. No. 8,734,809), AAV CSp-1 (SEQ ID NO: 45 and 119 of U.S. Pat. No. 8,734,809), AAV CSp-10 (SEQ ID NO: 46 and 120 of U.S. Pat. No. 8,734,809), AAV CSp-11 (SEQ ID NO: 47 and 121 of U.S. Pat. No. 8,734,809), AAV CSp-2 (SEQ ID NO: 48 and 122 of U.S. Pat. No. 8,734,809), AAV CSp-3 (SEQ ID NO: 49 and 123 of U.S. Pat. No. 8,734,809), AAV CSp-4 (SEQ ID NO: 50 and 124 of U.S. Pat. No. 8,734,809), AAV CSp-6 (SEQ ID NO: 51 and 125 of U.S. Pat. No. 8,734,809), AAV CSp-7 (SEQ ID NO: 52 and 126 of U.S. Pat. No. 8,734,809), AAV CSp-8 (SEQ ID NO: 53 and 127 of U.S. Pat. No. 8,734,809), AAV CSp-9 (SEQ ID NO: 54 and 128 of U.S. Pat. No. 8,734,809), AAV CHt-2 (SEQ ID NO: 55 and 129 of U.S. Pat. No. 8,734,809), AAV CHt-3 (SEQ ID NO: 56 and 130 of U.S. Pat. No. 8,734,809), AAV CKd-1 (SEQ ID NO: 57 and 131 of U.S. Pat. No. 8,734,809), AAV CKd-10 (SEQ ID NO: 58 and 132 of U.S. Pat. No. 8,734,809), AAV CKd-2 (SEQ ID NO: 59 and 133 of U.S. Pat. No. 8,734,809), AAV CKd-3 (SEQ ID NO: 60 and 134 of U.S. Pat. No. 8,734,809), AAV CKd-4 (SEQ ID NO: 61 and 135 of U.S. Pat. No. 8,734,809), AAV CKd-6 (SEQ ID NO: 62 and 136 of U.S. Pat. No. 8,734,809), AAV CKd-7 (SEQ ID NO: 63 and 137 of U.S. Pat. No. 8,734,809), AAV CKd-8 (SEQ ID NO: 64 and 138 of U.S. Pat. No. 8,734,809), AAV CLv-1 (SEQ ID NO: 35 and 139 of U.S. Pat. No. 8,734,809), AAV CLv-12 (SEQ ID NO: 66 and 140 of U.S. Pat. No. 8,734,809), AAV CLv-13 (SEQ ID NO: 67 and 141 of U.S. Pat. No. 8,734,809), AAV CLv-2 (SEQ ID NO: 68 and 142 of U.S. Pat. No. 8,734,809), AAV CLv-3 (SEQ ID NO: 69 and 143 of U.S. Pat. No. 8,734,809), AAV CLv-4 (SEQ ID NO: 70 and 144 of U.S. Pat. No. 8,734,809), AAV CLv-6 (SEQ ID NO: 71 and 145 of U.S. Pat. No. 8,734,809), AAV CLv-8 (SEQ ID NO: 72 and 146 of U.S. Pat. No. 8,734,809), AAV CKd-B1 (SEQ ID NO: 73 and 147 of U.S. Pat. No. 8,734,809), AAV CKd-B2 (SEQ ID NO: 74 and 148 of U.S. Pat. No. 8,734,809), AAV CKd-B3 (SEQ ID NO: 75 and 149 of U.S. Pat. No. 8,734,809), AAV CKd-B4 (SEQ ID NO: 76 and 150 of U.S. Pat. No. 8,734,809), AAV CKd-B5 (SEQ ID NO: 77 and 151 of U.S. Pat. No. 8,734,809), AAV CKd-B6 (SEQ ID NO: 78 and 152 of U.S. Pat. No. 8,734,809), AAV CKd-B7 (SEQ ID NO: 79 and 153 of U.S. Pat. No. 8,734,809), AAV CKd-B8 (SEQ ID NO: 80 and 154 of U.S. Pat. No. 8,734,809), AAV CKd-H1 (SEQ ID NO: 81 and 155 of U.S. Pat. No. 8,734,809), AAV CKd-H2 (SEQ ID NO: 82 and 156 of U.S. Pat. No. 8,734,809), AAV CKd-H3 (SEQ ID NO: 83 and 157 of U.S. Pat. No. 8,734,809), AAV CKd-H4 (SEQ ID NO: 84 and 158 of U.S. Pat. No. 8,734,809), AAV CKd-H5 (SEQ ID NO: 85 and 159 of U.S. Pat. No. 8,734,809), AAV CKd-H6 (SEQ ID NO: 77 and 151 of U.S. Pat. No. 8,734,809), AAV CHt-1 (SEQ ID NO: 86 and 160 of U.S. Pat. No. 8,734,809), AAV CLv1-1 (SEQ ID NO: 171 of U.S. Pat. No. 8,734,809), AAV CLv1-2 (SEQ ID NO: 172 of U.S. Pat. No. 8,734,809), AAV CLv1-3 (SEQ ID NO: 173 of U.S. Pat. No. 8,734,809), AAV CLv1-4 (SEQ ID NO: 174 of U.S. Pat. No. 8,734,809), AAV Clv1-7 (SEQ ID NO: 175 of U.S. Pat. No. 8,734,809), AAV Clv1-8 (SEQ ID NO: 176 of U.S. Pat. No. 8,734,809), AAV Clv1-9 (SEQ ID NO: 177 of U.S. Pat. No. 8,734,809), AAV Clv1-10 (SEQ ID NO: 178 of U.S. Pat. No. 8,734,809), AAV.VR-355 (SEQ ID NO: 181 of U.S. Pat. No. 8,734,809), AAV.hu.48R3 (SEQ ID NO: 183 of U.S. Pat. No. 8,734,809), or variants or derivatives thereof.

[0224] In some embodiments, the AAV serotype may be, or have, a sequence as described in International Publication No. WO2016065001, the contents of which are herein incorporated by reference in their entirety, such as, but not limited to AAV CHt-P2 (SEQ ID NO: 1 and 51 of WO2016065001), AAV CHt-P5 (SEQ ID NO: 2 and 52 of WO2016065001), AAV CHt-P9 (SEQ ID NO: 3 and 53 of WO2016065001), AAV CBr-7.1 (SEQ ID NO: 4 and 54 of WO2016065001), AAV CBr-7.2 (SEQ ID NO: 5 and 55 of WO2016065001), AAV CBr-7.3 (SEQ ID NO: 6 and 56 of WO2016065001), AAV CBr-7.4 (SEQ ID NO: 7 and 57 of WO2016065001), AAV CBr-7.5 (SEQ ID NO: 8 and 58 of WO2016065001), AAV CBr-7.7 (SEQ ID NO: 9 and 59 of WO2016065001), AAV CBr-7.8 (SEQ ID NO: 10 and 60 of WO2016065001), AAV CBr-7.10 (SEQ ID NO: 11 and 61 of WO2016065001), AAV CKd-N3 (SEQ ID NO: 12 and 62 of WO2016065001), AAV CKd-N4 (SEQ ID NO: 13 and 63 of WO2016065001), AAV CKd-N9 (SEQ ID NO: 14 and 64 of WO2016065001), AAV CLv-L4 (SEQ ID NO: 15 and 65 of WO2016065001), AAV CLv-L5 (SEQ ID NO: 16 and 66 of WO2016065001), AAV CLv-L6 (SEQ ID NO: 17 and 67 of WO2016065001), AAV CLv-K1 (SEQ ID NO: 18 and 68 of WO2016065001), AAV CLv-K3 (SEQ ID NO: 19 and 69 of WO2016065001), AAV CLv-K6 (SEQ ID NO: 20 and 70 of WO2016065001), AAV CLv-M1 (SEQ ID NO: 21 and 71 of WO2016065001), AAV CLv-M11 (SEQ ID NO: 22 and 72 of WO2016065001), AAV CLv-M2 (SEQ ID NO: 23 and 73 of WO2016065001), AAV CLv-M5 (SEQ ID NO: 24 and 74 of WO2016065001), AAV CLv-M6 (SEQ ID NO: 25 and 75 of WO2016065001), AAV CLv-M7 (SEQ ID NO: 26 and 76 of WO2016065001), AAV CLv-M8 (SEQ ID NO: 27 and 77 of WO2016065001), AAV CLv-M9 (SEQ ID NO: 28 and 78 of WO2016065001), AAV CHt-P1 (SEQ ID NO: 29 and 79 of WO2016065001), AAV CHt-P6 (SEQ ID NO: 30 and 80 of WO2016065001), AAV CHt-P8 (SEQ ID NO: 31 and 81 of WO2016065001), AAV CHt-6.1 (SEQ ID NO: 32 and 82 of WO2016065001), AAV CHt-6.10 (SEQ ID NO: 33 and 83 of WO2016065001), AAV CHt-6.5 (SEQ ID NO: 34 and 84 of WO2016065001), AAV CHt-6.6 (SEQ ID NO: 35 and 85 of WO2016065001), AAV CHt-6.7 (SEQ ID NO: 36 and 86 of WO2016065001), AAV CHt-6.8 (SEQ ID NO: 37 and 87 of WO2016065001), AAV CSp-8.10 (SEQ ID NO: 38 and 88 of WO2016065001), AAV CSp-8.2 (SEQ ID NO: 39 and 89 of WO2016065001), AAV CSp-8.4 (SEQ ID NO: 40 and 90 of WO2016065001), AAV CSp-8.5 (SEQ ID NO: 41 and 91 of WO2016065001), AAV CSp-8.6 (SEQ ID NO: 42 and 92 of WO2016065001), AAV CSp-8.7 (SEQ ID NO: 43 and 93 of WO2016065001), AAV CSp-8.8 (SEQ ID NO: 44 and 94 of WO2016065001), AAV CSp-8.9 (SEQ ID NO: 45 and 95 of WO2016065001), AAV CBr-B7.3 (SEQ ID NO: 46 and 96 of WO2016065001), AAV CBr-B7.4 (SEQ ID NO: 47 and 97 of WO2016065001), AAV3B (SEQ ID NO: 48 and 98 of WO2016065001), AAV4 (SEQ ID NO: 49 and 99 of WO2016065001), AAV5 (SEQ ID NO: 50 and 100 of WO2016065001), or variants or derivatives thereof.

[0225] In some embodiments, the AAV serotype may be, or have, a modification as described in United States Publication No. US 20160361439, the contents of which are herein incorporated by reference in their entirety, such as but not limited to, Y252F, Y272F, Y444F, Y500F, Y700F, Y704F, Y730F, Y275F, Y281F, Y508F, Y576F, Y612G, Y673F, and Y720F of the wild-type AAV1, AAV2, AAV3, AAV4, AAV5, AAV6, AAV7, AAV8, AAV9, AAV10, AAV11, AAV12, and hybrids thereof.

[0226] In some embodiments, the AAV serotype may be, or have, a mutation as described in U.S. Pat. No. 9,546,112, the contents of which are herein incorporated by reference in their entirety, such as, but not limited to, at least two, but not all the F129L, D418E, K531E, L584F, V598A and H642N mutations in the sequence of AAV6 (SEQ ID NO:4 of U.S. Pat. No. 9,546,112), AAV1 (SEQ ID NO:6 of U.S. Pat. No. 9,546,112), AAV2, AAV3, AAV4, AAV5, AAV7, AAV9, AAV10 or AAV11 or derivatives thereof. In yet another embodiment, the AAV serotype may be, or have, an AAV6 sequence comprising the K531E mutation (SEQ ID NO:5 of U.S. Pat. No. 9,546,112).

[0227] In some embodiments, the AAV serotype may be, or have, a mutation in the AAV1 sequence, as described in in United States Publication No. US 20130224836, the contents of which are herein incorporated by reference in their entirety, such as, but not limited to, at least one of the surface-exposed tyrosine residues, preferably, at positions 252, 273, 445, 701, 705 and 731 of AAV1 (SEQ ID NO: 2 of US 20130224836) substituted with another amino acid, preferably with a phenylalanine residue. In one embodiment, the AAV serotype may be, or have, a mutation in the AAV9 sequence, such as, but not limited to, at least one of the surface-exposed tyrosine residues, preferably, at positions 252, 272, 444, 500, 700, 704 and 730 of AAV2 (SEQ ID NO: 4 of US 20130224836) substituted with another amino acid, preferably with a phenylalanine residue. In one embodiment, the tyrosine residue at position 446 of AAV9 (SEQ ID NO: 6 US 20130224836) is substituted with a phenylalanine residue.

[0228] In some embodiments, the serotype may be AAV2 or a variant thereof, as described in International Publication No. WO2016130589, herein incorporated by reference in its entirety. The amino acid sequence of AAV2 may comprise N587A, E548A, or N708A mutations. In one embodiment, the amino acid sequence of any AAV may comprise a V708K mutation.

[0229] In one embodiment, the AAV may be a serotype selected from any of those found in Table 1.

[0230] In one embodiment, the AAV may comprise a sequence, fragment or variant thereof, of the sequences in Table 1.

[0231] In one embodiment, the AAV may be encoded by a sequence, fragment or variant as described in Table 1.

TABLE 1
AAV Serotypes

| Serotype | SEQ ID NO | Reference Information |
|---|---|---|
| AAV1 | 1 | US20150159173 SEQ ID NO: 11, |
| | | US20150315612 SEQ ID NO: 202 |
| AAV1 | 2 | US20160017295 SEQ ID NO: |
| | | 1US20030138772 SEQ ID NO: 64, |
| | | US20150159173 SEQ ID NO: 27, |
| | | US20150315612 SEQ ID NO: 219, |
| | | U.S. Pat. No. 7,198,951 SEQ ID NO: 5 |
| AAV1 | 3 | US20030138772 SEQ ID NO: 6 |
| AAV1.3 | 4 | US20030138772 SEQ ID NO: 14 |
| AAV10 | 5 | US20030138772 SEQ ID NO: 117 |
| AAV10 | 6 | WO2015121501 SEQ ID NO: 9 |
| AAV10 | 7 | WO2015121501 SEQ ID NO: 8 |
| AAV11 | 8 | US20030138772 SEQ ID NO: 118 |
| AAV12 | 9 | US20030138772 SEQ ID NO: 119 |
| AAV2 | 10 | US20150159173 SEQ ID NO: 7, |
| | | US20150315612 SEQ ID NO: 211 |
| AAV2 | 11 | US20030138772 SEQ ID NO: 70, |
| | | US20150159173 SEQ ID NO: 23, |
| | | US20150315612 SEQ ID NO: 221, |
| | | US20160017295 SEQ ID NO: 2, |
| | | U.S. Pat. No. 6,156,303 SEQ ID NO: 4, |
| | | U.S. Pat. No. 7,198,951 SEQ ID NO: 4, |
| | | WO2015121501 SEQ ID NO: 1 |
| AAV2 | 12 | U.S. Pat. No. 6,156,303 SEQ ID NO: 8 |
| AAV2 | 13 | US20030138772 SEQ ID NO: 7 |
| AAV2 | 14 | U.S. Pat. No. 6,156,303 SEQ ID NO: 3 |
| AAV2.5T | 15 | U.S. Pat. No. 9,233,131 SEQ ID NO: 42 |
| AAV223.10 | 16 | US20030138772 SEQ ID NO: 75 |
| AAV223.2 | 17 | US20030138772 SEQ ID NO: 49 |
| AAV223.2 | 18 | US20030138772 SEQ ID NO: 76 |
| AAV223.4 | 19 | US20030138772 SEQ ID NO: 50 |
| AAV223.4 | 20 | US20030138772 SEQ ID NO: 73 |
| AAV223.5 | 21 | US20030138772 SEQ ID NO: 51 |
| AAV223.5 | 22 | US20030138772 SEQ ID NO: 74 |
| AAV223.6 | 23 | US20030138772 SEQ ID NO: 52 |
| AAV223.6 | 24 | US20030138772 SEQ ID NO: 78 |
| AAV223.7 | 25 | US20030138772 SEQ ID NO: 53 |
| AAV223.7 | 26 | US20030138772 SEQ ID NO: 77 |
| AAV29.3 | 27 | US20030138772 SEQ ID NO: 82 |
| AAV29.4 | 28 | US20030138772 SEQ ID NO: 12 |
| AAV29.5 | 29 | US20030138772 SEQ ID NO: 83 |
| AAV29.5 | 30 | US20030138772 SEQ ID NO: 13 |
| (AAVbb.2) | | |
| AAV3 | 31 | US20150159173 SEQ ID NO: 12 |
| AAV3 | 32 | US20030138772 SEQ ID NO: 71, |
| | | US20150159173 SEQ ID NO: 28, |
| | | US20160017295 SEQ ID NO: 3, |
| | | U.S. Pat. No. 7,198,951 SEQ ID NO: 6 |
| AAV3 | 33 | US20030138772 SEQ ID NO: 8 |
| AAV3.3b | 34 | US20030138772 SEQ ID NO: 72 |
| AAV3-3 | 35 | US20150315612 SEQ ID NO: 200 |
| AAV3-3 | 36 | US20150315612 SEQ ID NO: 217 |
| AAV3a | 37 | U.S. Pat. No. 6,156,303 SEQ ID NO: 5 |
| AAV3a | 38 | U.S. Pat. No. 6,156,303 SEQ ID NO: 9 |
| AAV3b | 39 | U.S. Pat. No. 6,156,303 SEQ ID NO: 6 |
| AAV3b | 40 | U.S. Pat. No. 6,156,303 SEQ ID NO: 10 |
| AAV3b | 41 | U.S. Pat. No. 6,156,303 SEQ ID NO: 1 |
| AAV4 | 42 | US20140348794 SEQ ID NO: 17 |
| AAV4 | 43 | US20140348794 SEQ ID NO: 5 |
| AAV4 | 44 | US20140348794 SEQ ID NO: 3 |
| AAV4 | 45 | US20140348794 SEQ ID NO: 14 |
| AAV4 | 46 | US20140348794 SEQ ID NO: 15 |
| AAV4 | 47 | US20140348794 SEQ ID NO: 19 |
| AAV4 | 48 | US20140348794 SEQ ID NO: 12 |
| AAV4 | 49 | US20140348794 SEQ ID NO: 13 |
| AAV4 | 50 | US20140348794 SEQ ID NO: 7 |
| AAV4 | 51 | US20140348794 SEQ ID NO: 8 |
| AAV4 | 52 | US20140348794 SEQ ID NO: 9 |
| AAV4 | 53 | US20140348794 SEQ ID NO: 2 |
| AAV4 | 54 | US20140348794 SEQ ID NO: 10 |
| AAV4 | 55 | US20140348794 SEQ ID NO: 11 |
| AAV4 | 56 | US20140348794 SEQ ID NO: 18 |
| AAV4 | 57 | US20030138772 SEQ ID NO: 63, |
| | | US20160017295 SEQ ID NO: 4, |
| | | US20140348794 SEQ ID NO: 4 |
| AAV4 | 58 | US20140348794 SEQ ID NO: 16 |
| AAV4 | 59 | US20140348794 SEQ ID NO: 20 |
| AAV4 | 60 | US20140348794 SEQ ID NO: 6 |
| AAV4 | 61 | US20140348794 SEQ ID NO: 1 |
| AAV42.2 | 62 | US20030138772 SEQ ID NO: 9 |
| AAV42.2 | 63 | US20030138772 SEQ ID NO: 102 |
| AAV42.3b | 64 | US20030138772 SEQ ID NO: 36 |
| AAV42.3B | 65 | US20030138772 SEQ ID NO: 107 |
| AAV42.4 | 66 | US20030138772 SEQ ID NO: 33 |
| AAV42.4 | 67 | US20030138772 SEQ ID NO: 88 |
| AAV42.8 | 68 | US20030138772 SEQ ID NO: 27 |
| AAV42.8 | 69 | US20030138772 SEQ ID NO: 85 |
| AAV43.1 | 70 | US20030138772 SEQ ID NO: 39 |
| AAV43.1 | 71 | US20030138772 SEQ ID NO: 92 |
| AAV43.12 | 72 | US20030138772 SEQ ID NO: 41 |
| AAV43.12 | 73 | US20030138772 SEQ ID NO: 93 |
| AAV43.20 | 74 | US20030138772 SEQ ID NO: 42 |
| AAV43.20 | 75 | US20030138772 SEQ ID NO: 99 |
| AAV43.21 | 76 | US20030138772 SEQ ID NO: 43 |
| AAV43.21 | 77 | US20030138772 SEQ ID NO: 96 |
| AAV43.23 | 78 | US20030138772 SEQ ID NO: 44 |
| AAV43.23 | 79 | US20030138772 SEQ ID NO: 98 |
| AAV43.25 | 80 | US20030138772 SEQ ID NO: 45 |
| AAV43.25 | 81 | US20030138772 SEQ ID NO: 97 |
| AAV43.5 | 82 | US20030138772 SEQ ID NO: 40 |
| AAV43.5 | 83 | US20030138772 SEQ ID NO: 94 |
| AAV4-4 | 84 | US20150315612 SEQ ID NO: 201 |
| AAV4-4 | 85 | US20150315612 SEQ ID NO: 218 |
| AAV44.1 | 86 | US20030138772 SEQ ID NO: 46 |
| AAV44.1 | 87 | US20030138772 SEQ ID NO: 79 |
| AAV44.5 | 88 | US20030138772 SEQ ID NO: 47 |
| AAV44.5 | 89 | US20030138772 SEQ ID NO: 80 |
| AAV4407 | 90 | US20150315612 SEQ ID NO: 90 |
| AAV5 | 91 | U.S. Pat. No. 7,427,396 SEQ ID NO: 1 |
| AAV5 | 92 | US20030138772 SEQ ID NO: 114 |
| AAV5 | 93 | US20160017295 SEQ ID NO: 5, |
| | | U.S. Pat. No. 7,427,396 SEQ ID NO: 2, |
| | | US20150315612 SEQ ID NO: 216 |
| AAV5 | 94 | US20150315612 SEQ ID NO: 199 |
| AAV6 | 95 | US20150159173 SEQ ID NO: 13 |
| AAV6 | 96 | US20030138772 SEQ ID NO: 65, |
| | | US20150159173 SEQ ID NO: 29, |
| | | US20160017295 SEQ ID NO: 6, |
| | | U.S. Pat. No. 6,156,303 SEQ ID NO: 7 |
| AAV6 | 97 | U.S. Pat. No. 6,156,303 SEQ ID NO: 11 |
| AAV6 | 98 | U.S. Pat. No. 6,156,303 SEQ ID NO: 2 |
| AAV6 | 99 | US20150315612 SEQ ID NO: 203 |
| AAV6 | 100 | US20150315612 SEQ ID NO: 220 |
| AAV6.1 | 101 | US20150159173 |
| AAV6.12 | 102 | US20150159173 |
| AAV6.2 | 103 | US20150159173 |
| AAV7 | 104 | US20150159173 SEQ ID NO: 14 |
| AAV7 | 105 | US20150315612 SEQ ID NO: 183 |
| AAV7 | 106 | US20030138772 SEQ ID NO: 2, |
| | | US20150159173 SEQ ID NO: 30, |
| | | US20150315612 SEQ ID NO: 181, |
| | | US20160017295 SEQ ID NO: 7 |
| AAV7 | 107 | US20030138772 SEQ ID NO: 3 |
| AAV7 | 108 | US20030138772 SEQ ID NO: 1, |
| | | US20150315612 SEQ ID NO: 180 |
| AAV7 | 109 | US20150315612 SEQ ID NO: 213 |
| AAV7 | 110 | US20150315612 SEQ ID NO: 222 |
| AAV8 | 111 | US20150159173 SEQ ID NO: 15 |
| AAV8 | 112 | US20150376240 SEQ ID NO: 7 |
| AAV8 | 113 | US20030138772 SEQ ID NO: 4, |
| | | US20150315612 SEQ ID NO: 182 |
| AAV8 | 114 | US20030138772 SEQ ID NO: 95, |
| | | US20140359799 SEQ ID NO: 1, |
| | | US20150159173 SEQ ID NO: 31, |
| | | US20160017295 SEQ ID NO: 8, |
| | | U.S. Pat. No. 7,198,951 SEQ ID NO: 7, |
| | | US20150315612 SEQ ID NO: 223 |
| AAV8 | 115 | US20150376240 SEQ ID NO: 8 |
| AAV8 | 116 | US20150315612 SEQ ID NO: 214 |
| AAV-8b | 117 | US20150376240 SEQ ID NO: 5 |
| AAV-8b | 118 | US20150376240 SEQ ID NO: 3 |
| AAV-8h | 119 | US20150376240 SEQ ID NO: 6 |
| AAV-8h | 120 | US20150376240 SEQ ID NO: 4 |
| AAV9 | 121 | US20030138772 SEQ ID NO: 5 |
| AAV9 | 122 | U.S. Pat. No. 7,198,951 SEQ ID NO: 1 |
| AAV9 | 123 | US20160017295 SEQ ID NO: 9 |
| AAV9 | 124 | US20030138772 SEQ ID NO: 100, |
| | | U.S. Pat. No. 7,198,951 SEQ ID NO: 2 |
| AAV9 | 125 | U.S. Pat. No. 7,198,951 SEQ ID NO: 3 |
| AAV9 | 126 | U.S. Pat. No. 7,906,111 SEQ ID NO: 3; |
| (AAVhu.14) | | WO2015038958 SEQ ID NO: 11 |
| AAV9 | 127 | U.S. Pat. No. 7,906,111 SEQ ID NO: 123: |
| (AAVhu.14) | | WO2015038958 SEQ ID NO: 2 |
| AAVA3.1 | 128 | US20030138772 SEQ ID NO: 120 |
| AAVA3.3 | 129 | US20030138772 SEQ ID NO: 57 |
| AAVA3.3 | 130 | US20030138772 SEQ ID NO: 66 |
| AAVA3.4 | 131 | US20030138772 SEQ ID NO: 54 |
| AAVA3.4 | 132 | US20030138772 SEQ ID NO: 68 |
| AAVA3.5 | 133 | US20030138772 SEQ ID NO: 55 |
| AAVA3.5 | 134 | US20030138772 SEQ ID NO: 69 |
| AAVA3.7 | 135 | US20030138772 SEQ ID NO: 56 |
| AAVA3.7 | 136 | US20030138772 SEQ ID NO: 67 |
| AAV29.3 | 137 | US20030138772 SEQ ID NO: 11 |
| (AAVbb.1) | | |
| AAVC2 | 138 | US20030138772 SEQ ID NO: 61 |
| AAVCh.5 | 139 | US20150159173 SEQ ID NO: 46, |
| | | US20150315612 SEQ ID NO: 234 |
| AAVcy.2 | 140 | US20030138772 SEQ ID NO: 15 |
| (AAV13.3) | | |
| AAV24.1 | 141 | US20030138772 SEQ ID NO: 101 |
| AAVcy.3 | 142 | US20030138772 SEQ ID NO: 16 |
| (AAV24.1) | | |
| AAV27.3 | 143 | US20030138772 SEQ ID NO: 104 |
| AAVcy.4 | 144 | US20030138772 SEQ ID NO: 17 |
| (AAV27.3) | | |
| AAVcy.5 | 145 | US20150315612 SEQ ID NO: 227 |
| AAV7.2 | 146 | US20030138772 SEQ ID NO: 103 |
| AAVcy.5 | 147 | US20030138772 SEQ ID NO: 18 |
| (AAV7.2) | | |
| AAV16.3 | 148 | US20030138772 SEQ ID NO: 105 |
| AAVcy.6 | 149 | US20030138772 SEQ ID NO: 10 |
| (AAV16.3) | | |
| AAVcy.5 | 150 | US20150159173 SEQ ID NO: 8 |
| AAVcy.5 | 151 | US20150159173 SEQ ID NO: 24 |
| AAVCy.5R1 | 152 | US20150159173 |
| AAVCy.5R2 | 153 | US20150159173 |
| AAVCy.5R3 | 154 | US20150159173 |
| AAVCy.5R4 | 155 | US20150159173 |
| AAVDJ | 156 | US20140359799 SEQ ID NO: 3, |
| | | U.S. Pat. No. 7,588,772 SEQ ID NO: 2 |
| AAVDJ | 157 | US20140359799 SEQ ID NO: 2, |
| | | U.S. Pat. No. 7,588,772 SEQ ID NO: 1 |
| AAVDJ-8 | 158 | U.S. Pat. No. 7,588,772; Grimm et al 2008 |
| AAVDJ-8 | 159 | U.S. Pat. No. 7,588,772; Grimm et al 2008 |
| AAVF5 | 160 | US20030138772 SEQ ID NO: 110 |
| AAVH2 | 161 | US20030138772 SEQ ID NO: 26 |
| AAVH6 | 162 | US20030138772 SEQ ID NO: 25 |
| AAVhE1.1 | 163 | U.S. Pat. No. 9,233,131 SEQ ID NO: 44 |
| AAVhEr1.14 | 164 | U.S. Pat. No. 9,233,131 SEQ ID NO: 46 |
| AAVhEr1.16 | 165 | U.S. Pat. No. 9,233,131 SEQ ID NO: 48 |
| AAVhEr1.18 | 166 | U.S. Pat. No. 9,233,131 SEQ ID NO: 49 |
| AAVhEr1.23 | 167 | U.S. Pat. No. 9,233,131 SEQ ID NO: 53 |
| (AAVhEr2.29) | | |
| AAVhEr1.35 | 168 | U.S. Pat. No. 9,233,131 SEQ ID NO: 50 |
| AAVhEr1.36 | 169 | U.S. Pat. No. 9,233,131 SEQ ID NO: 52 |
| AAVhEr1.5 | 170 | U.S. Pat. No. 9,233,131 SEQ ID NO: 45 |
| AAVhEr1.7 | 171 | U.S. Pat. No. 9,233,131 SEQ ID NO: 51 |
| AAVhEr1.8 | 172 | U.S. Pat. No. 9,233,131 SEQ ID NO: 47 |
| AAVhEr2.16 | 173 | U.S. Pat. No. 9,233,131 SEQ ID NO: 55 |
| AAVhEr2.30 | 174 | U.S. Pat. No. 9,233,131 SEQ ID NO: 56 |
| AAVhEr2.31 | 175 | U.S. Pat. No. 9,233,131 SEQ ID NO: 58 |
| AAVhEr2.36 | 176 | U.S. Pat. No. 9,233,131 SEQ ID NO: 57 |
| AAVhEr2.4 | 177 | U.S. Pat. No. 9,233,131 SEQ ID NO: 54 |
| AAVhEr3.1 | 178 | U.S. Pat. No. 9,233,131 SEQ ID NO: 59 |
| AAVhu.1 | 179 | US20150315612 SEQ ID NO: 46 |
| AAVhu.1 | 180 | US20150315612 SEQ ID NO: 144 |
| AAVhu.10 | 181 | US20150315612 SEQ ID NO: 56 |
| (AAV16.8) | | |
| AAVhu.10 | 182 | US20150315612 SEQ ID NO: 156 |
| (AAV16.8) | | |
| AAVhu.11 | 183 | US20150315612 SEQ ID NO: 57 |
| (AAV16.12) | | |
| AAVhu.11 | 184 | US20150315612 SEQ ID NO: 153 |
| (AAV16.12) | | |
| AAVhu.12 | 185 | US20150315612 SEQ ID NO: 59 |
| AAVhu.12 | 186 | US20150315612 SEQ ID NO: 154 |
| AAVhu.13 | 187 | US20150159173 SEQ ID NO: 16, |
| | | US20150315612 SEQ ID NO: 71 |
| AAVhu.13 | 188 | US20150159173 SEQ ID NO: 32, |
| | | US20150315612 SEQ ID NO: 129 |
| AAVhu.136.1 | 189 | US20150315612 SEQ ID NO: 165 |
| AAVhu.140.1 | 190 | US20150315612 SEQ ID NO: 166 |
| AAVhu.140.2 | 191 | US20150315612 SEQ ID NO: 167 |
| AAVhu.145.6 | 192 | US20150315612 SEQ ID NO: 178 |
| AAVhu.15 | 193 | US20150315612 SEQ ID NO: 147 |
| AAVhu.15 | 194 | US20150315612 SEQ ID NO: 50 |
| (AAV33.4) | | |
| AAVhu.156.1 | 195 | US20150315612 SEQ ID NO: 179 |
| AAVhu.16 | 196 | US20150315612 SEQ ID NO: 148 |
| AAVhu.16 | 197 | US20150315612 SEQ ID NO: 51 |
| (AAV33.8) | | |
| AAVhu.17 | 198 | US20150315612 SEQ ID NO: 83 |
| AAVhu.17 | 199 | US20150315612 SEQ ID NO: 4 |
| (AAV33.12) | | |
| AAVhu.172.1 | 200 | US20150315612 SEQ ID NO: 171 |
| AAVhu.172.2 | 201 | US20150315612 SEQ ID NO: 172 |
| AAVhu.173.4 | 202 | US20150315612 SEQ ID NO: 173 |
| AAVhu.173.8 | 203 | US20150315612 SEQ ID NO: 175 |
| AAVhu.18 | 204 | US20150315612 SEQ ID NO: 52 |
| AAVhu.18 | 205 | US20150315612 SEQ ID NO: 149 |
| AAVhu.19 | 206 | US20150315612 SEQ ID NO: 62 |
| AAVhu.19 | 207 | US20150315612 SEQ ID NO: 133 |
| AAVhu.2 | 208 | US20150315612 SEQ ID NO: 48 |
| AAVhu.2 | 209 | US20150315612 SEQ ID NO: 143 |
| AAVhu.20 | 210 | US20150315612 SEQ ID NO: 63 |
| AAVhu.20 | 213 | US20150315612 SEQ ID NO: 134 |
| AAVhu.21 | 212 | US20150315612 SEQ ID NO: 65 |
| AAVhu.21 | 213 | US20150315612 SEQ ID NO: 135 |
| AAVhu.22 | 214 | US20150315612 SEQ ID NO: 67 |
| AAVhu.22 | 215 | US20150315612 SEQ ID NO: 138 |
| AAVhu.23 | 216 | US20150315612 SEQ ID NO: 60 |
| AAVhu.23.2 | 217 | US20150315612 SEQ ID NO: 137 |
| AAVhu.24 | 218 | US20150315612 SEQ ID NO: 66 |
| AAVhu.24 | 219 | US20150315612 SEQ ID NO: 136 |
| AAVhu.25 | 220 | US20150315612 SEQ ID NO: 49 |
| AAVhu.25 | 221 | US20150315612 SEQ ID NO: 146 |
| AAVhu.26 | 222 | US20150159173 SEQ ID NO: 17, |
| | | US20150315612 SEQ ID NO: 61 |
| AAVhu.26 | 223 | US20150159173 SEQ ID NO: 33, |
| | | US20150315612 SEQ ID NO: 139 |
| AAVhu.27 | 224 | US20150315612 SEQ ID NO: 64 |
| AAVhu.27 | 225 | US20150315612 SEQ ID NO: 140 |
| AAVhu.28 | 226 | US20150315612 SEQ ID NO: 68 |
| AAVhu.28 | 227 | US20150315612 SEQ ID NO: 130 |
| AAVhu.29 | 228 | US20150315612 SEQ ID NO: 69 |
| AAVhu.29 | 229 | US20150159173 SEQ ID NO: 42, |
| | | US20150315612 SEQ ID NO: 132 |
| AAVhu.29 | 230 | US20150315612 SEQ ID NO: 225 |
| AAVhu.29R | 231 | US20150159173 |
| AAVhu.3 | 232 | US20150315612 SEQ ID NO: 44 |
| AAVhu.3 | 233 | US20150315612 SEQ ID NO: 145 |
| AAVhu.30 | 234 | US20150315612 SEQ ID NO: 70 |
| AAVhu.30 | 235 | US20150315612 SEQ ID NO: 131 |
| AAVhu.31 | 236 | US20150315612 SEQ ID NO: 1 |
| AAVhu.31 | 237 | US20150315612 SEQ ID NO: 121 |
| AAVhu.32 | 238 | US20150315612 SEQ ID NO: 2 |
| AAVhu.32 | 239 | US20150315612 SEQ ID NO: 122 |
| AAVhu.33 | 240 | US20150315612 SEQ ID NO: 75 |
| AAVhu.33 | 241 | US20150315612 SEQ ID NO: 124 |
| AAVhu.34 | 242 | US20150315612 SEQ ID NO: 72 |
| AAVhu.34 | 243 | US20150315612 SEQ ID NO: 125 |
| AAVhu.35 | 244 | US20150315612 SEQ ID NO: 73 |
| AAVhu.35 | 245 | US20150315612 SEQ ID NO: 164 |
| AAVhu.36 | 246 | US20150315612 SEQ ID NO: 74 |
| AAVhu.36 | 247 | US20150315612 SEQ ID NO: 126 |
| AAVhu.37 | 248 | US20150159173 SEQ ID NO: 34, |
| | | US20150315612 SEQ ID NO: 88 |
| AAVhu.37 | 249 | US20150315612 SEQ ID NO: 10, |
| (AAV106.1) | | US20150159173 SEQ ID NO: 18 |
| AAVhu.38 | 250 | US20150315612 SEQ ID NO: 161 |
| AAVhu.39 | 251 | US20150315612 SEQ ID NO: 102 |
| AAVhu.39 | 252 | US20150315612 SEQ ID NO: 24 |
| (AAVLG-9) | | |
| AAVhu.4 | 253 | US20150315612 SEQ ID NO: 47 |
| AAVhu.4 | 254 | US20150315612 SEQ ID NO: 141 |
| AAVhu.40 | 255 | US20150315612 SEQ ID NO: 87 |
| AAVhu.40 | 256 | US20150315612 SEQ ID NO: 11 |
| (AAV114.3) | | |
| AAVhu.41 | 257 | US20150315612 SEQ ID NO: 91 |
| AAVhu.41 | 258 | US20150315612 SEQ ID NO: 6 |
| (AAV127.2) | | |
| AAVhu.42 | 259 | US20150315612 SEQ ID NO: 85 |
| AAVhu.42 | 260 | US20150315612 SEQ ID NO: 8 |
| (AAV127.5) | | |
| AAVhu.43 | 261 | US20150315612 SEQ ID NO: 160 |
| AAVhu.43 | 262 | US20150315612 SEQ ID NO: 236 |
| AAVhu.43 | 263 | US20150315612 SEQ ID NO: 80 |
| (AAV128.1) | | |
| AAVhu.44 | 264 | US20150159173 SEQ ID NO: 45, |
| | | US20150315612 SEQ ID NO: 158 |
| AAVhu.44 | 265 | US20150315612 SEQ ID NO: 81 |
| (AAV128.3) | | |
| AAVhu.44R1 | 266 | US20150159173 |
| AAVhu.44R2 | 267 | US20150159173 |
| AAVhu.44R3 | 268 | US20150159173 |
| AAVhu.45 | 269 | US20150315612 SEQ ID NO: 76 |
| AAVhu.45 | 270 | US20150315612 SEQ ID NO: 127 |
| AAVhu.46 | 271 | US20150315612 SEQ ID NO: 82 |
| AAVhu.46 | 272 | US20150315612 SEQ ID NO: 159 |
| AAVhu.46 | 273 | US20150315612 SEQ ID NO: 224 |
| AAVhu.47 | 274 | US20150315612 SEQ ID NO: 77 |
| AAVhu.47 | 275 | US20150315612 SEQ ID NO: 128 |
| AAVhu.48 | 276 | US20150159173 SEQ ID NO: 38 |
| AAVhu.48 | 277 | US20150315612 SEQ ID NO: 157 |
| AAVhu.48 | 278 | US20150315612 SEQ ID NO: 78 |
| (AAV130.4) | | |
| AAVhu.48R1 | 279 | US20150159173 |
| AAVhu.48R2 | 280 | US20150159173 |
| AAVhu.48R3 | 281 | US20150159173 |
| AAVhu.49 | 282 | US20150315612 SEQ ID NO: 209 |
| AAVhu.49 | 283 | US20150315612 SEQ ID NO: 189 |
| AAVhu.5 | 284 | US20150315612 SEQ ID NO: 45 |
| AAVhu.5 | 285 | US20150315612 SEQ ID NO: 142 |
| AAVhu.51 | 286 | US20150315612 SEQ ID NO: 208 |
| AAVhu.51 | 287 | US20150315612 SEQ ID NO: 190 |
| AAVhu.52 | 288 | US20150315612 SEQ ID NO: 210 |
| AAVhu.52 | 289 | US20150315612 SEQ ID NO: 191 |
| AAVhu.53 | 290 | US20150159173 SEQ ID NO: 19 |
| AAVhu.53 | 291 | US20150159173 SEQ ID NO: 35 |
| AAVhu.53 | 292 | US20150315612 SEQ ID NO: 176 |
| (AAV145.1) | | |
| AAVhu.54 | 293 | US20150315612 SEQ ID NO: 188 |
| AAVhu.54 | 294 | US20150315612 SEQ ID NO: 177 |
| (AAV145.5) | | |
| AAVhu.55 | 295 | US20150315612 SEQ ID NO: 187 |
| AAVhu.56 | 296 | US20150315612 SEQ ID NO: 205 |
| AAVhu.56 | 297 | US20150315612 SEQ ID NO: 168 |
| (AAV145.6) | | |
| AAVhu.56 | 298 | US20150315612 SEQ ID NO: 192 |
| (AAV145.6) | | |
| AAVhu.57 | 299 | US20150315612 SEQ ID NO: 206 |
| AAVhu.57 | 300 | US20150315612 SEQ ID NO: 169 |
| AAVhu.57 | 301 | US20150315612 SEQ ID NO: 193 |
| AAVhu.58 | 302 | US20150315612 SEQ ID NO: 207 |
| AAVhu.58 | 303 | US20150315612 SEQ ID NO: 194 |
| AAVhu.6 | 304 | US20150315612 SEQ ID NO: 5 |
| (AAV3.1) | | |
| AAVhu.6 | 305 | US20150315612 SEQ ID NO: 84 |
| (AAV3.1) | | |
| AAVhu.60 | 306 | US20150315612 SEQ ID NO: 184 |
| AAVhu.60 | 307 | US20150315612 SEQ ID NO: 170 |
| (AAV161.10) | | |
| AAVhu.61 | 308 | US20150315612 SEQ ID NO: 185 |
| AAVhu.61 | 309 | US20150315612 SEQ ID NO: 174 |
| (AAV161.6) | | |
| AAVhu.63 | 310 | US20150315612 SEQ ID NO: 204 |
| AAVhu.63 | 311 | US20150315612 SEQ ID NO: 195 |
| AAVhu.64 | 312 | US20150315612 SEQ ID NO: 212 |
| AAVhu.64 | 313 | US20150315612 SEQ ID NO: 196 |
| AAVhu.66 | 314 | US20150315612 SEQ ID NO: 197 |
| AAVhu.67 | 315 | US20150315612 SEQ ID NO: 215 |
| AAVhu.67 | 316 | US20150315612 SEQ ID NO: 198 |
| AAVhu.7 | 317 | US20150315612 SEQ ID NO: 226 |
| AAVhu.7 | 318 | US20150315612 SEQ ID NO: 150 |
| AAVhu.7 | 319 | US20150315612 SEQ ID NO: 55 |
| (AAV7.3) | | |
| AAVhu.71 | 320 | US20150315612 SEQ ID NO: 79 |
| AAVhu.8 | 321 | US20150315612 SEQ ID NO: 53 |
| AAVhu.8 | 322 | US20150315612 SEQ ID NO: 12 |
| AAVhu.8 | 323 | US20150315612 SEQ ID NO: 151 |
| AAVhu.9 | 324 | US20150315612 SEQ ID NO: 58 |
| (AAV3.1) | | |
| AAVhu.9 | 325 | US20150315612 SEQ ID NO: 155 |
| (AAV3.1) | | |
| AAV-LK01 | 326 | US20150376607 SEQ ID NO: 2 |
| AAV-LK01 | 327 | US20150376607 SEQ ID NO: 29 |
| AAV-LK02 | 328 | US20150376607 SEQ ID NO: 3 |
| AAV-LK02 | 329 | US20150376607 SEQ ID NO: 30 |
| AAV-LK03 | 330 | US20150376607 SEQ ID NO: 4 |
| AAV-LK03 | 331 | WO2015121501 SEQ ID NO: 12, |
| | | US20150376607 SEQ ID NO: 31 |
| AAV-LK04 | 332 | US20150376607 SEQ ID NO: 5 |
| AAV-LK04 | 333 | US20150376607 SEQ ID NO: 32 |
| AAV-LK05 | 334 | US20150376607 SEQ ID NO: 6 |
| AAV-LK05 | 335 | US20150376607 SEQ ID NO: 33 |
| AAV-LK06 | 336 | US20150376607 SEQ ID NO: 7 |
| AAV-LK06 | 337 | US20150376607 SEQ ID NO: 34 |
| AAV-LK07 | 338 | US20150376607 SEQ ID NO: 8 |
| AAV-LK08 | 339 | US20150376607 SEQ ID NO: 35 |
| AAV-LK08 | 340 | US20150376607 SEQ ID NO: 9 |
| AAV-LK08 | 341 | US20150376607 SEQ ID NO: 36 |
| AAV-LK09 | 342 | US20150376607 SEQ ID NO: 10 |
| AAV-LK09 | 343 | US20150376607 SEQ ID NO: 37 |
| AAV-LK10 | 344 | US20150376607 SEQ ID NO: 11 |
| AAV-LK10 | 345 | US20150376607 SEQ ID NO: 38 |
| AAV-LK11 | 346 | US20150376607 SEQ ID NO: 12 |
| AAV-LK11 | 347 | US20150376607 SEQ ID NO: 39 |
| AAV-LK12 | 348 | US20150376607 SEQ ID NO: 13 |
| AAV-LK12 | 349 | US20150376607 SEQ ID NO: 40 |
| AAV-LK13 | 350 | US20150376607 SEQ ID NO: 14 |
| AAV-LK13 | 351 | US20150376607 SEQ ID NO: 41 |
| AAV-LK14 | 352 | US20150376607 SEQ ID NO: 15 |
| AAV-LK14 | 353 | US20150376607 SEQ ID NO: 42 |
| AAV-LK15 | 354 | US20150376607 SEQ ID NO: 16 |
| AAV-LK15 | 355 | US20150376607 SEQ ID NO: 43 |
| AAV-LK16 | 356 | US20150376607 SEQ ID NO: 17 |
| AAV-LK16 | 357 | US20150376607 SEQ ID NO: 44 |
| AAV-LK17 | 358 | US20150376607 SEQ ID NO: 18 |
| AAV-LK17 | 359 | US20150376607 SEQ ID NO: 45 |
| AAV-LK18 | 360 | US20150376607 SEQ ID NO: 19 |
| AAV-LK18 | 361 | US20150376607 SEQ ID NO: 46 |
| AAV-LK19 | 362 | US20150376607 SEQ ID NO: 20 |
| AAV-LK19 | 363 | US20150376607 SEQ ID NO: 47 |
| AAV-PAEC | 364 | US20150376607 SEQ ID NO: 1 |
| AAV-PAEC | 365 | US20150376607 SEQ ID NO: 48 |
| AAV- | 366 | US20150376607 SEQ ID NO: 26 |
| PAEC11 | | |
| AAV- | 367 | US20150376607 SEQ ID NO: 54 |
| PAEC11 | | |
| AAV- | 368 | US20150376607 SEQ ID NO: 27 |
| PAEC12 | | |
| AAV- | 369 | US20150376607 SEQ ID NO: 51 |
| PAEC12 | | |
| AAV- | 370 | US20150376607 SEQ ID NO: 28 |
| PAEC13 | | |
| AAV- | 371 | US20150376607 SEQ ID NO: 49 |
| PAEC13 | | |
| AAV-PAEC2 | 372 | US20150376607 SEQ ID NO: 21 |
| AAV-PAEC2 | 373 | US20150376607 SEQ ID NO: 56 |
| AAV-PAEC4 | 374 | US20150376607 SEQ ID NO: 22 |
| AAV-PAEC4 | 375 | US20150376607 SEQ ID NO: 55 |
| AAV-PAEC6 | 376 | US20150376607 SEQ ID NO: 23 |
| AAV-PAEC6 | 377 | US20150376607 SEQ ID NO: 52 |
| AAV-PAEC7 | 378 | US20150376607 SEQ ID NO: 24 |
| AAV-PAEC7 | 379 | US20150376607 SEQ ID NO: 53 |
| AAV-PAEC8 | 380 | US20150376607 SEQ ID NO: 25 |
| AAV-PAEC8 | 381 | US20150376607 SEQ ID NO: 50 |
| AAVpi.1 | 382 | US20150315612 SEQ ID NO: 28 |
| AAVpi.1 | 383 | US20150315612 SEQ ID NO: 93 |
| AAVpi.2 | 384 | US20150315612 SEQ ID NO: 30 |
| AAVpi.2 | 385 | US20150315612 SEQ ID NO: 95 |
| AAVpi.3 | 386 | US20150315612 SEQ ID NO: 29 |
| AAVpi.3 | 387 | US20150315612 SEQ ID NO: 94 |
| AAVrh.10 | 388 | US20150159173 SEQ ID NO: 9 |
| AAVrh.10 | 389 | US20150159173 SEQ ID NO: 25 |
| AAV44.2 | 390 | US20030138772 SEQ ID NO: 59 |
| AAVrh.10 | 391 | US20030138772 SEQ ID NO: 81 |
| (AAV44.2) | | |
| AAV42.1B | 392 | US20030138772 SEQ ID NO: 90 |
| AAVrh.12 | 393 | US20030138772 SEQ ID NO: 30 |
| (AAV42.1b) | | |
| AAVrh.13 | 394 | US20150159173 SEQ ID NO: 10 |
| AAVrh.13 | 395 | US20150159173 SEQ ID NO: 26 |
| AAVrh.13 | 396 | US20150315612 SEQ ID NO: 228 |
| AAVrh.13R | 397 | US20150159173 |
| AAV42.3A | 398 | US20030138772 SEQ ID NO: 87 |
| AAVrh.14 | 399 | US20030138772 SEQ ID NO: 32 |
| (AAV42.3a) | | |
| AAV42.5A | 400 | US20030138772 SEQ ID NO: 89 |
| AAVrh.17 | 401 | US20030138772 SEQ ID NO: 34 |
| (AAV42.5a) | | |
| AAV42.5B | 402 | US20030138772 SEQ ID NO: 91 |
| AAVrh.18 | 403 | US20030138772 SEQ ID NO: 29 |
| (AAV42.5b) | | |
| AAV42.6B | 404 | US20030138772 SEQ ID NO: 112 |
| AAVrh.19 | 405 | US20030138772 SEQ ID NO: 38 |
| (AAV42.6b) | | |
| AAVrh.2 | 406 | US20150159173 SEQ ID NO: 39 |
| AAVrh.2 | 407 | US20150315612 SEQ ID NO: 231 |
| AAVrh.20 | 408 | US20150159173 SEQ ID NO: 1 |
| AAV42.10 | 409 | US20030138772 SEQ ID NO: 106 |
| AAVrh.21 | 410 | US20030138772 SEQ ID NO: 35 |
| (AAV42.10) | | |
| AAV42.11 | 411 | US20030138772 SEQ ID NO: 108 |
| AAVrh.22 | 412 | US20030138772 SEQ ID NO: 37 |
| (AAV42.11) | | |
| AAV42.12 | 413 | US20030138772 SEQ ID NO: 113 |
| AAVrh.23 | 414 | US20030138772 SEQ ID NO: 58 |
| (AAV42.12) | | |
| AAV42.13 | 415 | US20030138772 SEQ ID NO: 86 |
| AAVrh.24 | 416 | US20030138772 SEQ ID NO: 31 |
| (AAV42.13) | | |
| AAV42.15 | 417 | US20030138772 SEQ ID NO: 84 |
| AAVrh.25 | 418 | US20030138772 SEQ ID NO: 28 |
| (AAV42.15) | | |
| AAVrh.2R | 419 | US20150159173 |
| AAVrh.31 | 420 | US20030138772 SEQ ID NO: 48 |
| (AAV223.1) | | |
| AAVC1 | 421 | US20030138772 SEQ ID NO: 60 |
| AAVrh.32 | 422 | US20030138772 SEQ ID NO: 19 |
| (AAVC1) | | |
| AAVrh.32/33 | 423 | US20150159173 SEQ ID NO: 2 |
| AAVrh.33 | 424 | US20030138772 SEQ ID NO: 20 |
| (AAVC3) | | |
| AAVC5 | 425 | US20030138772 SEQ ID NO: 62 |
| AAVrh.34 | 426 | US20030138772 SEQ ID NO: 21 |
| (AAVC5) | | |
| AAVF1 | 427 | US20030138772 SEQ ID NO: 109 |
| AAVrh.35 | 428 | US20030138772 SEQ ID NO: 22 |
| (AAVF1) | | |
| AAVF3 | 429 | US20030138772 SEQ ID NO: 111 |
| AAVrh.36 | 430 | US20030138772 SEQ ID NO: 23 |
| (AAVF3) | | |
| AAVrh.37 | 431 | US20030138772 SEQ ID NO: 24 |
| AAVrh.37 | 432 | US20150159173 SEQ ID NO: 40 |
| AAVrh.37 | 433 | US20150315612 SEQ ID NO: 229 |
| AAVrh.37R2 | 434 | US20150159173 |
| AAVrh.38 | 435 | US20150315612 SEQ ID NO: 7 |
| (AAVLG-4) | | |
| AAVrh.38 | 436 | US20150315612 SEQ ID NO: 86 |
| (AAVLG-4) | | |
| AAVrh.39 | 437 | US20150159173 SEQ ID NO: 20, |
| | | US20150315612 SEQ ID NO: 13 |
| AAVrh.39 | 438 | US20150159173 SEQ ID NO: 3, |
| | | US20150159173 SEQ ID NO: 36, |
| | | US20150315612 SEQ ID NO: 89 |
| AAVrh.40 | 439 | US20150315612 SEQ ID NO: 92 |
| AAVrh.40 | 440 | US20150315612 SEQ ID NO: 14 |
| (AAVLG-10) | | |
| AAVrh.43 | 441 | US20150315612 SEQ ID NO: 43, |
| (AAVN721-8) | | US20150159173 SEQ ID NO: 21 |
| AAVrh.43 | 442 | US20150315612 SEQ ID NO: 163, |
| (AAVN721-8) | | US20150159173 SEQ ID NO: 37 |
| AAVrh.44 | 443 | US20150315612 SEQ ID NO: 34 |
| AAVrh.44 | 444 | US20150315612 SEQ ID NO: 111 |
| AAVrh.45 | 445 | US20150315612 SEQ ID NO: 41 |
| AAVrh.45 | 446 | US20150315612 SEQ ID NO: 109 |
| AAVrh.46 | 447 | US20150159173 SEQ ID NO: 22, |
| | | US20150315612 SEQ ID NO: 19 |
| AAVrh.46 | 448 | US20150159173 SEQ ID NO: 4, |
| | | US20150315612 SEQ ID NO: 101 |
| AAVrh.47 | 449 | US20150315612 SEQ ID NO: 38 |
| AAVrh.47 | 450 | US20150315612 SEQ ID NO: 118 |
| AAVrh.48 | 451 | US20150159173 SEQ ID NO: 44, |
| | | US20150315612 SEQ ID NO: 115 |
| AAVrh.48.1 | 452 | US20150159173 |
| AAVrh.48.1.2 | 453 | US20150159173 |
| AAVrh.48.2 | 454 | US20150159173 |
| AAVrh.48 | 455 | US20150315612 SEQ ID NO: 32 |
| (AAV1-7) | | |
| AAVrh.49 | 456 | US20150315612 SEQ ID NO: 25 |
| (AAV1-8) | | |
| AAVrh.49 | 457 | US20150315612 SEQ ID NO: 103 |
| (AAV1-8) | | |
| AAVrh.50 | 458 | US20150315612 SEQ ID NO: 23 |
| (AAV2-4) | | |
| AAVrh.50 | 459 | US20150315612 SEQ ID NO: 108 |
| (AAV2-4) | | |
| AAVrh.51 | 460 | US20150315612 SEQ ID NO: 22 |
| (AAV2-5) | | |
| AAVrh.51 | 461 | US20150315612 SEQ ID NO: 104 |
| (AAV2-5) | | |
| AAVrh.52 | 462 | US20150315612 SEQ ID NO: 18 |
| (AAV3-9) | | |
| AAVrh.52 | 463 | US20150315612 SEQ ID NO: 96 |
| (AAV3-9) | | |
| AAVrh.53 | 464 | US20150315612 SEQ ID NO: 97 |
| AAVrh.53 | 465 | US20150315612 SEQ ID NO: 17 |
| (AAV3-11) | | |
| AAVrh.53 | 466 | US20150315612 SEQ ID NO: 186 |
| (AAV3-11) | | |
| AAVrh.54 | 467 | US20150315612 SEQ ID NO: 40 |
| AAVrh.54 | 468 | US20150159173 SEQ ID NO: 49, |
| | | US20150315612 SEQ ID NO: 116 |
| AAVrh.55 | 469 | US20150315612 SEQ ID NO: 37 |
| AAVrh.55 | 470 | US20150315612 SEQ ID NO: 117 |
| (AAV4-19) | | |
| AAVrh.56 | 471 | US20150315612 SEQ ID NO: 54 |
| AAVrh.56 | 472 | US20150315612 SEQ ID NO: 152 |
| AAVrh.57 | 473 | US20150315612 SEQ ID NO: 26 |
| AAVrh.57 | 474 | US20150315612 SEQ ID NO: 105 |
| AAVrh.58 | 475 | US20150315612 SEQ ID NO: 27 |
| AAVrh.58 | 476 | US20150159173 SEQ ID NO: 48, |
| | | US20150315612 SEQ ID NO: 106 |
| AAVrh.58 | 477 | US20150315612 SEQ ID NO: 232 |
| AAVrh.59 | 478 | US20150315612 SEQ ID NO: 42 |
| AAVrh.59 | 479 | US20150315612 SEQ ID NO: 110 |
| AAVrh.60 | 480 | US20150315612 SEQ ID NO: 31 |
| AAVrh.60 | 481 | US20150315612 SEQ ID NO: 120 |
| AAVrh.61 | 482 | US20150315612 SEQ ID NO: 107 |
| AAVrh.61 | 483 | US20150315612 SEQ ID NO: 21 |
| (AAV2-3) | | |
| AAVrh.62 | 484 | US20150315612 SEQ ID NO: 33 |
| (AAV2-15) | | |
| AAVrh.62 | 485 | US20150315612 SEQ ID NO: 114 |
| (AAV2-15) | | |
| AAVrh.64 | 486 | US20150315612 SEQ ID NO: 15 |
| AAVrh.64 | 487 | US20150159173 SEQ ID NO: 43, |
| | | US20150315612 SEQ ID NO: 99 |
| AAVrh.64 | 488 | US20150315612 SEQ ID NO: 233 |
| AAVRh.64R1 | 489 | US20150159173 |
| AAVRh.64R2 | 490 | US20150159173 |
| AAVrh.65 | 491 | US20150315612 SEQ ID NO: 35 |
| AAVrh.65 | 492 | US20150315612 SEQ ID NO: 112 |
| AAVrh.67 | 493 | US20150315612 SEQ ID NO: 36 |
| AAVrh.67 | 494 | US20150315612 SEQ ID NO: 230 |
| AAVrh.67 | 495 | US20150159173 SEQ ID NO: 47, |
| | | US20150315612 SEQ ID NO: 113 |
| AAVrh.68 | 496 | US20150315612 SEQ ID NO: 16 |
| AAVrh.68 | 497 | US20150315612 SEQ ID NO: 100 |
| AAVrh.69 | 498 | US20150315612 SEQ ID NO: 39 |
| AAVrh.69 | 499 | US20150315612 SEQ ID NO: 119 |
| AAVrh.70 | 500 | US20150315612 SEQ ID NO: 20 |
| AAVrh.70 | 501 | US20150315612 SEQ ID NO: 98 |
| AAVrh.71 | 502 | US20150315612 SEQ ID NO: 162 |
| AAVrh.72 | 503 | US20150315612 SEQ ID NO: 9 |
| AAVrh.73 | 504 | US20150159173 SEQ ID NO: 5 |
| AAVrh.74 | 505 | US20150159173 SEQ ID NO: 6 |
| AAVrh.8 | 506 | US20150159173 SEQ ID NO: 41 |
| AAVrh.8 | 507 | US20150315612 SEQ ID NO: 235 |
| AAVrh.8R | 508 | US20150159173, |
| | | WO2015168666 SEQ ID NO: 9 |
| AAVrh.8R | 509 | WO2015168666 SEQ ID NO: 10 |
| A586R | | |
| mutant | | |
| AAVrh.8R | 510 | WO2015168666 SEQ ID NO: 11 |
| R533A | | |
| mutant | | |
| BAAV | 511 | U.S. Pat. No. 9,193,769 SEQ ID NO: 8 |
| (bovine | | |
| AAV) | | |
| BAAV | 512 | U.S. Pat. No. 9,193,769 SEQ ID NO: 10 |
| (bovine | | |
| AAV) | | |
| BAAV | 513 | U.S. Pat. No. 9,193,769 SEQ ID NO: 4 |
| (bovine | | |
| AAV) | | |
| BAAV | 514 | U.S. Pat. No. 9,193,769 SEQ ID NO: 2 |
| (bovine | | |
| AAV) | | |
| BAAV | 515 | U.S. Pat. No. 9,193,769 SEQ ID NO: 6 |
| (bovine | | |
| AAV) | | |
| BAAV | 516 | U.S. Pat. No. 9,193,769 SEQ ID NO: 1 |
| (bovine | | |
| AAV) | | |
| BAAV | 517 | U.S. Pat. No. 9,193,769 SEQ ID NO: 5 |
| (bovine | | |
| AAV) | | |
| BAAV | 518 | U.S. Pat. No. 9,193,769 SEQ ID NO: 3 |
| (bovine | | |
| AAV) | | |
| BAAV | 519 | U.S. Pat. No. 9,193,769 SEQ ID NO: 11 |
| (bovine | | |
| AAV) | | |
| BAAV | 520 | U.S. Pat. No. 7,427,396 SEQ ID NO: 5 |
| (bovine | | |
| AAV) | | |
| BAAV | 521 | U.S. Pat. No. 7,427,396 SEQ ID NO: 6 |
| (bovine | | |
| AAV) | | |
| BAAV | 522 | U.S. Pat. No. 9,193,769 SEQ ID NO: 7 |
| (bovine | | |
| AAV) | | |
| BAAV | 523 | U.S. Pat. No. 9,193,769 SEQ ID NO: 9 |
| (bovine | | |
| AAV) | | |
| BNP61 AAV | 524 | US20150238550 SEQ ID NO: 1 |
| BNP61 AAV | 525 | US20150238550 SEQ ID NO: 2 |
| BNP62 AAV | 526 | US20150238550 SEQ ID NO: 3 |
| BNP63 AAV | 527 | US20150238550 SEQ ID NO: 4 |
| caprine AAV | 528 | U.S. Pat. No. 7,427,396 SEQ ID NO: 3 |
| caprine AAV | 529 | U.S. Pat. No. 7,427,396 SEQ ID NO: 4 |
| true type | 530 | WO2015121501 SEQ ID NO: 2 |
| AAV | | |
| (ttAAV) | | |
| AAAV | 531 | U.S. Pat. No. 9,238,800 SEQ ID NO: 12 |
| (Avian AAV) | | |
| AAAV | 532 | U.S. Pat. No. 9,238,800 SEQ ID NO: 2 |
| (Avian AAV) | | |
| AAAV | 533 | U.S. Pat. No. 9,238,800 SEQ ID NO: 6 |
| (Avian AAV) | | |
| AAAV | 534 | U.S. Pat. No. 9,238,800 SEQ ID NO: 4 |
| (Avian AAV) | | |
| AAAV | 535 | U.S. Pat. No. 9,238,800 SEQ ID NO: 8 |
| (Avian AAV) | | |
| AAAV | 536 | U.S. Pat. No. 9,238,800 SEQ ID NO: 14 |
| (Avian AAV) | | |
| AAAV | 537 | U.S. Pat. No. 9,238,800 SEQ ID NO: 10 |
| (Avian AAV) | | |
| AAAV | 538 | U.S. Pat. No. 9,238,800 SEQ ID NO: 15 |
| (Avian AAV) | | |
| AAAV | 539 | U.S. Pat. No. 9,238,800 SEQ ID NO: 5 |
| (Avian AAV) | | |
| AAAV | 540 | U.S. Pat. No. 9,238,800 SEQ ID NO: 9 |
| (Avian AAV) | | |
| AAAV | 541 | U.S. Pat. No. 9,238,800 SEQ ID NO: 3 |
| (Avian AAV) | | |
| AAAV | 542 | U.S. Pat. No. 9,238,800 SEQ ID NO: 7 |
| (Avian AAV) | | |
| AAAV | 543 | U.S. Pat. No. 9,238,800 SEQ ID NO: 11 |
| (Avian AAV) | | |
| AAAV | 544 | U.S. Pat. No. 9,238,800 SEQ ID NO: 13 |
| (Avian AAV) | | |
| AAAV | 545 | U.S. Pat. No. 9,238,800 SEQ ID NO: 1 |
| (Avian AAV) | | |
| AAV Shuffle | 546 | US20160017295 SEQ ID NO: 23 |
| 100-1 | | |
| AAV Shuffle | 547 | US20160017295 SEQ ID NO: 11 |
| 100-1 | | |
| AAV Shuffle | 548 | US20160017295 SEQ ID NO: 37 |
| 100-2 | | |
| AAV Shuffle | 549 | US20160017295 SEQ ID NO: 29 |
| 100-2 | | |
| AAV Shuffle | 550 | US20160017295 SEQ ID NO: 24 |
| 100-3 | | |
| AAV Shuffle | 551 | US20160017295 SEQ ID NO: 12 |
| 100-3 | | |
| AAV Shuffle | 552 | US20160017295 SEQ ID NO: 25 |
| 100-7 | | |
| AAV Shuffle | 553 | US20160017295 SEQ ID NO: 13 |
| 100-7 | | |
| AAV Shuffle | 554 | US20160017295 SEQ ID NO: 34 |
| 10-2 | | |
| AAV Shuffle | 555 | US20160017295 SEQ ID NO: 26 |
| 10-2 | | |
| AAV Shuffle | 556 | US20160017295 SEQ ID NO: 35 |
| 10-6 | | |
| AAV Shuffle | 557 | US20160017295 SEQ ID NO: 27 |
| 10-6 | | |
| AAV Shuffle | 558 | US20160017295 SEQ ID NO: 36 |
| 10-8 | | |
| AAV Shuffle | 559 | US20160017295 SEQ ID NO: 28 |
| 10-8 | | |
| AAV SM | 560 | US20160017295 SEQ ID NO: 41 |
| 100-10 | | |
| AAV SM | 561 | US20160017295 SEQ ID NO: 33 |
| 100-10 | | |
| AAV SM | 562 | US20160017295 SEQ ID NO: 40 |
| 100-3 | | |
| AAV SM | 563 | US20160017295 SEQ ID NO: 32 |
| 100-3 | | |
| AAV SM | 564 | US20160017295 SEQ ID NO: 38 |
| 10-1 | | |
| AAV SM | 565 | US20160017295 SEQ ID NO: 30 |
| 10-1 | | |
| AAV SM | 566 | US20160017295 SEQ ID NO: 10 |
| 10-2 | | |
| AAV SM | 567 | US20160017295 SEQ ID NO: 22 |
| 10-2 | | |
| AAV SM | 568 | US20160017295 SEQ ID NO: 39 |
| 10-8 | | |
| AAV SM | 569 | US20160017295 SEQ ID NO: 31 |
| 10-8 | | |
| AAV SM | 560 | US20160017295 SEQ ID NO: 41 |
| 100-10 | | |
| AAV SM | 561 | US20160017295 SEQ ID NO: 33 |
| 100-10 | | |
| AAV SM | 562 | US20160017295 SEQ ID NO: 40 |
| 300-3 | | |
| AAV SM | 563 | US20160017295 SEQ ID NO: 32 |
| 100-3 | | |
| AAV SM | 564 | US20160017295 SEQ ID NO: 38 |
| 10-1 | | |
| AAV SM | 565 | US20160017295 SEQ ID NO: 30 |
| 10-1 | | |
| AAV SM | 566 | US20160017295 SEQ ID NO: 10 |
| 10-2 | | |
| AAV SM | 567 | US20160017295 SEQ ID NO: 22 |
| 10-2 | | |
| AAV SM | 568 | US20160017295 SEQ ID NO: 39 |
| 10-8 | | |
| AAV SM | 569 | US20160017295 SEQ ID NO: 31 |
| 10-8 | | |
| AAVF1/ | 570 | WO2016049230 SEQ ID NO: 20 |
| HSC1 | | |
| AAVF2/ | 571 | WO2016049230 SEQ ID NO: 21 |
| HSC2 | | |
| AAVF3/ | 572 | WO2016049230 SEQ ID NO: 22 |
| HSC3 | | |
| AAVF4/ | 573 | WO2016049230 SEQ ID NO: 23 |
| HSC4 | | |
| AAVF5/ | 574 | WO2016049230 SEQ ID NO: 25 |
| HSC5 | | |
| AAVF6/ | 575 | WO2016049230 SEQ ID NO: 24 |
| HSC6 | | |
| AAVF7/ | 576 | WO2016049230 SEQ ID NO: 27 |
| HSC | | |
| AAVF8/ | 577 | WO2016049230 SEQ ID NO: 28 |
| HSC8 | | |
| AAVF9/ | 578 | WO2016049230 SEQ ID NO: 29 |
| HSC9 | | |
| AAVF11/ | 579 | WO2016049230 SEQ ID NO: 26 |
| HSC11 | | |
| AAVF12/ | 580 | WO2016049230 SEQ ID NO: 30 |
| HSC12 | | |
| AAVF13/ | 581 | WO2016049230 SEQ ID NO: 31 |
| HSC13 | | |
| AAVF14/ | 582 | WO2016049230 SEQ ID NO: 32 |
| HSC14 | | |
| AAVF15/ | 583 | WO2016049230 SEQ ID NO: 33 |
| HSC15 | | |
| AAVF16/ | 584 | WO2016049230 SEQ ID NO: 34 |
| HSC16 | | |
| AAVF17/ | 585 | WO2016049230 SEQ ID NO: 35 |
| HSC17 | | |
| AAVF1/HSC1 | 586 | WO2016049230 SEQ ID NO: 2 |
| AAVF2/HSC2 | 587 | WO2016049230 SEQ ID NO: 3 |
| AAVF3/HSC3 | 588 | WO2016049230 SEQ ID NO: 5 |
| AAVF4/HSC4 | 589 | WO2016049230 SEQ ID NO: 6 |
| AAVF5/HSC5 | 590 | WO2016049230 SEQ ID NO: 11 |
| AAVF6/HSC6 | 591 | WO2016049230 SEQ ID NO: 7 |
| AAVF7/HSC7 | 592 | WO2016049230 SEQ ID NO: 8 |
| AAVF8/HSC8 | 593 | WO2016049230 SEQ ID NO: 9 |
| AAVF9/HSC9 | 594 | WO2016049230 SEQ ID NO: 10 |
| AAVF11/ | 595 | WO2016049230 SEQ ID NO: 4 |
| HSC11 | | |
| AAVF12/ | 596 | WO2016049230 SEQ ID NO: 12 |
| HSC12 | | |
| AAVF13/ | 597 | WO2016049230 SEQ ID NO: 14 |
| HSC13 | | |
| AAVF14/ | 598 | WO2016049230 SEQ ID NO: 15 |
| HSC14 | | |
| AAVF15/ | 599 | WO2016049230 SEQ ID NO: 16 |
| HSC15 | | |
| AAVF16/ | 600 | WO2016049230 SEQ ID NO: 17 |
| HSC16 | | |
| AAVF17/ | 601 | WO2016049230 SEQ ID NO: 13 |
| HSC17 | | |
| AAV CBr-E1 | 602 | U.S. Pat. No. 8,734,809 SEQ ID NO: 13 |
| AAV CBr-E2 | 603 | U.S. Pat. No. 8,734,809 SEQ ID NO: 14 |
| AAV CBr-E3 | 604 | U.S. Pat. No. 8,734,809 SEQ ID NO: 15 |
| AAV CBr-E4 | 605 | U.S. Pat. No. 8,734,809 SEQ ID NO: 16 |
| AAV CBr-E5 | 606 | U.S. Pat. No. 8,734,809 SEQ ID NO: 17 |
| AAV CBr-e5 | 607 | U.S. Pat. No. 8,734,809 SEQ ID NO: 18 |
| AAV CBr-E6 | 608 | U.S. Pat. No. 8,734,809 SEQ ID NO: 19 |
| AAV CBr-E7 | 609 | U.S. Pat. No. 8,734,809 SEQ ID NO: 20 |
| AAV CBr-E8 | 610 | U.S. Pat. No. 8,734,809 SEQ ID NO: 21 |
| AAV CLv-D1 | 611 | U.S. Pat. No. 8,734,809 SEQ ID NO: 22 |
| AAV CLv-D2 | 612 | U.S. Pat. No. 8,734,809 SEQ ID NO: 23 |
| AAV CLv-D3 | 613 | U.S. Pat. No. 8,734,809 SEQ ID NO: 24 |
| AAV CLv-D4 | 614 | U.S. Pat. No. 8,734,809 SEQ ID NO: 25 |
| AAV CLv-D5 | 615 | U.S. Pat. No. 8,734,809 SEQ ID NO: 26 |
| AAV CLv-D6 | 616 | U.S. Pat. No. 8,734,809 SEQ ID NO: 27 |
| AAV CLv-D7 | 617 | U.S. Pat. No. 8,734,809 SEQ ID NO: 28 |
| AAV CLv-D8 | 618 | U.S. Pat. No. 8,734,809 SEQ ID NO: 29 |
| AAV CLv-E1 | 619 | U.S. Pat. No. 8,734,809 SEQ ID NO: 13 |
| AAV CLv-R1 | 620 | U.S. Pat. No. 8,734,809 SEQ ID NO: 30 |
| AAV CLv-R2 | 621 | U.S. Pat. No. 8,734,809 SEQ ID NO: 31 |
| AAV CLv-R3 | 622 | U.S. Pat. No. 8,734,809 SEQ ID NO: 32 |
| AAV CLv-R4 | 623 | U.S. Pat. No. 8,734,809 SEQ ID NO: 33 |
| AAV CLv-R5 | 624 | U.S. Pat. No. 8,734,809 SEQ ID NO: 34 |
| AAV CLv-R6 | 625 | U.S. Pat. No. 8,734,809 SEQ ID NO: 35 |
| AAV CLv-R7 | 626 | U.S. Pat. No. 8,734,809 SEQ ID NO: 36 |
| AAV CLv-R8 | 627 | U.S. Pat. No. 8,734,809 SEQ ID NO: 37 |
| AAV CLv-R9 | 628 | U.S. Pat. No. 8,734,809 SEQ ID NO: 38 |
| AAV CLg-F1 | 629 | U.S. Pat. No. 8,734,809 SEQ ID NO: 39 |
| AAV CLg-F2 | 630 | U.S. Pat. No. 8,734,809 SEQ ID NO: 40 |
| AAV CLg-F3 | 631 | U.S. Pat. No. 8,734,809 SEQ ID NO: 41 |
| AAV CLg-F4 | 632 | U.S. Pat. No. 8,734,809 SEQ ID NO: 42 |
| AAV CLg-F5 | 633 | U.S. Pat. No. 8,734,809 SEQ ID NO: 43 |
| AAV CLg-F6 | 634 | U.S. Pat. No. 8,734,809 SEQ ID NO: 43 |
| AAV CLg-F7 | 635 | U.S. Pat. No. 8,734,809 SEQ ID NO: 44 |
| AAV CLg-F8 | 636 | U.S. Pat. No. 8,734,809 SEQ ID NO: 43 |
| AAV CSp-1 | 637 | U.S. Pat. No. 8,734,809 SEQ ID NO: 45 |
| AAV CSp-10 | 638 | U.S. Pat. No. 8,734,809 SEQ ID NO: 46 |
| AAV CSp-11 | 639 | U.S. Pat. No. 8,734,809 SEQ ID NO: 47 |
| AAV CSp-2 | 640 | U.S. Pat. No. 8,734,809 SEQ ID NO: 48 |
| AAV CSp-3 | 641 | U.S. Pat. No. 8,734,809 SEQ ID NO: 49 |
| AAV CSp-4 | 642 | U.S. Pat. No. 8,734,809 SEQ ID NO: 50 |
| AAV CSp-6 | 643 | U.S. Pat. No. 8,734,809 SEQ ID NO: 51 |
| AAV CSp-7 | 644 | U.S. Pat. No. 8,734,809 SEQ ID NO: 52 |
| AAV CSp-8 | 645 | U.S. Pat. No. 8,734,809 SEQ ID NO: 53 |
| AAV CSp-9 | 646 | U.S. Pat. No. 8,734,809 SEQ ID NO: 54 |
| AAV CHt-2 | 647 | U.S. Pat. No. 8,734,809 SEQ ID NO: 55 |
| AAV CHt-3 | 648 | U.S. Pat. No. 8,734,809 SEQ ID NO: 56 |
| AAV CKd-1 | 649 | U.S. Pat. No. 8,734,809 SEQ ID NO: 57 |
| AAV CKd-10 | 650 | U.S. Pat. No. 8,734,809 SEQ ID NO: 58 |
| AAV CKd-2 | 651 | U.S. Pat. No. 8,734,809 SEQ ID NO: 59 |
| AAV CKd-3 | 652 | U.S. Pat. No. 8,734,809 SEQ ID NO: 60 |
| AAV CKd-4 | 653 | U.S. Pat. No. 8,734,809 SEQ ID NO: 61 |
| AAV CKd-6 | 654 | U.S. Pat. No. 8,734,809 SEQ ID NO: 62 |
| AAV CKd-7 | 655 | U.S. Pat. No. 8,734,809 SEQ ID NO: 63 |
| AAV CKd-8 | 656 | U.S. Pat. No. 8,734,809 SEQ ID NO: 64 |
| AAV CLv-1 | 657 | U.S. Pat. No. 8,734,809 SEQ ID NO: 65 |
| AAV CLv-12 | 658 | U.S. Pat. No. 8,734,809 SEQ ID NO: 66 |
| AAV CLv-13 | 659 | U.S. Pat. No. 8,734,809 SEQ ID NO: 67 |
| AAV CLv-2 | 660 | U.S. Pat. No. 8,734,809 SEQ ID NO: 68 |
| AAV CLv-3 | 661 | U.S. Pat. No. 8,734,809 SEQ ID NO: 69 |
| AAV CLv-4 | 662 | U.S. Pat. No. 8,734,809 SEQ ID NO: 70 |
| AAV CLv-6 | 663 | U.S. Pat. No. 8,734,809 SEQ ID NO: 71 |
| AAV CLv-8 | 664 | U.S. Pat. No. 8,734,809 SEQ ID NO: 72 |
| AAV CKd-B1 | 665 | U.S. Pat. No. 8,734,809 SEQ ID NO: 73 |
| AAV CKd-B2 | 666 | U.S. Pat. No. 8,734,809 SEQ ID NO: 74 |
| AAV CKd-B3 | 667 | U.S. Pat. No. 8,734,809 SEQ ID NO: 75 |
| AAV CKd-B4 | 668 | U.S. Pat. No. 8,734,809 SEQ ID NO: 76 |
| AAV CKd-B5 | 669 | U.S. Pat. No. 8,734,809 SEQ ID NO: 77 |
| AAV CKd-B6 | 670 | U.S. Pat. No. 8,734,809 SEQ ID NO: 78 |
| AAV CKd-B7 | 671 | U.S. Pat. No. 8,734,809 SEQ ID NO: 79 |
| AAV CKd-B8 | 672 | U.S. Pat. No. 8,734,809 SEQ ID NO: 80 |
| AAV CKd-H1 | 673 | U.S. Pat. No. 8,734,809 SEQ ID NO: 81 |
| AAV CKd-H2 | 674 | U.S. Pat. No. 8,734,809 SEQ ID NO: 82 |
| AAV CKd-H3 | 675 | U.S. Pat. No. 8,734,809 SEQ ID NO: 83 |
| AAV CKd-H4 | 676 | U.S. Pat. No. 8,734,809 SEQ ID NO: 84 |
| AAV CKd-H5 | 677 | U.S. Pat. No. 8,734,809 SEQ ID NO: 85 |
| AAV CKd-H6 | 678 | U.S. Pat. No. 8,734,809 SEQ ID NO: 77 |
| AAV CHt-1 | 679 | U.S. Pat. No. 8,734,809 SEQ ID NO: 86 |
| AAV CLv1-1 | 680 | U.S. Pat. No. 8,734,809 SEQ ID NO: 171 |
| AAV CLv1-2 | 681 | U.S. Pat. No. 8,734,809 SEQ ID NO: 172 |
| AAV CLv1-3 | 682 | U.S. Pat. No. 8,734,809 SEQ ID NO: 173 |
| AAV CLv1-4 | 683 | U.S. Pat. No. 8,734,809 SEQ ID NO: 174 |
| AAV Clv1-7 | 684 | U.S. Pat. No. 8,734,809 SEQ ID NO: 175 |
| AAV Clv1-8 | 685 | U.S. Pat. No. 8,734,809 SEQ ID NO: 176 |
| AAV Clv1-9 | 686 | U.S. Pat. No. 8,734,809 SEQ ID NO: 177 |
| AAV Clv1-10 | 687 | U.S. Pat. No. 8,734,809 SEQ ID NO: 178 |
| AAV.VR-355 | 688 | U.S. Pat. No. 8,734,809 SEQ ID NO: 181 |
| AAV.hu.48R3 | 689 | U.S. Pat. No. 8,734,809 SEQ ID NO: 183 |
| AAV CBr-E1 | 690 | U.S. Pat. No. 8,734,809 SEQ ID NO: 87 |
| AAV CBr-E2 | 691 | U.S. Pat. No. 8,734,809 SEQ ID NO: 88 |
| AAV CBr-E3 | 692 | U.S. Pat. No. 8,734,809 SEQ ID NO: 89 |
| AAV CBr-E4 | 693 | U.S. Pat. No. 8,734,809 SEQ ID NO: 90 |
| AAV CBr-E5 | 694 | U.S. Pat. No. 8,734,809 SEQ ID NO: 91 |
| AAV CBr-e5 | 695 | U.S. Pat. No. 8,734,809 SEQ ID NO: 92 |
| AAV CBr-E6 | 696 | U.S. Pat. No. 8,734,809 SEQ ID NO: 93 |
| AAV CBr-E7 | 697 | U.S. Pat. No. 8,734,809 SEQ ID NO: 94 |
| AAV CBr-E8 | 698 | U.S. Pat. No. 8,734,809 SEQ ID NO: 95 |
| AAV CLv-D1 | 699 | U.S. Pat. No. 8,734,809 SEQ ID NO: 96 |
| AAV CLv-D2 | 700 | U.S. Pat. No. 8,734,809 SEQ ID NO: 97 |
| AAV CLv-D3 | 701 | U.S. Pat. No. 8,734,809 SEQ ID NO: 98 |
| AAV CLv-D4 | 702 | U.S. Pat. No. 8,734,809 SEQ ID NO: 99 |
| AAV CLv-D5 | 703 | U.S. Pat. No. 8,734,809 SEQ ID NO: 100 |
| AAV CLv-D6 | 704 | U.S. Pat. No. 8,734,809 SEQ ID NO: 101 |
| AAV CLv-D7 | 705 | U.S. Pat. No. 8,734,809 SEQ ID NO: 102 |
| AAV CLv-D8 | 706 | U.S. Pat. No. 8,734,809 SEQ ID NO: 103 |
| AAV CLv-E1 | 707 | U.S. Pat. No. 8,734,809 SEQ ID NO: 87 |
| AAV CLv-R1 | 708 | U.S. Pat. No. 8,734,809 SEQ ID NO: 104 |
| AAV CLv-R2 | 709 | U.S. Pat. No. 8,734,809 SEQ ID NO: 105 |
| AAV CLv-R3 | 710 | U.S. Pat. No. 8,734,809 SEQ ID NO: 106 |
| AAV CLv-R4 | 711 | U.S. Pat. No. 8,734,809 SEQ ID NO: 107 |
| AAV CLv-R5 | 712 | U.S. Pat. No. 8,734,809 SEQ ID NO: 108 |
| AAV CLv-R6 | 713 | U.S. Pat. No. 8,734,809 SEQ ID NO: 109 |
| AAV CLv-R7 | 714 | U.S. Pat. No. 8,734,809 SEQ ID NO: 110 |
| AAV CLv-R8 | 715 | U.S. Pat. No. 8,734,809 SEQ ID NO: 111 |
| AAV CLv-R9 | 716 | U.S. Pat. No. 8,734,809 SEQ ID NO: 112 |
| AAV CLg-F1 | 717 | U.S. Pat. No. 8,734,809 SEQ ID NO: 113 |
| AAV CLg-F2 | 718 | U.S. Pat. No. 8,734,809 SEQ ID NO: 114 |
| AAV CLg-F3 | 719 | U.S. Pat. No. 8,734,809 SEQ ID NO: 115 |
| AAV CLg-F4 | 720 | U.S. Pat. No. 8,734,809 SEQ ID NO: 116 |
| AAV CLg-F5 | 721 | U.S. Pat. No. 8,734,809 SEQ ID NO: 117 |
| AAV CLg-F6 | 722 | U.S. Pat. No. 8,734,809 SEQ ID NO: 117 |
| AAV CLg-F7 | 723 | U.S. Pat. No. 8,734,809 SEQ ID NO: 118 |
| AAV CLg-F8 | 724 | U.S. Pat. No. 8,734,809 SEQ ID NO: 117 |
| AAV CSp-1 | 725 | U.S. Pat. No. 8,734,809 SEQ ID NO: 119 |
| AAV CSp-10 | 726 | U.S. Pat. No. 8,734,809 SEQ ID NO: 120 |
| AAV CSp-11 | 727 | U.S. Pat. No. 8,734,809 SEQ ID NO: 121 |
| AAV CSp-2 | 728 | U.S. Pat. No. 8,734,809 SEQ ID NO: 122 |
| AAV CSp-3 | 729 | U.S. Pat. No. 8,734,809 SEQ ID NO: 123 |
| AAV CSp-4 | 730 | U.S. Pat. No. 8,734,809 SEQ ID NO: 124 |
| AAV CSp-6 | 731 | U.S. Pat. No. 8,734,809 SEQ ID NO: 125 |
| AAV CSp-7 | 732 | U.S. Pat. No. 8,734,809 SEQ ID NO: 126 |
| AAV CSp-8 | 733 | U.S. Pat. No. 8,734,809 SEQ ID NO: 127 |
| AAV CSp-9 | 734 | U.S. Pat. No. 8,734,809 SEQ ID NO: 128 |
| AAV CHt-2 | 735 | U.S. Pat. No. 8,734,809 SEQ ID NO: 129 |
| AAV CHt-3 | 736 | U.S. Pat. No. 8,734,809 SEQ ID NO: 130 |
| AAV CKd-1 | 737 | U.S. Pat. No. 8,734,809 SEQ ID NO: 131 |
| AAV CKd-10 | 738 | U.S. Pat. No. 8,734,809 SEQ ID NO: 132 |
| AAV CKd-2 | 739 | U.S. Pat. No. 8,734,809 SEQ ID NO: 133 |
| AAV CKd-3 | 740 | U.S. Pat. No. 8,734,809 SEQ ID NO: 134 |
| AAV CKd-4 | 741 | U.S. Pat. No. 8,734,809 SEQ ID NO: 135 |
| AAV CKd-6 | 742 | U.S. Pat. No. 8,734,809 SEQ ID NO: 136 |
| AAV CKd-7 | 743 | U.S. Pat. No. 8,734,809 SEQ ID NO: 137 |
| AAV CKd-8 | 744 | U.S. Pat. No. 8,734,809 SEQ ID NO: 138 |
| AAV CLv-1 | 745 | U.S. Pat. No. 8,734,809 SEQ ID NO: 139 |
| AAV CLv-12 | 746 | U.S. Pat. No. 8,734,809 SEQ ID NO: 140 |
| AAV CLv-13 | 747 | U.S. Pat. No. 8,734,809 SEQ ID NO: 141 |
| AAV CLv-2 | 748 | U.S. Pat. No. 8,734,809 SEQ ID NO: 142 |
| AAV CLv-3 | 749 | U.S. Pat. No. 8,734,809 SEQ ID NO: 143 |
| AAV CLv-4 | 750 | U.S. Pat. No. 8,734,809 SEQ ID NO: 144 |
| AAV CLv-6 | 751 | U.S. Pat. No. 8,734,809 SEQ ID NO: 145 |
| AAV CLv-8 | 752 | U.S. Pat. No. 8,734,809 SEQ ID NO: 146 |
| AAV CKd-B1 | 753 | U.S. Pat. No. 8,734,809 SEQ ID NO: 147 |
| AAV CKd-B2 | 754 | U.S. Pat. No. 8,734,809 SEQ ID NO: 148 |
| AAV CKd-B3 | 755 | U.S. Pat. No. 8,734,809 SEQ ID NO: 149 |
| AAV CKd-B4 | 756 | U.S. Pat. No. 8,734,809 SEQ ID NO: 150 |
| AAV CKd-B5 | 757 | U.S. Pat. No. 8,734,809 SEQ ID NO: 151 |
| AAV CKd-B6 | 758 | U.S. Pat. No. 8,734,809 SEQ ID NO: 152 |
| AAV CKd-B7 | 759 | U.S. Pat. No. 8,734,809 SEQ ID NO: 153 |
| AAV CKd-B8 | 760 | U.S. Pat. No. 8,734,809 SEQ ID NO: 154 |
| AAV CKd-H1 | 761 | U.S. Pat. No. 8,734,809 SEQ ID NO: 155 |
| AAV CKd-H2 | 762 | U.S. Pat. No. 8,734,809 SEQ ID NO: 156 |
| AAV CKd-H3 | 763 | U.S. Pat. No. 8,734,809 SEQ ID NO: 157 |
| AAV CKd-H4 | 764 | U.S. Pat. No. 8,734,809 SEQ ID NO: 158 |
| AAV CKd-H5 | 765 | U.S. Pat. No. 8,734,809 SEQ ID NO: 159 |
| AAV CKd-H6 | 766 | U.S. Pat. No. 8,734,809 SEQ ID NO: 151 |
| AAV CHt-1 | 767 | U.S. Pat. No. 8,734,809 SEQ ID NO: 160 |
| AAV CHt-P2 | 768 | WO2016065001 SEQ ID NO: 1 |
| AAV CHt-P5 | 769 | WO2016065001 SEQ ID NO: 2 |
| AAV CHt-P9 | 770 | WO2016065001 SEQ ID NO: 3 |
| AAV CBr-7.1 | 771 | WO2016065001 SEQ ID NO: 4 |
| AAV CBr-7.2 | 772 | WO2016065001 SEQ ID NO: 5 |
| AAV CBr-7.3 | 773 | WO2016065001 SEQ ID NO: 6 |
| AAV CBr-7.4 | 774 | WO2016065001 SEQ ID NO: 7 |
| AAV CBr-7.5 | 775 | WO2016065001 SEQ ID NO: 8 |
| AAV CBr-7.7 | 776 | WO2016065001 SEQ ID NO: 9 |
| AAV CBr-7.8 | 777 | WO2016065001 SEQ ID NO: 10 |
| AAV CBr-7.10 | 778 | WO2016065001 SEQ ID NO: 11 |
| AAV CKd-N3 | 779 | WO2016065001 SEQ ID NO: 12 |
| AAV CKd-N4 | 780 | WO2016065001 SEQ ID NO: 13 |
| AAV CKd-N9 | 781 | WO2016065001 SEQ ID NO: 14 |
| AAV CLv-L4 | 782 | WO2016065001 SEQ ID NO: 15 |
| AAV CLv-L5 | 783 | WO2016065001 SEQ ID NO: 16 |
| AAV CLv-L6 | 784 | WO2016065001 SEQ ID NO: 17 |
| AAV CLv-K1 | 785 | WO2016065001 SEQ ID NO: 18 |
| AAV CLv-K3 | 786 | WO2016065001 SEQ ID NO: 19 |
| AAV CLv-K6 | 787 | WO2016065001 SEQ ID NO: 20 |
| AAV CLv-M1 | 788 | WO2016065001 SEQ ID NO: 21 |
| AAV CLv-M11 | 789 | WO2016065001 SEQ ID NO: 22 |
| AAV CLv-M2 | 790 | WG2016065001 SEQ ID NO: 23 |
| AAV CLv-M5 | 791 | WO2016065001 SEQ ID NO: 24 |
| AAV CLv-M6 | 792 | WO2016065001 SEQ ID NO: 25 |
| AAV CLv-M7 | 793 | WO2016065001 SEQ ID NO: 26 |
| AAV CLv-M8 | 794 | WO2016065001 SEQ ID NO: 27 |
| AAV CLv-M9 | 795 | WO2016065001 SEQ ID NO: 28 |
| AAV CHt-P1 | 796 | WO2016065001 SEQ ID NO: 29 |
| AAV CHt-P6 | 797 | WO2016065001 SEQ ID NO: 30 |
| AAV CHt-P8 | 798 | WO2016065001 SEQ ID NO: 31 |
| AAV CHt-6.1 | 799 | WO2016065001 SEQ ID NO: 32 |
| AAV CHt-6.10 | 800 | WO2016065001 SEQ ID NO: 33 |
| AAV CHt-6.5 | 801 | WO2016065001 SEQ ID NO: 34 |
| AAV CHt-6.6 | 802 | WO2016065001 SEQ ID NO: 35 |
| AAV CHt-6.7 | 803 | WO2016065001 SEQ ID NO: 36 |
| AAV CHt-6.8 | 804 | WO2016065001 SEQ ID NO: 37 |
| AAV CSp-8.10 | 805 | WO2016065001 SEQ ID NO: 38 |
| AAV CSp-8.2 | 806 | WO2016065001 SEQ ID NO: 39 |
| AAV CSp-8.4 | 807 | WO2016065001 SEQ ID NO: 40 |
| AAV CSp-8.5 | 808 | WO2016065001 SEQ ID NO: 41 |
| AAV CSp-8.6 | 809 | WO2016065001 SEQ ID NO: 42 |
| AAV CSp-8.7 | 810 | WO2016065001 SEQ ID NO: 43 |
| AAV CSp-8.8 | 811 | WO2016065001 SEQ ID NO: 44 |
| AAV CSp-8.9 | 812 | WO2016065001 SEQ ID NO: 45 |
| AAV CBr-B7.3 | 813 | WO2016065001 SEQ ID NO: 46 |
| AAV CBr-B7.4 | 814 | WO2016065001 SEQ ID NO: 47 |
| AAV3B | 815 | WO2016065001 SEQ ID NO: 48 |
| AAV4 | 816 | WO2016065001 SEQ ID NO: 49 |
| AAV5 | 817 | WO2016065001 SEQ ID NO: 50 |
| AAV CHt-P2 | 818 | WO2016065001 SEQ ID NO: 51 |
| AAV CHt-P5 | 819 | WO2016065001 SEQ ID NO: 52 |
| AAV CHt-P9 | 820 | WO2016065001 SEQ ID NO: 53 |
| AAV CBr-7.1 | 821 | WO2016065001 SEQ ID NO: 54 |
| AAV CBr-7.2 | 822 | WO2016065001 SEQ ID NO: 55 |
| AAV CBr-7.3 | 823 | WO2016065001 SEQ ID NO: 56 |
| AAV CBr-7.4 | 824 | WO2016065001 SEQ ID NO: 57 |
| AAV CBr-7.5 | 825 | WO2016065001 SEQ ID NO: 58 |
| AAV CBr-7.7 | 826 | WO2016065001 SEQ ID NO: 59 |
| AAV CBr-7.8 | 827 | WO2016065001 SEQ ID NO: 60 |
| AAV CBr-7.10 | 828 | WO2016065001 SEQ ID NO: 61 |
| AAV CKd-N3 | 829 | WO2016065001 SEQ ID NO: 62 |
| AAV CKd-N4 | 830 | WO2016065001 SEQ ID NO: 63 |
| AAV CKd-N9 | 831 | WO2016065001 SEQ ID NO: 64 |
| AAV CLv-L4 | 832 | WO2016065001 SEQ ID NO: 65 |
| AAV CLv-L5 | 833 | WO2016065001 SEQ ID NO: 66 |
| AAV CLv-L6 | 834 | WO2016065001 SEQ ID NO: 67 |
| AAV CLv-K1 | 835 | WO2016065001 SEQ ID NO: 68 |
| AAV CLv-K3 | 836 | WO2016065001 SEQ ID NO: 69 |
| AAV CLv-K6 | 837 | WO2016065001 SEQ ID NO: 70 |
| AAV CLv-M1 | 838 | WO2016065001 SEQ ID NO: 71 |
| AAV CLv-M11 | 839 | WO2016065001 SEQ ID NO: 72 |
| AAV CLv-M2 | 840 | WO2016065001 SEQ ID NO: 73 |
| AAV CLv-M5 | 841 | WO2016065001 SEQ ID NO: 74 |
| AAV CLv-M6 | 842 | WO2016065001 SEQ ID NO: 75 |
| AAV CLv-M7 | 843 | WO2016065001 SEQ ID NO: 76 |
| AAV CLv-M8 | 844 | WO2016065001 SEQ ID NO: 77 |
| AAV CLv-M9 | 845 | WO2016065001 SEQ ID NO: 78 |
| AAV CHt-P1 | 846 | WO2016065001 SEQ ID NO: 79 |
| AAV CHt-P6 | 847 | WO2016065001 SEQ ID NO: 80 |
| AAV CHt-P8 | 848 | WO2016065001 SEQ ID NO: 81 |
| AAV CHt-6.1 | 849 | WO2016065001 SEQ ID NO: 82 |
| AAV CHt-6.10 | 850 | WO2016065001 SEQ ID NO: 83 |
| AAV CHt-6.5 | 851 | WO2016065001 SEQ ID NO: 84 |
| AAV CHt-6.6 | 852 | WO2016065001 SEQ ID NO: 85 |
| AAV CHt-6.7 | 853 | WO2016065001 SEQ ID NO: 86 |
| AAV CHt-6.8 | 854 | WO2016065001 SEQ ID NO: 87 |
| AAV CSp-8.10 | 855 | WO2016065001 SEQ ID NO: 88 |
| AAV CSp-8.2 | 856 | WO2016065001 SEQ ID NO: 89 |
| AAV CSp-8.4 | 857 | WO2016065001 SEQ ID NO: 90 |
| AAV CSp-8.5 | 858 | WO2016065001 SEQ ID NO: 91 |
| AAV CSp-8.6 | 859 | WO2016065001 SEQ ID NO: 92 |
| AAV CSp-8.7 | 860 | WO2016065001 SEQ ID NO: 93 |
| AAV CSp-8.8 | 861 | WO2016065001 SEQ ID NO: 94 |
| AAV CSp-8.9 | 862 | WO2016065001 SEQ ID NO: 95 |
| AAV CBr-B7.3 | 863 | WO2016065001 SEQ ID NO: 96 |
| AAV CBr-B7.4 | 864 | WO2016065001 SEQ ID NO: 97 |
| AAV3B | 865 | WO2016065001 SEQ ID NO: 98 |
| AAV4 | 866 | WO2016065001 SEQ ID NO: 99 |
| AAV5 | 867 | WO2016065001 SEQ ID NO: 100 |
| AAVPHP.B | 868 | WO2015038958 SEQ ID NO: 8 |
| or G2B-26 | | and 13; GenBankALU85156.1 |
| AAVPHP.B | 869 | WO2015038958 SEQ ID NO: 9 |
| AAVG2B-13 | 870 | WO2015038958 SEQ ID NO: 12 |
| AAVTH1.1-32 | 871 | WO2015038958 SEQ ID NO: 14 |
| AAVTH1.1-35 | 872 | WO2015038958 SEQ ID NO: 15 |
| PHP.N/ | 1859 | WO2017100671 SEQ ID NO: 46 |
| PHP.B-DGT | | |
| PHP.S/G2A12 | 1860 | WO2017100671 SEQ ID NO: 47 |
| AAV9/ | 1861 | WO2017100671 SEQ ID NO: 45 |
| hu.14K449R | | |
| GPV | 1862 | U.S. Pat. No. 9,624,274B2 SEQ ID NO: 192 |
| B19 | 1863 | U.S. Pat. No. 9,624,274B2 SEQ ID NO: 193 |
| MVM | 1864 | U.S. Pat. No. 9,624,274B2 SEQ ID NO: 194 |
| CPV | 1865 | U.S. Pat. No. 9,624,274B2 SEQ ID NO: 195 |
| CPV | 1866 | U.S. Pat. No. 9,624,274B2 SEQ ID NO: 196 |
| AAV6 | 1867 | U.S. Pat. No. 9,546,112B2 SEQ ID NO: 5 |
| AAV6 | 1868 | U.S. Pat. No. 9,457,103B2 SEQ ID NO: 1 |
| AAV2 | 1869 | U.S. Pat. No. 9,457,103B2 SEQ ID NO: 2 |
| ShH10 | 1870 | U.S. Pat. No. 9,457,103B2 SEQ ID NO: 3 |
| ShH13 | 1871 | U.S. Pat. No. 9,457,103B2 SEQ ID NO: 4 |
| ShH10 | 1872 | U.S. Pat. No. 9,457,103B2 SEQ ID NO: 5 |
| ShH10 | 1873 | U.S. Pat. No. 9,457,103B2 SEQ ID NO: 6 |
| ShH10 | 1874 | U.S. Pat. No. 9,457,103B2 SEQ ID NO: 7 |
| ShH10 | 1875 | U.S. Pat. No. 9,457,103B2 SEQ ID NO: 8 |
| ShH10 | 1876 | U.S. Pat. No. 9,457,103B2 SEQ ID NO: 9 |
| rh74 | 1877 | U.S. Pat. No. 9,4349,28B2 SEQ ID NO: 1, |
| | | US2015023924A1 SEQ ID NO: 2 |
| rh74 | 1878 | U.S. Pat. No. 9,434,928B2 SEQ ID NO: 2, |
| | | US2015023924A1 SEQ ID NO: 1 |
| AAV8 | 1879 | U.S. Pat. No. 9,434,928B2 SEQ ID NO: 4 |
| rh74 | 1880 | U.S. Pat. No. 9,434,928B2 SEQ ID NO: 5 |
| rh74 | 1881 | US2015023924A1 SEQ ID NO: 5, |
| (RHM4-1) | | US20160375110A1 SEQ ID NO: 4 |
| rh74 | 1882 | US2015023924A1 SEQ ID NO: 6, |
| (RHM15-1) | | US20160375110A1 SEQ ID NO: 5 |
| rh74 | 1883 | US2015023924A1 SEQ ID NO: 7, |
| (RHM15-2) | | US20160375110A1 SEQ ID NO: 6 |
| rh74 | 1884 | US2015023924A1 SEQ ID NO: 8, |
| (RHM15-3/ | | US20160375110A1 SEQ ID NO: 7 |
| RHM15-5) | | |
| rh74 | 1885 | US2015023924A1 SEQ ID NO: 9, |
| (RHM15-4) | | US20160375110A1 SEQ ID NO: 8 |
| rh74 | 1886 | US2015023924A1 SEQ ID NO: 10, |
| (RHM15-6) | | US20160375110A1 SEQ ID NO: 9 |
| rh74 | 1887 | US2015023924A1 SEQ ID NO: 11 |
| (RHM4-1) | | |
| rh74 | 1888 | US2015023924A1 SEQ ID NO: 12 |
| (RHM15-1) | | |
| rh74 | 1889 | US2015023924A1 SEQ ID NO: 13 |
| (RHM15-2) | | |
| rh74 | 1890 | US2015023924A1 SEQ ID NO: 14 |
| (RHM15-3/ | | |
| RHM15-5) | | |
| rh74 | 1891 | US2015023924A1 SEQ ID NO: 15 |
| (RHM15-4) | | |
| rh74 | 1892 | US2015023924A1 SEQ ID NO: 16 |
| (RHM15-6) | | |
| AAV2 | 1893 | US20160175389A1 SEQ ID NO: 9 |
| (comprising | | |
| lung specific | | |
| polypeptide) | | |
| AAV2 | 1894 | US20160175389A1 SEQ ID NO: 10 |
| (comprising | | |
| lung specific | | |
| polypeptide) | | |
| Anc80 | 1895 | US20170051257A1 SEQ ID NO: 1 |
| Anc80 | 1896 | US20170051257A1 SEQ ID NO: 2 |
| Anc81 | 1897 | US20170051257A1 SEQ ID NO: 3 |
| Anc80 | 1898 | US20170051257A1 SEQ ID NO: 4 |
| Anc82 | 1899 | US20170051257A1 SEQ ID NO: 5 |
| Anc82 | 1900 | US20170051257A1 SEQ ID NO: 6 |
| Anc83 | 1901 | US20170051257A1 SEQ ID NO: 7 |
| Anc83 | 1902 | US20170051257A1 SEQ ID NO: 8 |
| Anc84 | 1903 | US20170051257A1 SEQ ID NO: 9 |
| Anc84 | 1904 | US20170051257A1 SEQ ID NO: 10 |
| Anc94 | 1905 | US20170051257A1 SEQ ID NO: 11 |
| Anc94 | 1906 | US20170051257A1 SEQ ID NO: 12 |
| Anc113 | 1907 | US20170051257A1 SEQ ID NO: 13 |
| Anc113 | 1908 | US20170051257A1 SEQ ID NO: 14 |
| Anc126 | 1909 | US20170051257A1 SEQ ID NO: 15 |
| Anc126 | 1910 | US20170051257A1 SEQ ID NO: 16 |
| Anc127 | 1911 | US20170051257A1 SEQ ID NO: 17 |
| Anc127 | 1912 | US20170051257A1 SEQ ID NO: 18 |
| Anc80L27 | 1913 | US20170051257A1 SEQ ID NO: 19 |
| Anc80L59 | 1914 | US20170051257A1 SEQ ID NO: 20 |
| Anc80L60 | 1915 | US20170051257A1 SEQ ID NO: 21 |
| Anc80L62 | 1916 | US20170051257A1 SEQ ID NO: 22 |
| Anc80L65 | 1917 | US20170051257A1 SEQ ID NO: 23 |
| Anc80L33 | 1918 | US20170051257A1 SEQ ID NO: 24 |
| Anc80L36 | 1919 | US20170051257A1 SEQ ID NO: 25 |
| Anc80L44 | 1920 | US20170051257A1 SEQ ID NO: 26 |
| Anc80L1 | 1921 | US20170051257A1 SEQ ID NO: 35 |
| Anc80L1 | 1922 | US20170051257A1 SEQ ID NO: 36 |
| AAV-X1 | 1923 | U.S. Pat. No. 8,283,151B2 SEQ ID NO: 11 |
| AAV-X1b | 1924 | U.S. Pat. No. 8,283,151B2 SEQ ID NO: 12 |
| AAV-X5 | 1925 | U.S. Pat. No. 8,283,151B2 SEQ ID NO: 13 |
| AAV-X19 | 1926 | U.S. Pat. No. 8,283,151B2 SEQ ID NO: 14 |
| AAV-X22 | 1927 | U.S. Pat. No. 8,283,151B2 SEQ ID NO: 15 |
| AAV-X22 | 1928 | U.S. Pat. No. 8,283,151B2 SEQ ID NO: 16 |
| AAV-X23 | 1929 | U.S. Pat. No. 8,283,151B2 SEQ ID NO: 17 |
| AAV-X24 | 1930 | U.S. Pat. No. 8,283,151B2 SEQ ID NO: 18 |
| AAV-X25 | 1931 | U.S. Pat. No. 8,283,151B2 SEQ ID NO: 19 |
| AAV-X26 | 1932 | U.S. Pat. No. 8,283,151B2 SEQ ID NO: 20 |
| AAV-X1 | 1933 | U.S. Pat. No. 8,283,151B2 SEQ ID NO: 21 |
| AAV-X1b | 1934 | U.S. Pat. No. 8,283,151B2 SEQ ID NO: 22 |
| AAV-X5 | 1935 | U.S. Pat. No. 8,283,151B2 SEQ ID NO: 23 |
| AAV-X19 | 1936 | U.S. Pat. No. 8,283,151B2 SEQ ID NO: 24 |
| AAV-X21 | 1937 | U.S. Pat. No. 8,283,151B2 SEQ ID NO: 25 |
| AAV-X22 | 1938 | U.S. Pat. No. 8,283,151B2 SEQ ID NO: 26 |
| AAV-X23 | 1939 | U.S. Pat. No. 8,283,151B2 SEQ ID NO: 27 |
| AAV-X24 | 1940 | U.S. Pat. No. 8,283,151B2 SEQ ID NO: 28 |
| AAV-X25 | 1941 | U.S. Pat. No. 8,283,151B2 SEQ ID NO: 29 |
| AAV-X26 | 1942 | U.S. Pat. No. 8,283,151B2 SEQ ID NO: 30 |
| AAVrh8 | 1943 | WO2016054554A1 SEQ ID NO: 8 |
| AAVrh8VP2FC5 | 1944 | WO2016054554A1 SEQ ID NO: 9 |
| AAVrh8VP2FC44 | 1945 | WO2016054554A1 SEQ ID NO: 30 |
| AAVrh8VP2ApoB100 | 1946 | WO2016054554A1 SEQ ID NO: 11 |
| AAVrh8VP2RVG | 1947 | WO2016054554A1 SEQ ID NO: 12 |
| AAVrh8VP2 | 1948 | WO2016054554A1 SEQ ID NO: 13 |
| Angiopep-2VP2 | | |
| AAV9.47VP1.3 | 1949 | WO2016054554A1 SEQ ID NO: 14 |
| AAV9.47VP2ICAMg3 | 1950 | WO2016054554A1 SEQ ID NO: 15 |
| AAV9.47VP2RVG | 1951 | WO2016054554A1 SEQ ID NO: 16 |
| AAV9.47VP2Angiopep-2 | 1952 | WO2016054554A1 SEQ ID NO: 17 |
| AAV9.47VP2A- | 1953 | WO2016054554A1 SEQ ID NO: 18 |
| string | | |
| AAVrh8VP2FC5 | 1954 | WO2016054554A1 SEQ ID NO: 19 |
| VP2 | | |
| AAVrh8VP2FC44 | 1955 | WO2016054554A1 SEQ ID NO: 20 |
| VP2 | | |
| AAVrb8VP2ApoB100 | 1956 | WO2016054554A1 SEQ ID NO: 21 |
| VP2 | | |
| AAVrh8VP2RVG | 1957 | WO2016054554A1 SEQ ID NO: 22 |
| VP2 | | |
| AAVrh8VP2 | 1958 | WO2016054554A1 SEQ ID NO: 23 |
| Angiopep-2VP2 | | |
| AAV9.47VP2ICAMg3 | 1959 | WO2016054554A1 SEQ ID NO: 24 |
| VP2 | | |
| AAV9.47VP2RVG | 1960 | WO2016054554A1 SEQ ID NO: 25 |
| VP2 | | |
| AAV9.47VP2Angiopep- | 1961 | WO2016054554A1 SEQ ID NO: 26 |
| 2 VP2 | | |
| AAV9.47VP2A- | 1962 | WO2016054554A1 SEQ ID NO: 27 |
| string VP2 | | |
| rAAV-B1 | 1963 | WO2016054557A1 SEQ ID NO: 1 |
| rAAV-B2 | 1964 | WO2016054557A1 SEQ ID NO: 2 |
| rAAV-B3 | 1965 | WO2016054557A1 SEQ ID NO: 3 |
| rAAV-B4 | 1966 | WO2016054557A1 SEQ ID NO: 4 |
| rAAV-B1 | 1967 | WO2016054557A1 SEQ ID NO: 5 |
| rAAV-B2 | 1968 | WO2016054557A1 SEQ ID NO: 6 |
| rAAV-B3 | 1969 | WO2016054557A1 SEQ ID NO: 7 |
| rAAV-B4 | 1970 | WO2016054557A1 SEQ ID NO: 8 |
| rAAV-L1 | 1971 | WO2016054557A1 SEQ ID NO: 9 |
| rAAV-L2 | 1972 | WO2016054557A1 SEQ ID NO: 10 |
| rAAV-L3 | 1973 | WO2016054557A1 SEQ ID NO: 11 |
| rAAV-L4 | 1974 | WO2016054557A1 SEQ ID NO: 12 |
| rAAV-L1 | 1975 | WO2016054557A1 SEQ ID NO: 13 |
| rAAV-L2 | 1976 | WO2016054557A1 SEQ ID NO: 14 |
| rAAV-L3 | 1977 | WO2016054557A1 SEQ ID NO: 15 |
| rAAV-L4 | 1978 | WO2016054557A1 SEQ ID NO: 16 |
| AAV9 | 1979 | WO2016073739A1 SEQ ID NO: 3 |
| rAAV | 1980 | WO2016081811A1 SEQ ID NO: 1 |
| rAAV | 1981 | WO2016081811A1 SEQ ID NO: 2 |
| rAAV | 1982 | WO2016081811A1 SEQ ID NO: 3 |
| rAAV | 1983 | WO2016081811A1 SEQ ID NO: 4 |
| rAAV | 1984 | WO2016081811A1 SEQ ID NO: 5 |
| rAAV | 1985 | WO2016081811A1 SEQ ID NO: 6 |
| rAAV | 1986 | WO2016081811A1 SEQ ID NO: 7 |
| rAAV | 1987 | WO2016081811A1 SEQ ID NO: 8 |
| rAAV | 1988 | WO2016081811A1 SEQ ID NO: 9 |
| rAAV | 1989 | WO2016081811A1 SEQ ID NO: 10 |
| rAAV | 1990 | WO2016081811A1 SEQ ID NO: 11 |
| rAAV | 1991 | WO2016081811A1 SEQ ID NO: 12 |
| rAAV | 1992 | WO2016081811A1 SEQ ID NO: 13 |
| rAAV | 1997 | WO2016081811A1 SEQ ID NO: 14 |
| rAAV | 1994 | WO2016081811A1 SEQ ID NO: 15 |
| rAAV | 1995 | WO2016081811A1 SEQ ID NO: 16 |
| rAAV | 1996 | WO2016081811A1 SEQ ID NO: 17 |
| rAAV | 1997 | WO2016081811A1 SEQ ID NO: 18 |
| rAAV | 1998 | WO2016081811A1 SEQ ID NO: 19 |
| rAAV | 1999 | WO2016081811A1 SEQ ID NO: 20 |
| rAAV | 2000 | WO2016081811A1 SEQ ID NO: 21 |
| rAAV | 2001 | WO2016081811A1 SEQ ID NO: 22 |
| rAAV | 2002 | WO2016081811A1 SEQ ID NO: 23 |
| rAAV | 2003 | WO2016081811A1 SEQ ID NO: 24 |
| rAAV | 2004 | WO2016081811A1 SEQ ID NO: 25 |
| rAAV | 2005 | WO2016081811A1 SEQ ID NO: 26 |
| rAAV | 2006 | WO2016081811A1 SEQ ID NO: 27 |
| rAAV | 2007 | WO2016081811A1 SEQ ID NO: 28 |
| rAAV | 2008 | WO2016081811A1 SEQ ID NO: 29 |
| rAAV | 2009 | WO2016081811A1 SEQ ID NO: 30 |
| rAAV | 2010 | WO2016081811A1 SEQ ID NO: 31 |
| rAAV | 2011 | WO2016081811A1 SEQ ID NO: 32 |
| rAAV | 2012 | WO2016081811A1 SEQ ID NO: 33 |
| rAAV | 2013 | WO2016081811A1 SEQ ID NO: 34 |
| rAAV | 2014 | WO2016081811A1 SEQ ID NO: 35 |
| rAAV | 2015 | WO2016081811A1 SEQ ID NO: 36 |
| rAAV | 2016 | WO2016081811A1 SEQ ID NO: 37 |
| rAAV | 2017 | WO2016081811A1 SEQ ID NO: 38 |
| rAAV | 2018 | WO2016081811A1 SEQ ID NO: 39 |
| rAAV | 2019 | WO2016081811A1 SEQ ID NO: 40 |
| rAAV | 2020 | WO2016081811A1 SEQ ID NO: 41 |
| rAAV | 2021 | WO2016081811A1 SEQ ID NO: 42 |
| rAAV | 2022 | WO2016081811A1 SEQ ID NO: 43 |
| rAAV | 2023 | WO2016081811A1 SEQ ID NO: 44 |
| rAAV | 2024 | WO2016081811A1 SEQ ID NO: 45 |
| rAAV | 2025 | WO2016081811A1 SEQ ID NO: 46 |
| rAAV | 2026 | WO2016081811A1 SEQ ID NO: 47 |
| rAAV | 2027 | WO2016081811A1 SEQ ID NO: 48 |
| rAAV | 2028 | WO2016081811A1 SEQ ID NO: 49 |
| rAAV | 2029 | WO2016081811A1 SEQ ID NO: 50 |
| rAAV | 2030 | WO2016081811A1 SEQ ID NO: 51 |
| rAAV | 2031 | WO2016081811A1 SEQ ID NO: 52 |
| rAAV | 2032 | WO2016081811A1 SEQ ID NO: 53 |
| rAAV | 2033 | WO2016081811A1 SEQ ID NO: 54 |
| rAAV | 2034 | WO2016081811A1 SEQ ID NO: 55 |
| rAAV | 2035 | WO2016081811A1 SEQ ID NO: 56 |
| rAAV | 2036 | WO2016081811A1 SEQ ID NO: 57 |
| rAAV | 2037 | WO2016081811A1 SEQ ID NO: 58 |
| rAAV | 2038 | WO2016081811A1 SEQ ID NO: 59 |
| rAAV | 2039 | WO2016081811A1 SEQ ID NO: 60 |
| rAAV | 2040 | WO2016081811A1 SEQ ID NO: 61 |
| rAAV | 2041 | WO2016081811A1 SEQ ID NO: 62 |
| rAAV | 2042 | WO2016081811A1 SEQ ID NO: 63 |
| rAAV | 2043 | WO2016081811A1 SEQ ID NO: 64 |
| rAAV | 2044 | WO2016081811A1 SEQ ID NO: 65 |
| rAAV | 2045 | WO2016081811A1 SEQ ID NO: 66 |
| rAAV | 2046 | WO2016081811A1 SEQ ID NO: 67 |
| rAAV | 2047 | WO2016081811A1 SEQ ID NO: 68 |
| rAAV | 2048 | WO2016081811A1 SEQ ID NO: 69 |
| rAAV | 2049 | WO2016081811A1 SEQ ID NO: 70 |
| rAAV | 2050 | WO2016081811A1 SEQ ID NO: 71 |
| rAAV | 2051 | WO2016081811A1 SEQ ID NO: 72 |
| rAAV | 2052 | WO2016081811A1 SEQ ID NO: 73 |
| rAAV | 2053 | WO2016081811A1 SEQ ID NO: 74 |
| rAAV | 2054 | WO2016081811A1 SEQ ID NO: 75 |
| rAAV | 2055 | WO2016081811A1 SEQ ID NO: 76 |
| rAAV | 2056 | WO2016081811A1 SEQ ID NO: 77 |
| rAAV | 2057 | WO2016081811A1 SEQ ID NO: 78 |
| rAAV | 2058 | WO2016081811A1 SEQ ID NO: 79 |
| rAAV | 2059 | WO2016081811A1 SEQ ID NO: 80 |
| rAAV | 2060 | WO2016081811A1 SEQ ID NO: 81 |
| rAAV | 2061 | WO2016081811A1 SEQ ID NO: 82 |
| rAAV | 2062 | WO2016081811A1 SEQ ID NO: 83 |
| rAAV | 2063 | WO2016081811A1 SEQ ID NO: 84 |
| rAAV | 2064 | WO2016081811A1 SEQ ID NO: 85 |
| rAAV | 2065 | WO2016081811A1 SEQ ID NO: 86 |
| rAAV | 2066 | WO2016081811A1 SEQ ID NO: 87 |
| rAAV | 2067 | WO2016081811A1 SEQ ID NO: 88 |
| rAAV | 2068 | WO2016081811A1 SEQ ID NO: 89 |
| rAAV | 2069 | WO2016081811A1 SEQ ID NO: 90 |
| rAAV | 2070 | WO2016081811A1 SEQ ID NO: 91 |
| rAAV | 2071 | WO2016081811A1 SEQ ID NO: 92 |
| rAAV | 2072 | WO2016081811A1 SEQ ID NO: 93 |
| rAAV | 2073 | WO2016081811A1 SEQ ID NO: 94 |
| rAAV | 2074 | WO2016081811A1 SEQ ID NO: 95 |
| rAAV | 2075 | WO2016081811A1 SEQ ID NO: 96 |
| rAAV | 2076 | WO2016081811A1 SEQ ID NO: 97 |
| rAAV | 2077 | WO2016081811A1 SEQ ID NO: 98 |
| rAAV | 2078 | WO2016081811A1 SEQ ID NO: 99 |
| rAAV | 2079 | WO2016081811A1 SEQ ID NO: 100 |
| rAAV | 2080 | WO2016081811A1 SEQ ID NO: 101 |
| rAAV | 2081 | WO2016081811A1 SEQ ID NO: 102 |
| rAAV | 2082 | WO2016081811A1 SEQ ID NO: 103 |
| rAAV | 2083 | WO2016081811A1 SEQ ID NO: 104 |
| rAAV | 2084 | WO2016081811A1 SEQ ID NO: 105 |
| rAAV | 2085 | WO2016081811A1 SEQ ID NO: 106 |
| rAAV | 2086 | WO2016081811A1 SEQ ID NO: 107 |
| rAAV | 2087 | WO2016081811A1 SEQ ID NO: 108 |
| rAAV | 2088 | WO2016081811A1 SEQ ID NO: 109 |
| rAAV | 2089 | WO2016081811A1 SEQ ID NO: 110 |
| rAAV | 2090 | WO2016081811A1 SEQ ID NO: 111 |
| rAAV | 2091 | WO2016081811A1 SEQ ID NO: 112 |
| rAAV | 2092 | WO2016081811A1 SEQ ID NO: 113 |
| rAAV | 2093 | WO2016081811A1 SEQ ID NO: 114 |
| rAAV | 2094 | WO2016081811A1 SEQ ID NO: 115 |
| rAAV | 2095 | WO2016081811A1 SEQ ID NO: 116 |
| rAAV | 2096 | WO2016081811A1 SEQ ID NO: 117 |
| rAAV | 2097 | WO2016081811A1 SEQ ID NO: 118 |
| rAAV | 2098 | WO2016081811A1 SEQ ID NO: 119 |
| rAAV | 2099 | WO2016081811A1 SEQ ID NO: 120 |
| rAAV | 2100 | WO2016081811A1 SEQ ID NO: 121 |
| rAAV | 2101 | WO2016081811A1 SEQ ID NO: 122 |
| rAAV | 2102 | WO2016081811A1 SEQ ID NO: 123 |
| rAAV | 2103 | WO2016081811A1 SEQ ID NO: 124 |
| rAAV | 2104 | WO2016081811A1 SEQ ID NO: 125 |
| rAAV | 2105 | WO2016081811A1 SEQ ID NO: 126 |
| rAAV | 2106 | WO2016081811A1 SEQ ID NO: 127 |
| rAAV | 2107 | WO2016081811A1 SEQ ID NO: 128 |
| AAV8 | 2108 | WO2016081811A1 SEQ ID NO: 133 |
| E532K | | |
| AAV8 | 2109 | WO2016081811A1 SEQ ID NO: 134 |
| E532K | | |
| rAAV4 | 2110 | WO2016115382A1 SEQ ID NO: 2 |
| rAAV4 | 2111 | WO2016115382A1 SEQ ID NO: 3 |
| rAAV4 | 2112 | WO2016115382A1 SEQ ID NO: 4 |
| rAAV4 | 2113 | WO2016115382A1 SEQ ID NO: 5 |
| rAAV4 | 2114 | WO2016115382A1 SEQ ID NO: 6 |
| rAAV4 | 2115 | WO2016115382A1 SEQ ID NO: 7 |
| rAAV4 | 2116 | WO2016115382A1 SEQ ID NO: 8 |
| rAAV4 | 2117 | WO2016115382A1 SEQ ID NO: 9 |
| rAAV4 | 2118 | WO2016115382A1 SEQ ID NO: 10 |
| rAAV4 | 2119 | WO2016115382A1 SEQ ID NO: 11 |
| rAAV4 | 2120 | WO2016115382A1 SEQ ID NO: 12 |
| rAAV4 | 2121 | WO2016115382A1 SEQ ID NO: 13 |
| rAAV4 | 2122 | WO2016115382A1 SEQ ID NO: 14 |
| rAAV4 | 2123 | WO2016115382A1 SEQ ID NO: 15 |
| rAAV4 | 2124 | WO2016115382A1 SEQ ID NO: 16 |
| rAAV4 | 2125 | WO2016115382A1 SEQ ID NO: 17 |
| rAAV4 | 2126 | WO2016115382A1 SEQ ID NO: 18 |
| rAAV4 | 2127 | WO2016115382A1 SEQ ID NO: 19 |
| rAAV4 | 2128 | WO2016115382A1 SEQ ID NO: 20 |
| rAAV4 | 2129 | WO2016115382A1 SEQ ID NO: 21 |
| AAV11 | 2130 | WO2016115382A1 SEQ ID NO: 22 |
| AAV12 | 2131 | WO2016115382A1 SEQ ID NO: 23 |
| rh32 | 2132 | WO2016115382A1 SEQ ID NO: 25 |
| rh33 | 2133 | WO2016115382A1 SEQ ID NO: 26 |
| rh34 | 2134 | WO2016115382A1 SEQ ID NO: 27 |
| rAAV4 | 2135 | WO2016115382A1 SEQ ID NO: 28 |
| rAAV4 | 2136 | WO2016115382A1 SEQ ID NO: 29 |
| rAAV4 | 2137 | WO2016115382A1 SEQ ID NO: 30 |
| rAAV4 | 2138 | WO2016115382A1 SEQ ID NO: 31 |
| rAAV4 | 2139 | WO2016115382A1 SEQ ID NO: 32 |
| rAAV4 | 2140 | WO2016115382A1 SEQ ID NO: 33 |
| AAV2/8 | 2141 | WO2016131981A1 SEQ ID NO: 47 |
| AAV2/8 | 2142 | WO2016131981A1 SEQ ID NO: 48 |
| ancestral | 2143 | WO2016154344A1 SEQ ID NO: 7 |
| AAV | | |
| ancestral | 2144 | WO2016154344A1 SEQ ID NO: 13 |
| AAV variant | | |
| C4 | | |
| ancestral | 2145 | WO2016154344A1 SEQ ID NO: 14 |
| AAV variant | | |
| C7 | | |
| ancestral | 2146 | WO2016154344A1 SEQ ID NO: 15 |
| AAV variant | | |
| G4 | | |
| consensus | 2147 | WO2016154344A1 SEQ ID NO: 16 |
| amino acid | | |
| sequence of | | |
| ancestral | | |
| AAV | | |
| variants, C4, | | |
| C7 and G4 | | |
| consensus | 2148 | WO2016154344A1 SEQ ID NO: 17 |
| amino acid | | |
| sequence of | | |
| ancestral | | |
| AAV | | |
| variants, C4 | | |
| and C7 | | |
| AAV8 (with | 2149 | WO2016150403A1 SEQ ID NO: 13 |
| a AAV2 | | |
| phospholipase | | |
| domain) | | |
| AAV VR- | 2150 | US20160289275A1 SEQ ID NO: 10 |
| 942n | | |
| AAV5-A | 2151 | US20160289275A1 SEQ ID NO: 13 |
| (M569V) | | |
| AAV5-A | 2152 | US20160289275A1 SEQ ID NO: 14 |
| (M569V) | | |
| AAV5-A | 2153 | US20160289275A1 SEQ ID NO: 16 |
| (Y585V) | | |
| AAV5-A | 2154 | US20160289275A1 SEQ ID NO: 17 |
| (Y585V) | | |
| AAV5-A | 2155 | US20160289275A1 SEQ ID NO: 19 |
| (L587T) | | |
| AAV5-A | 2156 | US20160289275A1 SEQ ID NO: 20 |
| (L587T) | | |
| AAV5-A | 2157 | US20160289275A1 SEQ ID NO: 22 |
| (Y585V/L587T) | | |
| AAV5-A | 2158 | US20160289275A1 SEQ ID NO: 23 |
| (Y585V/L587T) | | |
| AAV5-B | 2159 | US20160289275A1 SEQ ID NO: 25 |
| (D652A) | | |
| AAV5-B | 2160 | US20160289275A1 SEQ ID NO: 26 |
| (D652A) | | |
| AAV5-B | 2161 | US20160289275A1 SEQ ID NO: 28 |
| (T362M) | | |
| AAV5-B | 2162 | US20160289275A1 SEQ ID NO: 29 |
| (T362M) | | |
| AAV5-B | 2163 | US20160289275A1 SEQ ID NO: 31 |
| (Q359D) | | |
| AAV5-B | 2164 | US20160289275A1 SEQ ID NO: 32 |
| (Q359D) | | |
| AAV5-B | 2165 | US20160289275A1 SEQ ID NO: 34 |
| (E350Q) | | |
| AAV5-B | 2166 | US20160289275A1 SEQ ID NO: 35 |
| (E350Q) | | |
| AAV5-B | 2167 | US20160289275A1 SEQ ID NO: 37 |
| (P533S) | | |
| AAV5-B | 2168 | US20160289275A1 SEQ ID NO: 38 |
| (P533S) | | |
| AAV5-B | 2169 | US20160289275A1 SEQ ID NO: 40 |
| (P533G) | | |
| AAV5-B | 2170 | US20160289275A1 SEQ ID NO: 41 |
| (P533G) | | |
| AAV5- | 2171 | US20160289275A1 SEQ ID NO: 43 |
| mutation in | | |
| loop VII | | |
| AAV5- | 2172 | US20160289275A1 SEQ ID NO: 44 |
| mutation in | | |
| loop VII | | |
| AAV8 | 2173 | US20160289275A1 SEQ ID NO: 47 |
| Mut A | 2174 | WO2016181123A1 SEQ ID NO: 1 |
| (LK03/AAV8) | | |
| Mut B | 2175 | WO2016181123A1 SEQ ID NO: 2 |
| (LK03/AAV5) | | |
| Mut C | 2176 | WO2016181123A1 SEQ ID NO: 3 |
| (AAV8/ | | |
| AAV3B) | | |
| Mut D | 2177 | WO2016181123A1 SEQ ID NO: 4 |
| (AAV5/ | | |
| AAV3B) | | |
| Mut E | 2178 | WO2016181123A1 SEQ ID NO: 5 |
| (AAV8/ | | |
| AAV3B) | | |
| Mut F | 2179 | WO2016181123A1 SEQ ID NO: 6 |
| (AAV3B/ | | |
| AAV8) | | |
| AAV44.9 | 2180 | WO2016183297A1 SEQ ID NO: 4 |
| AAV44.9 | 2181 | WO2016183297A1 SEQ ID NO: 5 |
| AAVrh8 | 2182 | WO2016183297A1 SEQ ID NO: 6 |
| AAV44.9 | 2183 | WO2016183297A1 SEQ ID NO: 9 |
| (S470N) | | |
| rh74 VP1 | 2184 | US20160375110A1 SEQ ID NO: 1 |
| AAV-LK03 | 2185 | WO2017015102A1 SEQ ID NO: 5 |
| (L135I) | | |
| AAV3B | 2186 | WO2017015102A1 SEQ ID NO: 6 |
| (S663V + | | |
| T492V) | | |
| Anc80 | 2187 | WO2017019994A2 SEQ ID NO: 1 |
| Anc80 | 2188 | WO2017019994A2 SEQ ID NO: 2 |
| Anc81 | 2189 | WO2017019994A2 SEQ ID NO: 3 |
| Anc81 | 2190 | WO2017019994A2 SEQ ID NO: 4 |
| Anc82 | 2191 | WO2017019994A2 SEQ ID NO: 5 |
| Anc82 | 2192 | WO2017019994A2 SEQ ID NO: 6 |
| Anc83 | 2193 | WO2017019994A2 SEQ ID NO: 7 |
| Anc83 | 2194 | WO2017019994A2 SEQ ID NO: 8 |
| Anc84 | 2195 | WO2017019994A2 SEQ ID NO: 9 |
| Anc84 | 2196 | WO2017019994A2 SEQ ID NO: 10 |
| Anc94 | 2197 | WO2017019994A2 SEQ ID NO: 11 |
| Anc94 | 2198 | WO2017019994A2 SEQ ID NO: 12 |
| Anc113 | 2199 | WO2017019994A2 SEQ ID NO: 13 |
| Anc113 | 2200 | WO2017019994A2 SEQ ID NO: 14 |
| Anc126 | 2201 | WO2017019994A2 SEQ ID NO: 15 |
| Anc126 | 2202 | WO2017019994A2 SEQ ID NO: 16 |
| Anc127 | 2203 | WO2017019994A2 SEQ ID NO: 17 |
| Anc127 | 2204 | WO2017019994A2 SEQ ID NO: 18 |
| Anc80L27 | 2205 | WO2017019994A2 SEQ ID NO: 19 |
| Anc80L59 | 2206 | WO2017019994A2 SEQ ID NO: 20 |
| Anc80L60 | 2207 | WO2017019994A2 SEQ ID NO: 21 |
| Anc80L62 | 2208 | WO2017019994A2 SEQ ID NO: 22 |
| Anc80L65 | 2209 | WO2017019994A2 SEQ ID NO: 23 |
| Anc80L33 | 2210 | WO2017019994A2 SEQ ID NO: 24 |
| Anc80L36 | 2211 | WO2017019994A2 SEQ ID NO: 25 |
| Anc80L44 | 2212 | WO2017019994A2 SEQ ID NO: 26 |
| Anc80L1 | 2213 | WO2017019994A2 SEQ ID NO: 35 |
| Anc80L1 | 2214 | WO2017019994A2 SEQ ID NO: 36 |
| AAVrh10 | 2215 | WO2017019994A2 SEQ ID NO: 41 |
| Anc110 | 2216 | WO2017019994A2 SEQ ID NO: 42 |
| Anc110 | 2217 | WO2017019994A2 SEQ ID NO: 43 |
| AAVrh32.33 | 2218 | WO2017019994A2 SEQ ID NO: 45 |
| AAVrh74 | 2219 | WO2017049031A1 SEQ ID NO: 1 |
| AAV2 | 2220 | WO2017053629A2 SEQ ID NO: 49 |
| AAV2 | 2221 | WO2017053629A2 SEQ ID NO: 50 |
| AAV2 | 2222 | WO2017053629A2 SEQ ID NO: 82 |
| Parvo-like | 2223 | WO2017070476A2 SEQ ID NO: 1 |
| virus | | |
| Parvo-like | 2224 | WO2017070476A2 SEQ ID NO: 2 |
| virus | | |
| Parvo-like | 2225 | WO2017070476A2 SEQ ID NO: 3 |
| virus | | |
| Parvo-like | 2226 | WO2017070476A2 SEQ ID NO: 4 |
| virus | | |
| Parvo-like | 2227 | WO2017070476A2 SEQ ID NO: 5 |
| virus | | |
| Parvo-like | 2228 | WO2017070476A2 SEQ ID NO: 6 |
| virus | | |
| AAVrh.10 | 2229 | WO2017070516A1 SEQ ID NO: 7 |
| AAVrh.10 | 2230 | WO2017070516A1 SEQ ID NO: 14 |
| AAV2tYF | 2231 | WO2017070491A1 SEQ ID NO: 1 |
| AAV-SPK | 2232 | WO2017075619A1 SEQ ID NO: 28 |
| AAV2.5 | 2233 | US20170128528A1 SEQ ID NO: 13 |
| AAV1.1 | 2234 | US20170128528A1 SEQ ID NO: 15 |
| AAV6.1 | 2235 | US20170128528A1 SEQ ID NO: 17 |
| AAV6.3.1 | 2236 | US20170128528A1 SEQ ID NO: 18 |
| AAV2i8 | 2237 | US20170128528A1 SEQ ID NO: 28 |
| AAV2i8 | 2238 | US20170128528A1 SEQ ID NO: 29 |
| ttAAV | 2239 | US20170128528A1 SEQ ID NO: 30 |
| ttAAV- | 2240 | US20170128528A1 SEQ ID NO: 32 |
| S312N | | |
| ttAAV- | 2241 | US20170128528A1 SEQ ID NO: 33 |
| S312N | | |
| AAV6 | 2242 | WO2016134337A1 SEQ ID NO: 24 |
| (Y705, Y731, | | |
| and T492) | | |
| AAV2 | 2243 | WO2016134375A1 SEQ ID NO: 9 |
| AAV2 | 2244 | WO2016134375A1 SEQ ID NO: 10 |

[0232] Each of the patents, applications and/or publications listed in Table 1 are hereby incorporated by reference in their entirety.

[0233] In one embodiment, the AAV serotype may be, or may have a sequence as described in International Patent Publication WO2015038958, the contents of which are herein incorporated by reference in their entirety, such as, but not limited to, AAV9 (SEQ ID NO: 2 and 11 of WO2015038958 or SEQ ID NO: 127 and 126 respectively herein), PHP.B (SEQ ID NO: 8 and 9 of WO2015038958, herein SEQ ID NO: 868 and 869), G2B-13 (SEQ ID NO: 12 of WO2015038958, herein SEQ ID NO: 870), G2B-26 (SEQ ID NO: 13 of WO2015038958, herein SEQ ID NO: 868 and 869), TH1.1-32 (SEQ ID NO: 14 of WO2015038958, herein SEQ ID NO: 871), TH1.1-35 (SEQ ID NO: 15 of WO2015038958, herein SEQ ID NO: 872) or variants thereof. Further, any of the targeting peptides or amino acid inserts described in WO2015038958, may be inserted into any parent AAV serotype, such as, but not limited to, AAV9 (SEQ ID NO: 126 for the DNA sequence and SEQ ID NO: 127 for the amino acid sequence). In one embodiment, the amino acid insert is inserted between amino acids 586-592 of the parent AAV (e.g., AAV9). In another embodiment, the amino acid insert is inserted between amino acids 588-589 of the parent AAV sequence. The amino acid insert may be, but is not limited to, any of the following amino acid sequences, TLAVPFK (SEQ ID NO: 1 of WO2015038958; herein SEQ ID NO: 873), KFPVALT (SEQ ID NO: 3 of WO2015038958; herein SEQ ID NO: 874), LAVPFK (SEQ ID NO: 31 of WO2015038958; herein SEQ ID NO: 875), AVPFK (SEQ ID NO: 32 of WO2015038958; herein SEQ ID NO: 876), VPFK (SEQ ID NO: 33 of WO2015038958; herein SEQ ID NO: 877), TLAVPF (SEQ ID NO: 34 of WO2015038958; herein SEQ ID NO: 878), TLAVP (SEQ ID NO: 35 of WO2015038958; herein SEQ ID NO: 879), TLAV (SEQ ID NO: 36 of WO2015038958; herein SEQ ID NO: 880), SVSKPFL (SEQ ID NO: 28 of WO2015038958; herein SEQ ID NO: 881), FTLTTPK (SEQ ID NO: 29 of WO2015038958; herein SEQ ID NO: 882), MNATKNV (SEQ ID NO: 30 of WO2015038958; herein SEQ ID NO: 883), QSSQTPR (SEQ ID NO: 54 of WO2015038958; herein SEQ ID NO: 884), ILGTGTS (SEQ ID NO: 55 of WO2015038958; herein SEQ ID NO: 885), TRTNPEA (SEQ ID NO: 56 of WO2015038958; herein SEQ ID NO: 886), NGGTSSS (SEQ ID NO: 58 of WO2015038958; herein SEQ ID NO: 887), or YTLSQGW (SEQ ID NO: 60 of WO2015038958; herein SEQ ID NO: 888). Non-limiting examples of nucleotide sequences that may encode the amino acid inserts include the following, AAGTTTCCTGTGGCGTTGACT (for SEQ ID NO: 3 of WO2015038958; herein SEQ ID NO: 889), ACTTTGGCGGTGCCTTTTAAG (SEQ ID NO: 24 and 49 of WO2015038958; herein SEQ ID NO: 890), AGTGTGAGTAAGCCTTTTTTG (SEQ ID NO: 25 of WO2015038958; herein SEQ ID NO: 891), TTTACGTTGACGACGCCTAAG (SEQ ID NO: 26 of WO2015038958; herein SEQ ID NO: 892), ATGAATGCTACGAAGAATGTG (SEQ ID NO: 27 of WO2015038958; herein SEQ ID NO: 893), CAGTCGTCGCAGACGCCTAGG (SEQ ID NO: 48 of WO2015038958; herein SEQ ID NO: 894), ATTCTGGGGACTGGTACTTCG (SEQ ID NO: 50 and 52 of WO2015038958; herein SEQ ID NO: 895), ACGCGGACTAATCCTGAGGCT (SEQ ID NO: 51 of WO2015038958; herein SEQ ID NO: 896), AATGGGGGGACTAGTAGTTCT (SEQ ID NO: 53 of WO2015038958; herein SEQ ID NO: 897), or TATACTTTGTCGCAGGGTTGG (SEQ ID NO: 59 of WO2015038958; herein SEQ ID NO: 898).

[0234] In one embodiment, the AAV serotype may be engineered to comprise at least one AAV capsid CD8+ T-cell epitope for AAV2 such as, but not limited to, SADNNNSEY (SEQ ID NO: 899), LIDQYLYYL (SEQ ID NO: 900), VPQYGYLTL (SEQ ID NO: 901), TTSTRTWAL (SEQ ID NO: 902), YHLNGRDSL (SEQ ID NO: 903), SQAVGRSSF (SEQ ID NO: 904), VPANPSTTF (SEQ ID NO: 905), FPQSGVLIF (SEQ ID NO: 906), YFDFNRFHCHFSPRD (SEQ ID NO: 907), VGNSSGNWHCDSTWM (SEQ ID NO: 908), QFSQAGASDIRDQSR (SEQ ID NO: 909), GASDIRQSRNWLP (SEQ ID NO: 910) and GNRQAATADVNTQGV (SEQ ID NO: 911).

[0235] In one embodiment, the AAV serotype may be engineered to comprise at least one AAV capsid CD8+ T-cell epitope for AAV1 such as, but not limited to, LDRLMNPLI (SEQ ID NO: 912), TTSTRTWAL (SEQ ID NO: 902), and QPAKKRLNF (SEQ ID NO: 913)).

[0236] In one embodiment, the AAV serotype may be, or may have a sequence as described in International Patent Publication WO2017100671, the contents of which are herein incorporated by reference in their entirety, such as, but not limited to, AAV9 (SEQ ID NO: 45 of WO2017100671, herein SEQ ID NO: 1861), PHP.N (SEQ ID NO: 46 of WO2017100671, herein SEQ ID NO: 1859), PHP.S (SEQ ID NO: 47 of WO2017100671, herein SEQ ID NO: 1860), or variants thereof. Further, any of the targeting peptides or amino acid inserts described in WO2017100671 may be inserted into any parent AAV serotype, such as, but not limited to, AAV9 (SEQ ID NO: 127 or SEQ ID NO: 1861). In one embodiment, the amino acid insert is inserted between amino acids 586-592 of the parent AAV (e.g., AAV9). In another embodiment, the amino acid insert is inserted between amino acids 588-589 of the parent AAV sequence. The amino acid insert may be, but is not limited to, any of the following amino acid sequences, AQTLAVPFKAQ (SEQ ID NO: 1 of WO2017100671; herein SEQ ID NO: 2245), AQSVSKPFLAQ (SEQ ID NO: 2 of WO2017100671; herein SEQ ID NO: 2246), AQFTLTTPKAQ (SEQ ID NO: 3 in the sequence listing of WO2017100671; herein SEQ ID NO: 2247), DGTLAVPFKAQ (SEQ ID NO: 4 in the sequence listing of WO2017100671; herein SEQ ID NO: 2248), ESTLAVPFKAQ (SEQ ID NO: 5 of WO2017100671; herein SEQ ID NO: 2249), GGTLAVPFKAQ (SEQ ID NO: 6 of WO2017100671; herein SEQ ID NO: 2250), AQTLATPFKAQ (SEQ ID NO: 7 and 33 of WO2017100671; herein SEQ ID NO: 2251), ATTLATPFKAQ (SEQ ID NO: 8 of WO2017100671; herein SEQ ID NO: 2252), DGTLATPFKAQ (SEQ ID NO: 9 of WO2017100671; herein SEQ ID NO: 2253), GGTLATPFKAQ (SEQ ID NO: 10 of WO2017100671; herein SEQ ID NO: 2254), SGSLAVPFKAQ (SEQ ID NO: 11 of WO2017100671; herein SEQ ID NO: 2255), AQTLAQPFKAQ (SEQ ID NO: 12 of WO2017100671; herein SEQ ID NO: 2256), AQTLQQPFKAQ (SEQ ID NO: 13 of WO2017100671; herein SEQ ID NO: 2257), AQTLSNPFKAQ (SEQ ID NO: 14 of WO2017100671; herein SEQ ID NO: 2258), AQTLAVPFSNP (SEQ ID NO: 15 of WO2017100671; herein SEQ ID NO: 2259), QGTLAVPFKAQ (SEQ ID NO: 16 of WO2017100671; herein SEQ ID NO: 2260), NQTLAVPFKAQ (SEQ ID NO: 17 of WO2017100671; herein SEQ ID NO: 2261), EGSLAVPFKAQ (SEQ ID NO: 18 of WO2017100671; herein SEQ ID NO: 2262), SGNLAVPFKAQ (SEQ ID NO: 19 of WO2017100671; herein SEQ ID NO: 2263), EGTLAVPFKAQ (SEQ ID NO: 20 of WO2017100671; herein SEQ ID NO: 2264), DSTLAVPFKAQ (SEQ ID NO: 21 in Table 1 of WO2017100671; herein SEQ ID NO: 2265), AVTLAVPFKAQ (SEQ ID NO: 22 of WO2017100671; herein SEQ ID NO: 2266), AQTLSTPFKAQ (SEQ ID NO: 23 of WO2017100671; herein SEQ ID NO: 2267), AQTLPQPFKAQ (SEQ ID NO: 24 and 32 of WO2017100671; herein SEQ ID NO: 2268), AQTLSQPFKAQ (SEQ ID NO: 25 of WO2017100671; herein SEQ ID NO: 2269), AQTLQLPFKAQ (SEQ ID NO: 26 of WO2017100671; herein SEQ ID NO: 2270), AQTLTMPFKAQ (SEQ ID NO: 27, and 34 of WO2017100671 and SEQ ID NO: 35 in the sequence listing of WO2017100671; herein SEQ ID NO: 2271), AQTLTTPFKAQ (SEQ ID NO: 28 of WO2017100671; herein SEQ ID NO: 2272), AQYTLSQGWAQ (SEQ ID NO: 29 of WO2017100671; herein SEQ ID NO: 2273), AQMNATKNVAQ (SEQ ID NO: 30 of WO2017100671; herein SEQ ID NO: 2274), AQVSGGHHSAQ (SEQ ID NO: 31 of WO2017100671; herein SEQ ID NO: 2275), AQTLTAPFKAQ (SEQ ID NO: 35 in Table 1 of WO2017100671; herein SEQ ID NO: 2276), AQTLSKPFKAQ (SEQ ID NO: 36 of WO2017100671; herein SEQ ID NO: 2277), QAVRTSL (SEQ ID NO: 37 of WO2017100671; herein SEQ ID NO: 2278), YTLSQGW (SEQ ID NO: 38 of WO2017100671; herein SEQ ID NO: 888), LAKERLS (SEQ ID NO: 39 of WO2017100671; herein SEQ ID NO: 2279), TLAVPFK (SEQ ID NO: 40 in the sequence listing of WO2017100671; herein SEQ ID NO: 873), SVSKPFL (SEQ ID NO: 41 of WO2017100671; herein SEQ ID NO: 881), FTLTTPK (SEQ ID NO: 42 of WO2017100671; herein SEQ ID NO: 882), MNSTKNV (SEQ ID NO: 43 of WO2017100671; herein SEQ ID NO: 2280), VSGGHHS (SEQ ID NO: 44 of WO2017100671; herein SEQ ID NO: 2281), SAQTLAVPFKAQAQ (SEQ ID NO: 48 of WO2017100671; herein SEQ ID NO: 2282), SXXXLAVPFKAQAQ (SEQ ID NO: 49 of WO2017100671 wherein X may be any amino acid; herein SEQ ID NO: 2283), SAQXXXVPFKAQAQ (SEQ ID NO: 50 of WO2017100671 wherein X may be any amino acid; herein SEQ ID NO: 2284), SAQTLXXXFKAQAQ (SEQ ID NO: 51 of WO2017100671 wherein X may be any amino acid; herein SEQ ID NO: 2285), SAQTLAVXXXAQAQ (SEQ ID NO: 52 of WO2017100671 wherein X may be any amino acid; herein SEQ ID NO: 2286), SAQTLAVPFXXXAQ (SEQ ID NO: 53 of WO2017100671 wherein X may be any amino acid; herein SEQ ID NO: 2287), TNHQSAQ (SEQ ID NO: 65 of WO2017100671; herein SEQ ID NO: 2288), AQAQTGW (SEQ ID NO: 66 of WO2017100671; herein SEQ ID NO: 2289), DGTLATPFK (SEQ ID NO: 67 of WO2017100671; herein SEQ ID NO: 2290), DGTLATPFKXX (SEQ ID NO: 68 of WO2017100671 wherein X may be any amino acid; herein SEQ ID NO: 2291), LAVPFKAQ (SEQ ID NO: 80 of WO2017100671; herein SEQ ID NO: 2292), VPFKAQ (SEQ ID NO: 81 of WO2017100671; herein SEQ ID NO: 2293), FKAQ (SEQ ID NO: 82 of WO2017100671; herein SEQ ID NO: 2294), AQTLAV (SEQ ID NO: 83 of WO2017100671; herein SEQ ID NO: 2295), AQTLAVPF (SEQ ID NO: 84 of WO2017100671; herein SEQ ID NO: 2296), QAVR (SEQ ID NO: 85 of WO2017100671; herein SEQ ID NO: 2297), AVRT (SEQ ID NO: 86 of WO2017100671; herein SEQ ID NO: 2298), VRTS (SEQ ID NO: 87 of WO2017100671; herein SEQ ID NO: 2299), RTSL (SEQ ID NO: 88 of WO2017100671; herein SEQ ID NO: 2300), QAVRT (SEQ ID NO: 89 of WO2017100671; herein SEQ ID NO: 2301), AVRTS (SEQ ID NO: 90 of WO2017100671; herein SEQ ID NO: 2302), VRTSL (SEQ ID NO: 91 of WO2017100671; herein SEQ ID NO: 2303), QAVRTS (SEQ ID NO: 92 of WO2017100671; herein SEQ ID NO: 2304), or AVRTSL (SEQ ID NO: 93 of WO2017100671; herein SEQ ID NO: 2305).

[0237] Non-limiting examples of nucleotide sequences that may encode the amino acid inserts include the following, GATGGGACTTTGGCGGTGCCTTTTAAGGCACAG (SEQ ID NO: 54 of WO2017100671; herein SEQ ID NO: 2306), GATGGGACGTTGGCGGTGCCTTTTAAGGCACAG (SEQ ID NO: 55 of WO2017100671; herein SEQ ID NO: 2307), CAGGCGGTTAGGACGTCTTTG (SEQ ID NO: 56 of WO2017100671; herein SEQ ID NO: 2308), CAGGTCTTCACGGACTCAGACTATCAG (SEQ ID NO: 57 and 78 of WO2017100671; herein SEQ ID NO: 2309), CAAGTAAAACCTCTACAAATGTGGTAAAATCG (SEQ ID NO: 58 of WO2017100671; herein SEQ ID NO: 2310), ACTCATCGACCAATACTTGTACTATCTCTCTAGAAC (SEQ ID NO: 59 of WO2017100671; herein SEQ ID NO: 2311), GGAAGTATTCCTTGGTTTTGAACCCA (SEQ ID NO: 60 of WO2017100671; herein SEQ ID NO: 2312), GGTCGCGGTTCTTGTTTGTGGAT (SEQ ID NO: 61 of WO2017100671; herein SEQ ID NO: 2313), CGACCTTGAAGCGCATGAACTCCT (SEQ ID NO: 62 of WO2017100671; herein SEQ ID NO: 2314), GTATTCCTTGGTTTTGAACCCAACCGGTCTGCGCCTGTGCMNNMNNMNNMNNMNN MNNMNNTTGGGCACTCTGGTGGTTTGTC (SEQ ID NO: 63 of WO2017100671 wherein N may be A, C, T, or G; herein SEQ ID NO: 2315), GTATTCCTTGGTTTTGAACCCAACCGGTCTGCGCMNNMNNMNNAAAAGGCACCGCC AAAGTTTG (SEQ ID NO: 69 of WO2017100671 wherein N may be A, C, T, or G; herein SEQ ID NO: 2316), GTATTCCTTGGTTTTGAACCCAACCGGTCTGCGCCTGTGCMNNMNNMNNCACCGCC AAAGTTTGGGCACT (SEQ ID NO: 70 of WO2017100671 wherein N may be A, C, T, or G; herein SEQ ID NO: 2317), GTATTCCTTGGTTTTGAACCCAACCGGTCTGCGCCTGTGCCTTAAAMNNMNNMNNC AAAGTTTGGGCACTCTGGTGG (SEQ ID NO: 71 of WO2017100671 wherein N may be A, C, T, or G; herein SEQ ID NO: 2318), GTATTCCTTGGTTTTGAACCCAACCGGTCTGCGCCTGTGCCTTAAAAGGCACMNNM NNMNNTTGGGCACTCTGGTGGTTTGTG (SEQ ID NO: 72 of WO2017100671 wherein N may be A, C, T, or G; herein SEQ ID NO: 2319), ACTTTGGCGGTGCCTTTTAAG (SEQ ID NO: 74 of WO2017100671; herein SEQ ID NO: 890), AGTGTGAGTAAGCCTTTTTTG (SEQ ID NO: 75 of WO2017100671; herein SEQ ID NO: 891), TTTACGTTGACGACGCCTAAG (SEQ ID NO: 76 of WO2017100671; herein SEQ ID NO: 892), TATACTTTGTCGCAGGGTTGG (SEQ ID NO: 77 of WO2017100671; herein SEQ ID NO: 898), or CTTGCGAAGGAGCGGCTTTCG (SEQ ID NO: 79 of WO2017100671; herein SEQ ID NO: 2320).

[0238] In one embodiment, the AAV serotype may be, or may have a sequence as described in U.S. Pat. No. 9,624,274, the contents of which are herein incorporated by reference in their entirety, such as, but not limited to, AAV1 (SEQ ID NO: 181 of U.S. Pat. No. 9,624,274), AAV6 (SEQ ID NO: 182 of U.S. Pat. No. 9,624,274), AAV2 (SEQ ID NO: 183 of U.S. Pat. No. 9,624,274), AAV3b (SEQ ID NO: 184 of U.S. Pat. No. 9,624,274), AAV7 (SEQ ID NO: 185 of U.S. Pat. No. 9,624,274), AAV8 (SEQ ID NO: 186 of U.S. Pat. No. 9,624,274), AAV10 (SEQ ID NO: 187 of U.S. Pat. No. 9,624,274), AAV4 (SEQ ID NO: 188 of U.S. Pat. No. 9,624,274), AAV11 (SEQ ID NO: 189 of U.S. Pat. No. 9,624,274), bAAV (SEQ ID NO: 190 of U.S. Pat. No. 9,624,274), AAV5 (SEQ ID NO: 191 of U.S. Pat. No. 9,624,274), GPV (SEQ ID NO: 192 of U.S. Pat. No. 9,624,274; herein SEQ ID NO: 1862), B19 (SEQ ID NO: 193 of U.S. Pat. No. 9,624,274; herein SEQ ID NO: 1863), MVM (SEQ ID NO: 194 of U.S. Pat. No. 9,624,274; herein SEQ ID NO: 1864), FPV (SEQ ID NO: 195 of U.S. Pat. No. 9,624,274; herein SEQ ID NO: 1865), CPV (SEQ ID NO: 196 of U.S. Pat. No. 9,624,274; herein SEQ ID NO: 1866) or variants thereof. Further, any of the structural protein inserts described in U.S. Pat. No. 9,624,274, may be inserted into, but not limited to, 1-453 and 1-587 of any parent AAV serotype, such as, but not limited to, AAV2 (SEQ ID NO: 183 of U.S. Pat. No. 9,624,274). The amino acid insert may be, but is not limited to, any of the following amino acid sequences, VNLTWSRASG (SEQ ID NO: 50 of U.S. Pat. No. 9,624,274; herein SEQ ID NO: 2321), EFCINHRGYWVCGD (SEQ ID NO:55 of U.S. Pat. No. 9,624,274; herein SEQ ID NO: 2322), EDGQVMDVDLS (SEQ ID NO: 85 of U.S. Pat. No. 9,624,274; herein SEQ ID NO: 2323), EKQRNGTLT (SEQ ID NO: 86 of U.S. Pat. No. 9,624,274; herein SEQ ID NO: 2324), TYQCRVTHPHLPRALMR (SEQ ID NO: 87 of U.S. Pat. No. 9,624,274; herein SEQ ID NO: 2325), RHSTTQPRKTKGSG (SEQ ID NO: 88 of U.S. Pat. No. 9,624,274; herein SEQ ID NO: 2326), DSNPRGVSAYLSR (SEQ ID NO: 89 of U.S. Pat. No. 9,624,274; herein SEQ ID NO: 2327), TITCLWDLAPSK (SEQ ID NO: 90 of U.S. Pat. No. 9,624,274; herein SEQ ID NO: 2328), KTKGSGFFVF (SEQ ID NO: 91 of U.S. Pat. No. 9,624,274; herein SEQ ID NO: 2329), THPHLPRALMRS (SEQ ID NO: 92 of U.S. Pat. No. 9,624,274; herein SEQ ID NO: 2330), GETYQCRVTHPHLPRALMRSTTK (SEQ ID NO: 93 of U.S. Pat. No. 9,624,274; herein SEQ ID NO: 2331), LPRALMRS (SEQ ID NO: 94 of U.S. Pat. No. 9,624,274; herein SEQ ID NO: 2332), INHRGYWV (SEQ ID NO: 95 of U.S. Pat. No. 9,624,274; herein SEQ ID NO: 2333), CDAGSVRTNAPD (SEQ ID NO: 60 of U.S. Pat. No. 9,624,274; herein SEQ ID NO: 2334), AKAVSNLTESRSESLQS (SEQ ID NO: 96 of U.S. Pat. No. 9,624,274; herein SEQ ID NO: 2335), SLTGDEFKKVLET (SEQ ID NO: 97 of U.S. Pat. No. 9,624,274; herein SEQ ID NO: 2336), REAVAYRFEED (SEQ ID NO: 98 of U.S. Pat. No. 9,624,274; herein SEQ ID NO: 2337), INPEIITLDG (SEQ ID NO: 99 of U.S. Pat. No. 9,624,274; herein SEQ ID NO: 2338), DISVTGAPVITATYL (SEQ ID NO: 100 of U.S. Pat. No. 9,624,274; herein SEQ ID NO: 2339), DISVTGAPVITA (SEQ ID NO: 101 of U.S. Pat. No. 9,624,274; herein SEQ ID NO: 2340), PKTVSNLTESSSESVQS (SEQ ID NO: 102 of U.S. Pat. No. 9,624,274; herein SEQ ID NO: 2341), SLMGDEFKAVLET (SEQ ID NO: 103 of U.S. Pat. No. 9,624,274; herein SEQ ID NO: 2342), QHSVAYTFEED (SEQ ID NO: 104 of U.S. Pat. No. 9,624,274; herein SEQ ID NO: 2343), INPEIITRDG (SEQ ID NO: 105 of U.S. Pat. No. 9,624,274; herein SEQ ID NO: 2344), DISLTGDPVITASYL (SEQ ID NO: 106 of U.S. Pat. No. 9,624,274; herein SEQ ID NO: 2345), DISLTGDPVITA (SEQ ID NO: 107 of U.S. Pat. No. 9,624,274; herein SEQ ID NO: 2346), DQSIDFEIDSA (SEQ ID NO: 108 of U.S. Pat. No. 9,624,274; herein SEQ ID NO: 2347), KNVSEDLPLPTFSPTLLGDS (SEQ ID NO: 109 of U.S. Pat. No. 9,624,274; herein SEQ ID NO: 2348), KNVSEDLPLPT (SEQ ID NO: 110 of U.S. Pat. No. 9,624,274; herein SEQ ID NO: 2349), CDSGRVRTDAPD (SEQ ID NO: 111 of U.S. Pat. No. 9,624,274; herein SEQ ID NO: 2350), FPEHLLVDFLQSLS (SEQ ID NO: 112 of U.S. Pat. No. 9,624,274; herein SEQ ID NO: 2351), DAEFRHDSG (SEQ ID NO: 65 of U.S. Pat. No. 9,624,274; herein SEQ ID NO: 2352), HYAAAQWDFGNTMCQL (SEQ ID NO: 113 of U.S. Pat. No. 9,624,274; herein SEQ ID NO: 2353), YAAQWDFGNTMCQ (SEQ ID NO: 114 of U.S. Pat. No. 9,624,274; herein SEQ ID NO: 2354), RSQKEGLHYT (SEQ ID NO: 115 of U.S. Pat. No. 9,624,274; herein SEQ ID NO: 2355), SSRTPSDKPVAHWANPQAE (SEQ ID NO: 116 of U.S. Pat. No. 9,624,274; herein SEQ ID NO: 2356), SRTPSDKPVAHWANP (SEQ ID NO: 117 of U.S. Pat. No. 9,624,274; herein SEQ ID NO: 2357), SSRTPSDKP (SEQ ID NO: 118 of U.S. Pat. No. 9,624,274; herein SEQ ID NO: 2358), NADGNVDYHMNSVP (SEQ ID NO: 119 of U.S. Pat. No. 9,624,274; herein SEQ ID NO: 2359), DGNVDYHMNSV (SEQ ID NO: 120 of U.S. Pat. No. 9,624,274; herein SEQ ID NO: 2360), RSFKEFLQSSLRALRQ (SEQ ID NO: 121 of U.S. Pat. No. 9,624,274; herein SEQ ID NO: 2361); FKEFLQSSLRA (SEQ ID NO: 122 of U.S. Pat. No. 9,624,274; herein SEQ ID NO: 2362), or QMWAPQWGPD (SEQ ID NO: 123 of U.S. Pat. No. 9,624,274; herein SEQ ID NO: 2363).

[0239] In one embodiment, the AAV serotype may be, or may have a sequence as described in U.S. Pat. No. 9,475,845, the contents of which are herein incorporated by reference in their entirety, such as, but not limited to, AAV capsid proteins comprising modification of one or more amino acids at amino acid positions 585 to 590 of the native AAV2 capsid protein. Further the modification may result in, but not limited to, the amino acid sequence RGNRQA (SEQ ID NO: 3 of U.S. Pat. No. 9,475,845; herein SEQ ID NO: 2364), SSSTDP (SEQ ID NO: 4 of U.S. Pat. No. 9,475,845; herein SEQ ID NO: 2365), SSNTAP (SEQ ID NO: 5 of U.S. Pat. No. 9,475,845; herein SEQ ID NO: 2366), SNSNLP (SEQ ID NO: 6 of U.S. Pat. No. 9,475,845; herein SEQ ID NO: 2367), SSTTAP (SEQ ID NO: 7 of U.S. Pat. No. 9,475,845; herein SEQ ID NO: 2368), AANTAA (SEQ ID NO: 8 of U.S. Pat. No. 9,475,845; herein SEQ ID NO: 2369), QQNTAP (SEQ ID NO: 9 of U.S. Pat. No. 9,475,845; herein SEQ ID NO: 2370), SAQAQA (SEQ ID NO: 10 of U.S. Pat. No. 9,475,845; herein SEQ ID NO: 2371), QANTGP (SEQ ID NO: 11 of U.S. Pat. No. 9,475,845; herein SEQ ID NO: 2372), NATTAP (SEQ ID NO: 12 of U.S. Pat. No. 9,475,845; herein SEQ ID NO: 2373), SSTAGP (SEQ ID NO: 13 and 20 of U.S. Pat. No. 9,475,845; herein SEQ ID NO: 2374), QQNTAA (SEQ ID NO: 14 of U.S. Pat. No. 9,475,845; herein SEQ ID NO: 2375), PSTAGP (SEQ ID NO: 15 of U.S. Pat. No. 9,475,845; herein SEQ ID NO: 2376), NQNTAP (SEQ ID NO: 16 of U.S. Pat. No. 9,475,845; herein SEQ ID NO: 2377), QAANAP (SEQ ID NO: 17 of U.S. Pat. No. 9,475,845; herein SEQ ID NO: 2378), SIVGLP (SEQ ID NO: 18 of U.S. Pat. No. 9,475,845; herein SEQ ID NO: 2379), AASTAA (SEQ ID NO: 19, and 27 of U.S. Pat. No. 9,475,845; herein SEQ ID NO: 2380), SQNTTA (SEQ ID NO: 21 of U.S. Pat. No. 9,475,845; herein SEQ ID NO: 2381), QQDTAP (SEQ ID NO: 22 of U.S. Pat. No. 9,475,845; herein SEQ ID NO: 2382), QTNTGP (SEQ ID NO: 23 of U.S. Pat. No. 9,475,845; herein SEQ ID NO: 2383), QTNGAP (SEQ ID NO: 24 of U.S. Pat. No. 9,475,845; herein SEQ ID NO: 2384), QQNAAP (SEQ ID NO: 25 of U.S. Pat. No. 9,475,845; herein SEQ ID NO: 2385), or AANTQA (SEQ ID NO: 26 of U.S. Pat. No. 9,475,845; herein SEQ ID NO: 2386). In one embodiment, the amino acid modification is a substitution at amino acid positions 262 through 265 in the native AAV2 capsid protein or the corresponding position in the capsid protein of another AAV with a targeting sequence. The targeting sequence may be, but is not limited to, any of the amino acid sequences, NGRAHA (SEQ ID NO: 38 of U.S. Pat. No. 9,475,845; herein SEQ ID NO: 2387), QPEHSST (SEQ ID NO: 39 and 50 of U.S. Pat. No. 9,475,845; herein SEQ ID NO: 2388), VNTANST (SEQ ID NO: 40 of U.S. Pat. No. 9,475,845; herein SEQ ID NO: 2389), HGPMQKS (SEQ ID NO: 41 of U.S. Pat. No. 9,475,845; herein SEQ ID NO: 2390), PHKPPLA (SEQ ID NO: 42 of U.S. Pat. No. 9,475,845; herein SEQ ID NO: 2391), IKNNEMW (SEQ ID NO: 43 of U.S. Pat. No. 9,475,845; herein SEQ ID NO: 2392), RNLDTPM (SEQ ID NO: 44 of U.S. Pat. No. 9,475,845; herein SEQ ID NO: 2393), VDSHRQS (SEQ ID NO: 45 of U.S. Pat. No. 9,475,845; herein SEQ ID NO: 2394), YDSKTKT (SEQ ID NO: 46 of U.S. Pat. No. 9,475,845; herein SEQ ID NO: 2395), SQLPHQK (SEQ ID NO: 47 of U.S. Pat. No. 9,475,845; herein SEQ ID NO: 2396), STMQQNT (SEQ ID NO: 48 of U.S. Pat. No. 9,475,845; herein SEQ ID NO: 2397), TERYMTQ (SEQ ID NO: 49 of U.S. Pat. No. 9,475,845; herein SEQ ID NO: 2398), DASLSTS (SEQ ID NO: 51 of U.S. Pat. No. 9,475,845; herein SEQ ID NO: 2399), DLPNKKT (SEQ ID NO: 52 of U.S. Pat. No. 9,475,845; herein SEQ ID NO: 2400), DLTAARL (SEQ ID NO: 53 of U.S. Pat. No. 9,475,845; herein SEQ ID NO: 2401), EPHQFNY (SEQ ID NO: 54 of U.S. Pat. No. 9,475,845; herein SEQ ID NO: 2402), EPQSNHT (SEQ ID NO: 55 of U.S. Pat. No. 9,475,845; herein SEQ ID NO: 2403), MSSWPSQ (SEQ ID NO: 56 of U.S. Pat. No. 9,475,845; herein SEQ ID NO: 2404), NPKHNAT (SEQ ID NO: 57 of U.S. Pat. No. 9,475,845; herein SEQ ID NO: 2405), PDGMRTT (SEQ ID NO: 58 of U.S. Pat. No. 9,475,845; herein SEQ ID NO: 2406), PNNNKTT (SEQ ID NO: 59 of U.S. Pat. No. 9,475,845; herein SEQ ID NO: 2407), QSTTHDS (SEQ ID NO: 60 of U.S. Pat. No. 9,475,845; herein SEQ ID NO: 2408), TGSKQKQ (SEQ ID NO: 61 of U.S. Pat. No. 9,475,845; herein SEQ ID NO: 2409), SLKHQAL (SEQ ID NO: 62 of U.S. Pat. No. 9,475,845; herein SEQ ID NO: 2410), SPIDGEQ (SEQ ID NO: 63 of U.S. Pat. No. 9,475,845; herein SEQ ID NO: 2411), WIFPWIQL (SEQ ID NO: 64 and 112 of U.S. Pat. No. 9,475,845; herein SEQ ID NO: 2412), CDCRGDCFC (SEQ ID NO: 65 of U.S. Pat. No. 9,475,845; herein SEQ ID NO: 2413), CNGRC (SEQ ID NO: 66 of U.S. Pat. No. 9,475,845; herein SEQ ID NO: 2414), CPRECES (SEQ ID NO: 67 of U.S. Pat. No. 9,475,845; herein SEQ ID NO: 2415), CTTHWGFTLC (SEQ ID NO: 68 and 123 of U.S. Pat. No. 9,475,845; herein SEQ ID NO: 2416), CGRRAGGSC (SEQ ID NO: 69 of U.S. Pat. No. 9,475,845; herein SEQ ID NO: 2417), CKGGRAKDC (SEQ ID NO: 70 of U.S. Pat. No. 9,475,845; herein SEQ ID NO: 2418), CVPELGHEC (SEQ ID NO: 71 and 115 of U.S. Pat. No. 9,475,845; herein SEQ ID NO: 2419), CRRETAWAK (SEQ ID NO: 72 of U.S. Pat. No. 9,475,845; herein SEQ ID NO: 2420), VSWFSHRYSPFAVS (SEQ ID NO: 73 of U.S. Pat. No. 9,475,845; herein SEQ ID NO: 2421), GYRDGYAGPILYN (SEQ ID NO: 74 of U.S. Pat. No. 9,475,845; herein SEQ ID NO: 2422), XXXYXXX (SEQ ID NO: 75 of U.S. Pat. No. 9,475,845; herein SEQ ID NO: 2423), YXNW (SEQ ID NO: 76 of U.S. Pat. No. 9,475,845; herein SEQ ID NO: 2424), RPLPPLP (SEQ ID NO: 77 of U.S. Pat. No. 9,475,845; herein SEQ ID NO: 2425), APPLPPR (SEQ ID NO: 78 of U.S. Pat. No. 9,475,845; herein SEQ ID NO: 2426), DVFYPYPYASGS (SEQ ID NO: 79 of U.S. Pat. No. 9,475,845; herein SEQ ID NO: 2427), MYWYPY (SEQ ID NO: 80 of U.S. Pat. No. 9,475,845; herein SEQ ID NO: 2428), DITWDQLWDLMK (SEQ ID NO: 81 of U.S. Pat. No. 9,475,845; herein SEQ ID NO: 2429), CWDDXWLC (SEQ ID NO: 82 of U.S. Pat. No. 9,475,845; herein SEQ ID NO: 2430), EWCEYLGGYLRCYA (SEQ ID NO: 83 of U.S. Pat. No. 9,475,845; herein SEQ ID NO: 2431), YXCXXGPXTWXCXP (SEQ ID NO: 84 of U.S. Pat. No. 9,475,845; herein SEQ ID NO: 2432), IEGPTLRQWLAARA (SEQ ID NO: 85 of U.S. Pat. No. 9,475,845; herein SEQ ID NO: 2433), LWXXX (SEQ ID NO: 86 of U.S. Pat. No. 9,475,845; herein SEQ ID NO: 2434), XFXXYLW (SEQ ID NO: 87 of U.S. Pat. No. 9,475,845; herein SEQ ID NO: 2435), SSIISHFRWGLCD (SEQ ID NO: 88 of U.S. Pat. No. 9,475,845; herein SEQ ID NO: 2436), MSRPACPPNDKYE (SEQ ID NO: 89 of U.S. Pat. No. 9,475,845; herein SEQ ID NO: 2437), CLRSGRGC (SEQ ID NO: 90 of U.S. Pat. No. 9,475,845; herein SEQ ID NO: 2438), CHWMFSPWC (SEQ ID NO: 91 of U.S. Pat. No. 9,475,845; herein SEQ ID NO: 2439), WXXF (SEQ ID NO: 92 of U.S. Pat. No. 9,475,845; herein SEQ ID NO: 2440), CSSRLDAC (SEQ ID NO: 93 of U.S. Pat. No. 9,475,845; herein SEQ ID NO: 2441), CLPVASC (SEQ ID NO: 94 of U.S. Pat. No. 9,475,845; herein SEQ ID NO: 2442), CGFECVRQCPERC (SEQ ID NO: 95 of U.S. Pat. No. 9,475,845; herein SEQ ID NO: 2443), CVALCREACGEGC (SEQ ID NO: 96 of U.S. Pat. No. 9,475,845; herein SEQ ID NO: 2444), SWCEPGWCR (SEQ ID NO: 97 of U.S. Pat. No. 9,475,845; herein SEQ ID NO: 2445), YSGKWGW (SEQ ID NO: 98 of U.S. Pat. No. 9,475,845; herein SEQ ID NO: 2446), GLSGGRS (SEQ ID NO: 99 of U.S. Pat. No. 9,475,845; herein SEQ ID NO: 2447), LMLPRAD (SEQ ID NO: 100 of U.S. Pat. No. 9,475,845; herein SEQ ID NO: 2448), CSCFRDVCC (SEQ ID NO: 101 of U.S. Pat. No. 9,475,845; herein SEQ ID NO: 2449), CRDVVSVIC (SEQ ID NO: 102 of U.S. Pat. No. 9,475,845; herein SEQ ID NO: 2450), MARSGL (SEQ ID NO: 103 of U.S. Pat. No. 9,475,845; herein SEQ ID NO: 2451), MARAKE (SEQ ID NO: 104 of U.S. Pat. No. 9,475,845; herein SEQ ID NO: 2452), MSRTMS (SEQ ID NO: 105 of U.S. Pat. No. 9,475,845; herein SEQ ID NO: 2453), KCCYSL (SEQ ID NO: 106 of U.S. Pat. No. 9,475,845; herein SEQ ID NO: 2454), MYWGDSHWLQYWYE (SEQ ID NO: 107 of U.S. Pat. No. 9,475,845; herein SEQ ID NO: 2455), MQLPLAT (SEQ ID NO: 108 of U.S. Pat. No. 9,475,845; herein SEQ ID NO: 2456), EWLS (SEQ ID NO: 109 of U.S. Pat. No. 9,475,845; herein SEQ ID NO: 2457), SNEW (SEQ ID NO: 110 of U.S. Pat. No. 9,475,845; herein SEQ ID NO: 2458), TNYL (SEQ ID NO: 111 of U.S. Pat. No. 9,475,845; herein SEQ ID NO: 2459), WDLAWMFRLPVG (SEQ ID NO: 113 of U.S. Pat. No. 9,475,845; herein SEQ ID NO: 2460), CTVALPGGYVRVC (SEQ ID NO: 114 of U.S. Pat. No. 9,475,845; herein SEQ ID NO: 2461), CVAYCIEHHCWTC (SEQ ID NO: 116 of U.S. Pat. No. 9,475,845; herein SEQ ID NO: 2462), CVFAHNYDYLVC (SEQ ID NO: 117 of U.S. Pat. No. 9,475,845; herein SEQ ID NO: 2463), CVFTSNYAFC (SEQ ID NO: 118 of U.S. Pat. No. 9,475,845; herein SEQ ID NO: 2464), VHSPNKK (SEQ ID NO: 119 of U.S. Pat. No. 9,475,845; herein SEQ ID NO: 2465), CRGDGWC (SEQ ID NO: 120 of U.S. Pat. No. 9,475,845; herein SEQ ID NO: 2466), XRGCDX (SEQ ID NO: 121 of U.S. Pat. No. 9,475,845; herein SEQ ID NO: 2467), PXXX (SEQ ID NO: 122 of U.S. Pat. No. 9,475,845; herein SEQ ID NO: 2468), SGKGPRQITAL (SEQ ID NO: 124 of U.S. Pat. No. 9,475,845; herein SEQ ID NO: 2469), AAAAAAAAAXXXXX (SEQ ID NO: 125 of U.S. Pat. No. 9,475,845; herein SEQ ID NO: 2470), VYMSPF (SEQ ID NO: 126 of U.S. Pat. No. 9,475,845; herein SEQ ID NO: 2471), ATWLPPR (SEQ ID NO: 127 of U.S. Pat. No. 9,475,845; herein SEQ ID NO: 2472), HTMYYHHYQHHL (SEQ ID NO: 128 of U.S. Pat. No. 9,475,845; herein SEQ ID NO: 2473), SEVGCRAGPLQWLCEKYFG (SEQ ID NO: 129 of U.S. Pat. No. 9,475,845; herein SEQ ID NO: 2474), CGLLPVGRPDRNVWRWLC (SEQ ID NO: 130 of U.S. Pat. No. 9,475,845; herein SEQ ID NO: 2475), CKGQCDRFKGLPWEC (SEQ ID NO: 131 of U.S. Pat. No. 9,475,845; herein SEQ ID NO: 2476), SGRSA (SEQ ID NO: 132 of U.S. Pat. No. 9,475,845; herein SEQ ID NO: 2477), WGFP (SEQ ID NO: 133 of U.S. Pat. No. 9,475,845; herein SEQ ID NO: 2478), AEPMPHSLNFSQYLWYT (SEQ ID NO: 134 of U.S. Pat. No. 9,475,845; herein SEQ ID NO: 2479), WAYXSP (SEQ ID NO: 135 of U.S. Pat. No. 9,475,845; herein SEQ ID NO: 2480), IELLQAR (SEQ ID NO: 136 of U.S. Pat. No. 9,475,845; herein SEQ ID NO: 2481), AYTKCSRQWRTCMTTH (SEQ ID NO: 137 of U.S. Pat. No. 9,475,845; herein SEQ ID NO: 2482), PQNSKIPGPTFLDPH (SEQ ID NO: 138 of U.S. Pat. No. 9,475,845; herein SEQ ID NO: 2483), SMEPALPDWWWKMFK (SEQ ID NO: 139 of U.S. Pat. No. 9,475,845; herein SEQ ID NO: 2484), ANTPCGPYTHDCPVKR (SEQ ID NO: 140 of U.S. Pat. No. 9,475,845; herein SEQ ID NO: 2485), TACHQHVRMVRP (SEQ ID NO: 141 of U.S. Pat. No. 9,475,845; herein SEQ ID NO: 2486), VPWMEPAYQRFL (SEQ ID NO: 142 of U.S. Pat. No. 9,475,845; herein SEQ ID NO: 2487), DPRATPGS (SEQ ID NO: 143 of U.S. Pat. No. 9,475,845; herein SEQ ID NO: 2488), FRPNRAQDYNTN (SEQ ID NO: 144 of U.S. Pat. No. 9,475,845; herein SEQ ID NO: 2489), CTKNSYLMC (SEQ ID NO: 145 of U.S. Pat. No. 9,475,845; herein SEQ ID NO: 2490), CXXTXXXGXGC (SEQ ID NO: 146 of U.S. Pat. No. 9,475,845; herein SEQ ID NO: 2491), CPIEDRPMC (SEQ ID NO: 147 of U.S. Pat. No. 9,475,845; herein SEQ ID NO: 2492), HEWSYLAPYPWF (SEQ ID NO: 148 of U.S. Pat. No. 9,475,845; herein SEQ ID NO: 2493), MCPKHPLGC (SEQ ID NO: 149 of U.S. Pat. No. 9,475,845; herein SEQ ID NO: 2494), RMWPSSTVNLSAGRR (SEQ ID NO: 150 of U.S. Pat. No. 9,475,845; herein SEQ ID NO: 2495), SAKTAVSQRVWLPSHRGGEP (SEQ ID NO: 151 of U.S. Pat. No. 9,475,845; herein SEQ ID NO: 2496), KSREHVNNSACPSKRITAAL (SEQ ID NO: 152 of U.S. Pat. No. 9,475,845; herein SEQ ID NO: 2497), EGFR (SEQ ID NO: 153 of U.S. Pat. No. 9,475,845; herein SEQ ID NO: 2498), AGLGVR (SEQ ID NO: 154 of U.S. Pat. No. 9,475,845; herein SEQ ID NO: 2499), GTRQGHTMRLGVSDG (SEQ ID NO: 155 of U.S. Pat. No. 9,475,845; herein SEQ ID NO: 2500), IAGLATPGWSHWLAL (SEQ ID NO: 156 of U.S. Pat. No. 9,475,845; herein SEQ ID NO: 2501), SMSIARL (SEQ ID NO: 157 of U.S. Pat. No. 9,475,845; herein SEQ ID NO: 2502), HTFEPGV (SEQ ID NO: 158 of U.S. Pat. No. 9,475,845; herein SEQ ID NO: 2503), NTSLKRISNKRIRRK (SEQ ID NO: 159 of U.S. Pat. No. 9,475,845; herein SEQ ID NO: 2504), LRIKRKRRKRKKTRK (SEQ ID NO: 160 of U.S. Pat. No. 9,475,845; herein SEQ ID NO: 2505), GGG, GFS, LWS, EGG, LLV, LSP, LBS, AGG, GRR, GGH and GTV.

[0240] In one embodiment, the AAV serotype may be, or may have a sequence as described in United States Publication No. US 20160369298, the contents of which are herein incorporated by reference in their entirety, such as, but not limited to, site-specific mutated capsid protein of AAV2 (SEQ ID NO: 97 of US 20160369298; herein SEQ ID NO: 2506) or variants thereof, wherein the specific site is at least one site selected from sites R447, G453, S578, N587, N587+1, S662 of VP1 or fragment thereof.

[0241] Further, any of the mutated sequences described in US 20160369298, may be or may have, but not limited to, any of the following sequences SDSGASN (SEQ ID NO: 1 and SEQ ID NO: 231 of US20160369298; herein SEQ ID NO: 2507), SPSGASN (SEQ ID NO: 2 of US20160369298; herein SEQ ID NO: 2508), SHSGASN (SEQ ID NO: 3 of US20160369298; herein SEQ ID NO: 2509), SRSGASN (SEQ ID NO: 4 of US20160369298; herein SEQ ID NO: 2510), SKSGASN (SEQ ID NO: 5 of US20160369298; herein SEQ ID NO: 2511), SNSGASN (SEQ ID NO: 6 of US20160369298; herein SEQ ID NO: 2512), SGSGASN (SEQ ID NO: 7 of US20160369298; herein SEQ ID NO: 2513), SASGASN (SEQ ID NO: 8, 175, and 221 of US20160369298; herein SEQ ID NO: 2514), SESGTSN (SEQ ID NO: 9 of US20160369298; herein SEQ ID NO: 2515), STTGGSN (SEQ ID NO: 10 of US20160369298; herein SEQ ID NO: 2516), SSAGSTN (SEQ ID NO: 11 of US20160369298; herein SEQ ID NO: 2517), NNDSQA (SEQ ID NO: 12 of US20160369298; herein SEQ ID NO: 2518), NNRNQA (SEQ ID NO: 13 of US20160369298; herein SEQ ID NO: 2519), NNNKQA (SEQ ID NO: 14 of US20160369298; herein SEQ ID NO: 2520), NAKRQA (SEQ ID NO: 15 of US20160369298; herein SEQ ID NO: 2521), NDEHQA (SEQ ID NO: 16 of US20160369298; herein SEQ ID NO: 2522), NTSQKA (SEQ ID NO: 17 of US20160369298; herein SEQ ID NO: 2523), YYLSRTNTPSGTDTQSRLVFSQAGA (SEQ ID NO: 18 of US20160369298; herein SEQ ID NO: 2524), YYLSRTNTDSGTETQSGLDFSQAGA (SEQ ID NO: 19 of US20160369298; herein SEQ ID NO: 2525), YYLSRTNTESGTPTQSALEFSQAGA (SEQ ID NO: 20 of US20160369298; herein SEQ ID NO: 2526), YYLSRTNTHSGTHTQSPLHFSQAGA (SEQ ID NO: 21 of US20160369298; herein SEQ ID NO: 2527), YYLSRTNTSSGTITISHLIFSQAGA (SEQ ID NO: 22 of US20160369298; herein SEQ ID NO: 2528), YYLSRTNTRSGIMTKSSLMFSQAGA (SEQ ID NO: 23 of US20160369298; herein SEQ ID NO: 2529), YYLSRTNTKSGRKTLSNLSFSQAGA (SEQ ID NO: 24 of US20160369298; herein SEQ ID NO: 2530), YYLSRTNDGSGPVTPSKLRFSQRGA (SEQ ID NO: 25 of US20160369298; herein SEQ ID NO: 2531), YYLSRTNAASGHATHSDLKFSQPGA (SEQ ID NO: 26 of US20160369298; herein SEQ ID NO: 2532), YYLSRTNGQAGSLTMSELGFSQVGA (SEQ ID NO: 27 of US20160369298; herein SEQ ID NO: 2533), YYLSRTNSTGGNQTTSQLLFSQLSA (SEQ ID NO: 28 of US20160369298; herein SEQ ID NO: 2534), YFLSRTNNNTGLNTNSTLNFSQGRA (SEQ ID NO: 29 of US20160369298; herein SEQ ID NO: 2535), SKTGADNNNSEYSWTG (SEQ ID NO: 30 of US20160369298; herein SEQ ID NO: 2536), SKTDADNNNSEYSWTG (SEQ ID NO: 31 of US20160369298; herein SEQ ID NO: 2537), SKTEADNNNSEYSWTG (SEQ ID NO: 32 of US20160369298; herein SEQ ID NO: 2538), SKTPADNNNSEYSWTG (SEQ ID NO: 33 of US20160369298; herein SEQ ID NO: 2539), SKTHADNNNSEYSWTG (SEQ ID NO: 34 of US20160369298; herein SEQ ID NO: 2540), SKTQADNNNSEYSWTG (SEQ ID NO: 35 of US20160369298; herein SEQ ID NO: 2541), SKTIADNNNSEYSWTG (SEQ ID NO: 36 of US20160369298; herein SEQ ID NO: 2542), SKTMADNNNSEYSWTG (SEQ ID NO: 37 of US20160369298; herein SEQ ID NO: 2543), SKTRADNNNSEYSWTG (SEQ ID NO: 38 of US20160369298; herein SEQ ID NO: 2544), SKTNADNNNSEYSWTG (SEQ ID NO: 39 of US20160369298; herein SEQ ID NO: 2545), SKTVGRNNNSEYSWTG (SEQ ID NO: 40 of US20160369298; herein SEQ ID NO: 2546), SKTADRNNNSEYSWTG (SEQ ID NO: 41 of US20160369298; herein SEQ ID NO: 2547), SKKLSQNNNSKYSWQG (SEQ ID NO: 42 of US20160369298; herein SEQ ID NO: 2548), SKPTTGNNNSDYSWPG (SEQ ID NO: 43 of US20160369298; herein SEQ ID NO: 2549), STQKNENNNSNYSWPG (SEQ ID NO: 44 of US20160369298; herein SEQ ID NO: 2550), HKDDEGKF (SEQ ID NO: 45 of US20160369298; herein SEQ ID NO: 2551), HKDDNRKF (SEQ ID NO: 46 of US20160369298; herein SEQ ID NO: 2552), HKDDTNKF (SEQ ID NO: 47 of US20160369298; herein SEQ ID NO: 2553), HEDSDKNF (SEQ ID NO: 48 of US20160369298; herein SEQ ID NO: 2554), HRDGADSF (SEQ ID NO: 49 of US20160369298; herein SEQ ID NO: 2555), HGDNKSRF (SEQ ID NO: 50 of US20160369298; herein SEQ ID NO: 2556), KQGSEKTNVDFEEV (SEQ ID NO: 51 of US20160369298; herein SEQ ID NO: 2557), KQGSEKTNVDSEEV (SEQ ID NO: 52 of US20160369298; herein SEQ ID NO: 2558), KQGSEKTNVDVEEV (SEQ ID NO: 53 of US20160369298; herein SEQ ID NO: 2559), KQGSDKTNVDDAGV (SEQ ID NO: 54 of US20160369298; herein SEQ ID NO: 2560), KQGSSKTNVDPREV (SEQ ID NO: 55 of US20160369298; herein SEQ ID NO: 2561), KQGSRKTNVDHKQV (SEQ ID NO: 56 of US20160369298; herein SEQ ID NO: 2562), KQGSKGGNVDTNRV (SEQ ID NO: 57 of US20160369298; herein SEQ ID NO: 2563), KQGSGEANVDNGDV (SEQ ID NO: 58 of US20160369298; herein SEQ ID NO: 2564), KQDAAADNIDYDHV (SEQ ID NO: 59 of US20160369298; herein SEQ ID NO: 2565), KQSGTRSNAAASSV (SEQ ID NO: 60 of US20160369298; herein SEQ ID NO: 2566), KENTNTNDTELTNV (SEQ ID NO: 61 of US20160369298; herein SEQ ID NO: 2567), QRGNNVAATADVNT (SEQ ID NO: 62 of US20160369298; herein SEQ ID NO: 2568), QRGNNEAATADVNT (SEQ ID NO: 63 of US20160369298; herein SEQ ID NO: 2569), QRGNNPAATADVNT (SEQ ID NO: 64 of US20160369298; herein SEQ ID NO: 2570), QRGNNHAATADVNT (SEQ ID NO: 65 of US20160369298; herein SEQ ID NO: 2571), QEENNIAATPGVNT (SEQ ID NO: 66 of US20160369298; herein SEQ ID NO: 2572), QPPNNMAATHEVNT (SEQ ID NO: 67 of US20160369298; herein SEQ ID NO: 2573), QHHNNSAATTIVNT (SEQ ID NO: 68 of US20160369298; herein SEQ ID NO: 2574), QTTNNRAAFNMVET (SEQ ID NO: 69 of US20160369298; herein SEQ ID NO: 2575), QKKNNNAASKKVAT (SEQ ID NO: 70 of US20160369298; herein SEQ ID NO: 2576), QGGNNKAADDAVKT (SEQ ID NO: 71 of US20160369298; herein SEQ ID NO: 2577), QAAKGGAADDAVKT (SEQ ID NO: 72 of US20160369298; herein SEQ ID NO: 2578), QDDRAAAANESVDT (SEQ ID NO: 73 of US20160369298; herein SEQ ID NO: 2579), QQQHDDAAYQRVHT (SEQ ID NO: 74 of US20160369298; herein SEQ ID NO: 2580), QSSSSLAAVSTVQT (SEQ ID NO: 75 of US20160369298; herein SEQ ID NO: 2581), QNNQTTAAIRNVTT (SEQ ID NO: 76 of US20160369298; herein SEQ ID NO: 2582), NYNKKSDNVDFT (SEQ ID NO: 77 of US20160369298; herein SEQ ID NO: 2583), NYNKKSENVDFT (SEQ ID NO: 78 of US20160369298; herein SEQ ID NO: 2584), NYNKKSLNVDFT (SEQ ID NO: 79 of US20160369298; herein SEQ ID NO: 2585), NYNKKSPNVDFT (SEQ ID NO: 80 of US20160369298; herein SEQ ID NO: 2586), NYSKKSHCVDFT (SEQ ID NO: 81 of US20160369298; herein SEQ ID NO: 2587), NYRKTIYVDFT (SEQ ID NO: 82 of US20160369298; herein SEQ ID NO: 2588), NYKEKKDVHFT (SEQ ID NO: 83 of US20160369298; herein SEQ ID NO: 2589), NYGHRAIVQFT (SEQ ID NO: 84 of US20160369298; herein SEQ ID NO: 2590), NYANHQFVVCT (SEQ ID NO: 85 of US20160369298; herein SEQ ID NO: 2591), NYDDDPTGVLLT (SEQ ID NO: 86 of US20160369298; herein SEQ ID NO: 2592), NYDDPTGVLLT (SEQ ID NO: 87 of US20160369298; herein SEQ ID NO: 2593), NFEQQNSVEWT (SEQ ID NO: 88 of US20160369298; herein SEQ ID NO: 2594), SQSGASN (SEQ ID NO: 89 and SEQ ID NO: 241 of US20160369298; herein SEQ ID NO: 2595), NNGSQA (SEQ ID NO: 90 of US20160369298; herein SEQ ID NO: 2596), YYLSRTNTPSGTTTWSRLQFSQAGA (SEQ ID NO: 91 of US20160369298; herein SEQ ID NO: 2597), SKTSADNNNSEYSWTG (SEQ ID NO: 92 of US20160369298; herein SEQ ID NO: 2598), HKDDEEKF (SEQ ID NO: 93, 209, 214, 219, 224, 234, 239, and 244 of US20160369298; herein SEQ ID NO: 2599), KQGSEKTNVDIEEV (SEQ ID NO: 94 of US20160369298; herein SEQ ID NO: 2600), QRGNNQAATADVNT (SEQ ID NO: 95 of US20160369298; herein SEQ ID NO: 2601), NYNKKSVNVDFT (SEQ ID NO: 96 of US20160369298; herein SEQ ID NO: 2602), SQSGASNYNTPSGTTTQSRLQFSTSADNNNSEYSWTGATKYH (SEQ ID NO: 106 of US20160369298; herein SEQ ID NO: 2603), SASGASNFNSEGGSLTQSSLGFSTDGENNNSDFSWTGATKYH (SEQ ID NO: 107 of US20160369298; herein SEQ ID NO: 2604), SQSGASNYNTPSGTTTQSRLQFSTDGENNNSDFSWTGATKYH (SEQ ID NO: 108 of US20160369298; herein SEQ ID NO: 2605), SASGASNYNTPSGTTTQSRLQFSTSADNNNSEFSWPGATTYH (SEQ ID NO: 109 of US20160369298; herein SEQ ID NO: 2606), SQSGASNFNSEGGSLTQSSLGFSTDGENNNSDFSWTGATKYH (SEQ ID NO: 110 of US20160369298; herein SEQ ID NO: 2607), SASGASNYNTPSGSLTQSSLGFSTDGENNNSDFSWTGATKYH (SEQ ID NO: 111 of US20160369298; herein SEQ ID NO: 2608), SQSGASNYNTPSGTTTQSRLQFSTSADNNNSDFSWTGATKYH (SEQ ID NO: 112 of US20160369298; herein SEQ ID NO: 2609), SGAGASNFNSEGGSLTQSSLGFSTDGENNNSDFSWTGATKYH (SEQ ID NO: 113 of US20160369298; herein SEQ ID NO: 2610), SGAGASN (SEQ ID NO: 176 of US20160369298; herein SEQ ID NO: 2611), NSEGGSLTQSSLGFS (SEQ ID NO: 177, 185, 193 and 202 of US20160369298; herein SEQ ID NO: 2612), TDGENNNSDFS (SEQ ID NO: 178 of US20160369298; herein SEQ ID NO: 2613), SEFSWPGATT (SEQ ID NO: 179 of US20160369298; herein SEQ ID NO: 2614), TSADNNNSDFSWT (SEQ ID NO: 180 of US20160369298; herein SEQ ID NO: 2615), SQSGASNY (SEQ ID NO: 181, 187, and 198 of US20160369298; herein SEQ ID NO: 2616), NTPSGTTTQSRLQFS (SEQ ID NO: 182, 188, 191, and 199 of US20160369298; herein SEQ ID NO: 2617), TSADNNNSEYSWTGATKYH (SEQ ID NO: 183 of US20160369298; herein SEQ ID NO: 2618), SASGASNF (SEQ ID NO: 184 of US20160369298; herein SEQ ID NO: 2619), TDGENNNSDFSWTGATKYH (SEQ ID NO: 186, 189, 194, 197, and 203 of US20160369298; herein SEQ ID NO: 2620), SASGASNY (SEQ ID NO: 190 and SEQ ID NO: 195 of US20160369298; herein SEQ ID NO: 2621), TSADNNNSEFSWPGATTYH (SEQ ID NO: 192 of US20160369298; herein SEQ ID NO: 2622), NTPSGSLTQSSLGFS (SEQ ID NO: 196 of US20160369298; herein SEQ ID NO: 2623), TSADNNNSDFSWTGATKYH (SEQ ID NO: 200 of US20160369298; herein SEQ ID NO: 2624), SGAGASNF (SEQ ID NO: 201 of US20160369298; herein SEQ ID NO: 2625), CTCCAGVVSVVSMRSRVCVNSGCAGCTDHCVVSRNSGTCVMSACACAA (SEQ ID NO: 204 of US20160369298; herein SEQ ID NO: 2626), CTCCAGAGAGGCAACAGACAAGCAGCTACCGCAGATGTCAACACACAA (SEQ ID NO: 205 of US20160369298; herein SEQ ID NO: 2627), SAAGASN (SEQ ID NO: 206 of US20160369298; herein SEQ ID NO: 2628), YFLSRTNTESGSTTQSTLRFSQAG (SEQ ID NO: 207 of US20160369298; herein SEQ ID NO: 2629), SKTSADNNNSDFS (SEQ ID NO: 208, 228, and 253 of US20160369298; herein SEQ ID NO: 2630), KQGSEKTDVDIDKV (SEQ ID NO: 210 of US20160369298; herein SEQ ID NO: 2631), STAGASN (SEQ ID NO: 211 of US20160369298; herein SEQ ID NO: 2632), YFLSRTNTTSGIETQSTLRFSQAG (SEQ ID NO: 212 and SEQ ID NO: 247 of US20160369298; herein SEQ ID NO: 2633), SKTDGENNNSDFS (SEQ ID NO: 213 and SEQ ID NO: 248 of US20160369298; herein SEQ ID NO: 2634), KQGAAADDVEIDGV (SEQ ID NO: 215 and SEQ ID NO: 250 of US20160369298; herein SEQ ID NO: 2635), SEAGASN (SEQ ID NO: 216 of US20160369298; herein SEQ ID NO: 2636), YYLSRTNTPSGTTTQSRLQFSQAG (SEQ ID NO: 217, 232 and 242 of US20160369298; herein SEQ ID NO: 2637), SKTSADNNNSEYS (SEQ ID NO: 218, 233, 238, and 243 of US20160369298; herein SEQ ID NO: 2638), KQGSEKTNVDIEKV (SEQ ID NO: 220, 225 and 245 of US20160369298; herein SEQ ID NO: 2639), YFLSRTNDASGSDTKSTLLFSQAG (SEQ ID NO: 222 of US20160369298; herein SEQ ID NO: 2640), STTPSENNNSEYS (SEQ ID NO: 223 of US20160369298; herein SEQ ID NO: 2641), SAAGATN (SEQ ID NO: 226 and SEQ ID NO: 251 of US20160369298; herein SEQ ID NO: 2642), YFLSRTNGEAGSATLSELRFSQAG (SEQ ID NO: 227 of US20160369298; herein SEQ ID NO: 2643), HGDDADRF (SEQ ID NO: 229 and SEQ ID NO: 254 of US20160369298; herein SEQ ID NO: 2644), KQGAEKSDVEVDRV (SEQ ID NO: 230 and SEQ ID NO: 255 of US20160369298; herein SEQ ID NO: 2645), KQDSGGDNIDIDQV (SEQ ID NO: 235 of US20160369298; herein SEQ ID NO: 2646), SDAGASN (SEQ ID NO: 236 of US20160369298; herein SEQ ID NO: 2647), YFLSRTNTEGGHDTQSTLRFSQAG (SEQ ID NO: 237 of US20160369298; herein SEQ ID NO: 2648), KEDGGGSDVAIDEV (SEQ ID NO: 240 of US20160369298; herein SEQ ID NO: 2649), SNAGASN (SEQ ID NO: 246 of US20160369298; herein SEQ ID NO: 2650), and YFLSRTNGEAGSATLSELRFSQPG (SEQ ID NO: 252 of US20160369298; herein SEQ ID NO: 2651). Non-limiting examples of nucleotide sequences that may encode the amino acid mutated sites include the following, AGCVVMDCAGGARSCASCAAC (SEQ ID NO: 97 of US20160369298; herein SEQ ID NO: 2652), AACRACRRSMRSMAGGCA (SEQ ID NO: 98 of US20160369298; herein SEQ ID NO: 2653), CACRRGGACRRCRMSRRSARSTTT (SEQ ID NO: 99 of US20160369298; herein SEQ ID NO: 2654), TATTTCTTGAGCAGAACAAACRVCVVSRSCGGAMNCVHSACGMHSTCAVVSCTTVDS TTTTCTCAGSBCRGSGCG (SEQ ID NO: 100 of US20160369298; herein SEQ ID NO: 2655), TCAAMAMMAVNSRVCSRSAACAACAACAGTRASTTCTCGTGGMMAGGA (SEQ ID NO: 101 of US20160369298; herein SEQ ID NO: 2656), AAGSAARRCRSCRVSRVARVCRATRYCGMSNHCRVMVRSGTC (SEQ ID NO: 102 of US20160369298; herein SEQ ID NO: 2657), CAGVVSVVSMRSRVCVNSGCAGCTDHCVVSRNSGTCVMSACA (SEQ ID NO: 103 of US20160369298; herein SEQ ID NO: 2658), AACTWCRVSVASMVSVHSDDTGTGSWSTKSACT (SEQ ID NO: 104 of US20160369298; herein SEQ ID NO: 2659), TTGTTGAACATCACCACGTGACGCACGTTC (SEQ ID NO: 256 of US20160369298; herein SEQ ID NO: 2660), TCCCCGTGGTTCTACTACATAATGTGGCCG (SEQ ID NO: 257 of US20160369298; herein SEQ ID NO: 2661), TTCCACACTCCGTTTTGGATAATGTTGAAC (SEQ ID NO: 258 of US20160369298; herein SEQ ID NO: 2662), AGGGACATCCCCAGCTCCATGCTGTGGTCG (SEQ ID NO: 259 of US20160369298; herein SEQ ID NO: 2663), AGGGACAACCCCTCCGACTCGCCCTAATCC (SEQ ID NO: 260 of US20160369298; herein SEQ ID NO: 2664), TCCTAGTAGAAGACACCCTCTCACTGCCCG (SEQ ID NO: 261 of US20160369298; herein SEQ ID NO: 2665), AGTACCATGTACACCCACTCTCCCAGTGCC (SEQ ID NO: 262 of US20160369298; herein SEQ ID NO: 2666), ATATGGACGTTCATGCTGATCACCATACCG (SEQ ID NO: 263 of US20160369298; herein SEQ ID NO: 2667), AGCAGGAGCTCCTTGGCCTCAGCGTGCGAG (SEQ ID NO: 264 of US20160369298; herein SEQ ID NO: 2668), ACAAGCAGCTTCACTATGACAACCACTGAC (SEQ ID NO: 265 of US20160369298; herein SEQ ID NO: 2669), CAGCCTAGGAACTGGCTTCCTGGACCCTGTTACCGCCAGCAGAGAGTCTCAAMAMM AVNSRVCSRSAACAACAACAGTRASTTCTCCTGGMMAGGAGCTACCAAGTACCACC TCAATGGCAGAGACTCTCTGGTGAATCCCGGACCAGCTATGGCAAGCCACRRGGAC RRCRMSRRSARSTTTTTTCCTCAGAGCGGGGTTCTCATCTTTGGGAAGSAARRCRSCR VSRVARVCRATRYCGMSNHCRVMVRSGTCATGATTACAGACGAAGAGGAGATCTGG AC (SEQ ID NO: 266 of US20160369298; herein SEQ ID NO: 2670), TGGGACAATGGCGGTCGTCTCTCAGAGTTKTKKT (SEQ ID NO: 267 of US20160369298; herein SEQ ID NO: 2671), AGAGGACCKKTCCTCGATGGTTCATGGTGGAGTTA (SEQ ID NO: 268 of US20160369298; herein SEQ ID NO: 2672), CCACTTAGGGCCTGGTCGATACCGTTCGGTG (SEQ ID NO: 269 of US20160369298; herein SEQ ID NO: 2673), and TCTCGCCCCAAGAGTAGAAACCCTTCSTTYYG (SEQ ID NO: 270 of US20160369298; herein SEQ ID NO: 2674).

[0242] In some embodiments, the AAV serotype may comprise an ocular cell targeting peptide as described in International Patent Publication WO2016134375, the contents of which are herein incorporated by reference in their entirety, such as, but not limited to SEQ ID NO: 9, and SEQ ID NO:10 of WO2016134375. Further, any of the ocular cell targeting peptides or amino acids described in WO2016134375, may be inserted into any parent AAV serotype, such as, but not limited to, AAV2 (SEQ ID NO:8 of WO2016134375; herein SEQ ID NO: 2675), or AAV9 (SEQ ID NO: 11 of WO2016134375; herein SEQ ID NO: 2676). In some embodiments, modifications, such as insertions are made in AAV2 proteins at P34-A35, T138-A139, A139-P140, G453-T454, N587-R588, and/or R588-Q589. In certain embodiments, insertions are made at D384, G385, 1560, T561, N562, E563, E564, E565, N704, and/or Y705 of AAV9. The ocular cell targeting peptide may be, but is not limited to, any of the following amino acid sequences, GSTPPPM (SEQ ID NO: 1 of WO2016134375; herein SEQ ID NO: 2677), or GETRAPL (SEQ ID NO: 4 of WO2016134375; herein SEQ ID NO: 2678).

[0243] In some embodiments, the AAV serotype may be modified as described in the United States Publication US 20170145405 the contents of which are herein incorporated by reference in their entirety. AAV serotypes may include, modified AAV2 (e.g., modifications at Y444F, Y500F, Y730F and/or S662V), modified AAV3 (e.g., modifications at Y705F, Y731F and/or T492V), and modified AAV6 (e.g., modifications at S663V and/or T492V).

[0244] In some embodiments, the AAV serotype may be modified as described in the International Publication WO2017083722 the contents of which are herein incorporated by reference in their entirety. AAV serotypes may include, AAV1 (Y705+731F+T492V), AAV2 (Y444+500+730F+T491V), AAV3 (Y705+731F), AAV5, AAV 5 (Y436+693+719F), AAV6 (VP3 variant Y705F/Y731F/T492V), AAV8 (Y733F), AAV9, AAV9 (VP3 variant Y731F), and AAV10 (Y733F).

[0245] In some embodiments, the AAV serotype may comprise, as described in International Patent Publication WO2017015102, the contents of which are herein incorporated by reference in their entirety, an engineered epitope comprising the amino acids SPAKFA (SEQ ID NO: 24 of WO2017015102; herein SEQ ID NO: 2679) or NKDKLN (SEQ ID NO:2 of WO2017015102; herein SEQ ID NO: 2680). The epitope may be inserted in the region of amino acids 665 to 670 based on the numbering of the VP1 capsid of AAV8 (SEQ ID NO:3 of WO2017015102) and/or residues 664 to 668 of AAV3B (SEQ ID NO:3).

[0246] In one embodiment, the AAV serotype may be, or may have a sequence as described in International Patent Publication WO2017058892, the contents of which are herein incorporated by reference in their entirety, such as, but not limited to, AAV variants with capsid proteins that may comprise a substitution at one or more (e.g., 2, 3, 4, 5, 6, or 7) of amino acid residues 262-268, 370-379, 451-459, 472-473, 493-500, 528-534, 547-552, 588-597, 709-710, 716-722 of AAV1, in any combination, or the equivalent amino acid residues in AAV2, AAV3, AAV4, AAV5, AAV6, AAV7, AAV8, AAV9, AAV10, AAV11, AAV12, AAVrh8, AAVrh10, AAVrh32.33, bovine AAV or avian AAV. The amino acid substitution may be, but is not limited to, any of the amino acid sequences described in WO2017058892. In one embodiment, the AAV may comprise an amino acid substitution at residues 256L, 258K, 259Q, 261S, 263A, 264S, 265T, 266G, 272H, 385S, 386Q, S472R, V473D, N500E 547S, 709A, 710N, 716D, 717N, 718N, 720L, A456T, Q457T, N458Q, K459S, T492S, K493A, S586R, S587G, S588N, T589R and/or 722T of AAV1 (SEQ ID NO: 1 of WO2017058892) in any combination, 244N, 246Q, 248R, 249E, 2501, 251K, 252S, 253G, 254S, 255V, 256D, 263Y, 377E, 378N, 453L, 456R, 532Q, 533P, 535N, 536P, 537G, 538T, 539T, 540A, 541T, 542Y, 543L, 546N, 653V, 654P, 656S, 697Q, 698F, 704D, 705S, 706T, 707G, 708E, 709Y and/or 710R of AAV5 (SEQ ID NO:5 of WO2017058892) in any combination, 248R, 316V, 317Q, 318D, 319S, 443N, 530N, 5315, 532Q 533P, 534A, 535N, 540A, 541 T, 542Y, 543L, 545G, 546N, 697Q, 704D, 706T, 708E, 709Y and/or 710R of AAV5 (SEQ ID NO: 5 of WO2017058892) in any combination, 264S, 266G, 269N, 272H, 457Q, 588S and/or 589I of AAV6 (SEQ ID NO:6 WO2017058892) in any combination, 457T, 459N, 496G, 499N, 500N, 589Q, 590N and/or 592A of AAV8 (SEQ ID NO: 8 WO2017058892) in any combination, 451I, 452N, 453G, 454S, 455G, 456Q, 457N and/or 458Q of AAV9 (SEQ ID NO: 9 WO2017058892) in any combination.

[0247] In some embodiments, the AAV may include a sequence of amino acids at positions 155, 156 and 157 of VP1 or at positions 17, 18, 19 and 20 of VP2, as described in International Publication No. WO 2017066764, the contents of which are herein incorporated by reference in their entirety. The sequences of amino acid may be, but not limited to, N-S-S, S-X-S, S-S-Y, N-X-S, N-S-Y, S-X-Y and N-X-Y, where N, X and Y are, but not limited to, independently non-serine, or non-threonine amino acids, wherein the AAV may be, but not limited to AAV1, AAV2, AAV3, AAV4, AAV5, AAV6, AAV7, AAV8, AAV9, AAV10, AAV11 and AAV12. In some embodiments, the AAV may include a deletion of at least one amino acid at positions 156, 157 or 158 of VP1 or at positions 19, 20 or 21 of VP2, wherein the AAV may be, but not limited to AAV1, AAV2, AAV3, AAV4, AAV5, AAV6, AAV7, AAV8, AAV9, AAV10, AAV11 and AAV12.

[0248] In one embodiment, peptides for inclusion in an AAV serotype may be identified using the methods described by Hui et al. (Molecular Therapy—Methods & Clinical Development (2015) 2, 15029 doi:10.1038/mtm.2015.29; the contents of which are herein incorporated by reference in its entirety). As a non-limiting example, the procedure includes isolating human splenocytes, restimulating the splenocytes in vitro using individual peptides spanning the amino acid sequence of the AAV capsid protein, IFN-gamma ELISpot with the individual peptides used for the in vitro restimulation, bioinformatics analysis to determine the HLA restriction of 15-mers identified by IFN-gamma ELISpot, identification of candidate reactive 9-mer epitopes for a given HLA allele, synthesis candidate 9-mers, second IFN-gamma ELISpot screening of splenocytes from subjects carrying the HLA alleles to which identified AAV epitopes are predicted to bind, determine the AAV capsid-reactive CD8+ T cell epitopes and determine the frequency of subjects reacting to a given AAV epitope.

[0249] In one embodiment, the AAV may be a serotype generated by Cre-recombination-based AAV targeted evolution (CREATE) as described by Deverman et al., (Nature Biotechnology 34(2):204-209 (2016)), the contents of which are herein incorporated by reference in their entirety. In one embodiment, AAV serotypes generated in this manner have improved CNS transduction and/or neuronal and astrocytic tropism, as compared to other AAV serotypes. As non-limiting examples, the AAV serotype may be PHP.B, PHP.B2, PHP.B3, PHP.A, G2A12, G2A15. In one embodiment, these AAV serotypes may be AAV9 (SEQ ID NO: 126 and 127) derivatives with a 7-amino acid insert between amino acids 588-589. Non-limiting examples of these 7-amino acid inserts include TLAVPFK (SEQ ID NO: 873), SVSKPFL (SEQ ID NO: 1249), FTLTTPK (SEQ ID NO: 882), YTLSQGW (SEQ ID NO: 888), QAVRTSL (SEQ ID NO: 914) and/or LAKERLS (SEQ ID NO: 915).

[0250] In one embodiment, the AAV serotype may be as described in Jackson et al (Frontiers in Molecular Neuroscience 9:154 (2016)), the contents of which are herein incorporated by reference in their entirety. In some embodiments, the AAV serotype is PHP.B or AAV9. In some embodiments, the AAV serotype is paired with a synapsin promoter to enhance neuronal transduction, as compared to when more ubiquitous promoters are used (i.e., CBA or CMV).

[0251] In one embodiment, peptides for inclusion in an AAV serotype may be identified by isolating human splenocytes, restimulating the splenocytes in vitro using individual peptides spanning the amino acid sequence of the AAV capsid protein, IFN-gamma ELISpot with the individual peptides used for the in vitro restimulation, bioinformatics analysis to determine the given allele restriction of 15-mers identified by IFN-gamma ELISpot, identification of candidate reactive 9-mer epitopes for a given allele, synthesis candidate 9-mers, second IFN-gamma ELISpot screening of splenocytes from subjects carrying the specific alleles to which identified AAV epitopes are predicted to bind, determine the AAV capsid-reactive CD8+ T cell epitopes and determine the frequency of subjects reacting to a given AAV epitope.

[0252] AAV particles comprising a modulatory polynucleotide encoding the siRNA molecules may be prepared or derived from various serotypes of AAVs, including, but not limited to, AAV1, AAV2, AAV3, AAV4, AAV5, AAV6, AAV7, AAV8, AAV9, AAV9.47, AAV9(hu14), AAV10, AAV11, AAV12, AAVrh8, AAVrh10, AAV-DJ8 and AAV-DJ. In some cases, different serotypes of AAVs may be mixed together or with other types of viruses to produce chimeric AAV particles. As a non-limiting example, the AAV particle is derived from the AAV9 serotype.

### Viral Genome

[0253] In one embodiment, as shown in an AAV particle comprises a viral genome with a payload region.

[0254] In one embodiment, the viral genome may comprise the components as shown in FIG. 1. The payload region 110 is located within the viral genome 100. At the 5′ and/or the 3′ end of the viral genome 100 there may be at least one inverted terminal repeat (ITR) 120. Between the 5′ ITR 120 and the payload region 110, there may be a promoter region 130. In one embodiment, the payload region may comprise at least one modulatory polynucleotide.

[0255] In one embodiment, the viral genome 100 may comprise the components as shown in FIG. 2. The payload region 110 is located within the viral genome 100. At the 5′ and/or the 3′ end of the viral genome 100 there may be at least one inverted terminal repeat (ITR) 120. Between the 5′ ITR 120 and the payload region 110, there may be a promoter region 130. Between the promoter region 130 and the payload region 110, there may be an intron region 140. In one embodiment, the payload region may comprise at least one modulatory polynucleotide.

[0256] In one embodiment, the viral genome 100 may comprise the components as shown in FIG. 3. At the 5′ and/or the 3′ end of the viral genome 100 there may be at least one inverted terminal repeat (ITR) 120. Within the viral genome 100, there may be an enhancer region 150, a promoter region 130, an intron region 140, and a payload region 110. In one embodiment, the payload region may comprise at least one modulatory polynucleotide.

[0257] In one embodiment, the viral genome 100 may comprise the components as shown in FIG. 4. At the 5′ and/or the 3′ end of the viral genome 100 there may be at least one inverted terminal repeat (ITR) 120. Within the viral genome 100, there may be an enhancer region 150, a promoter region 130, an intron region 140, a payload region 110, and a polyadenylation signal sequence region 160. In one embodiment, the payload region may comprise at least one modulatory polynucleotide.

[0258] In one embodiment, the viral genome 100 may comprise the components as shown in FIG. 5. At the 5′ and/or the 3′ end of the viral genome 100 there may be at least one inverted terminal repeat (ITR) 120. Within the viral genome 100, there may be at least one MCS region 170, an enhancer region 150, a promoter region 130, an intron region 140, a payload region 110, and a polyadenylation signal sequence region 160. In one embodiment, the payload region may comprise at least one modulatory polynucleotide.

[0259] In one embodiment, the viral genome 100 may comprise the components as shown in FIG. 6. At the 5′ and/or the 3′ end of the viral genome 100 there may be at least one inverted terminal repeat (ITR) 120. Within the viral genome 100, there may be at least one MCS region 170, an enhancer region 150, a promoter region 130, at least one exon region 180, at least one intron region 140, a payload region 110, and a polyadenylation signal sequence region 160. In one embodiment, the payload region may comprise at least one modulatory polynucleotide.

[0260] In one embodiment, the viral genome 100 may comprise the components as shown in FIGS. 7 and 8. Within the viral genome 100, there may be at least one promoter region 130, and a payload region 110. In one embodiment, the payload region may comprise at least one modulatory polynucleotide.

[0261] In one embodiment, the viral genome 100 may comprise the components as shown in FIG. 9. Within the viral genome 100, there may be at least one promoter region 130, a payload region 110, and a polyadenylation signal sequence region 160. In one embodiment, the payload region may comprise at least one modulatory polynucleotide.

### Viral Genome Size

[0262] In one embodiment, the viral genome which comprises a payload described herein, may be single stranded or double stranded viral genome. The size of the viral genome may be small, medium, large or the maximum size. Additionally, the viral genome may comprise a promoter and a polyA tail.

[0263] In one embodiment, the viral genome which comprises a payload described herein, may be a small single stranded viral genome. A small single stranded viral genome may be 2.7 to 3.5 kb in size such as about 2.7, 2.8, 2.9, 3.0, 3.1, 3.2, 3.3, 3.4, and 3.5 kb in size. As a non-limiting example, the small single stranded viral genome may be 3.2 kb in size. Additionally, the viral genome may comprise a promoter and a polyA tail.

[0264] In one embodiment, the viral genome which comprises a payload described herein, may be a small double stranded viral genome. A small double stranded viral genome may be 1.3 to 1.7 kb in size such as about 1.3, 1.4, 1.5, 1.6, and 1.7 kb in size. As a non-limiting example, the small double stranded viral genome may be 1.6 kb in size. Additionally, the viral genome may comprise a promoter and a polyA tail.

[0265] In one embodiment, the viral genome which comprises a payload described herein, may a medium single stranded viral genome. A medium single stranded viral genome may be 3.6 to 4.3 kb in size such as about 3.6, 3.7, 3.8, 3.9, 4.0, 4.1, 4.2 and 4.3 kb in size. As a non-limiting example, the medium single stranded viral genome may be 4.0 kb in size. Additionally, the viral genome may comprise a promoter and a polyA tail.

[0266] In one embodiment, the viral genome which comprises a payload described herein, may be a medium double stranded viral genome. A medium double stranded viral genome may be 1.8 to 2.1 kb in size such as about 1.8, 1.9, 2.0, and 2.1 kb in size. As a non-limiting example, the medium double stranded viral genome may be 2.0 kb in size. Additionally, the viral genome may comprise a promoter and a polyA tail.

[0267] In one embodiment, the viral genome which comprises a payload described herein, may be a large single stranded viral genome. A large single stranded viral genome may be 4.4 to 6.0 kb in size such as about 4.4, 4.5, 4.6, 4.7, 4.8, 4.9, 5.0, 5.1, 5.2, 5.3, 5.4, 5.5, 5.6, 5.7, 5.8, 5.9 and 6.0 kb in size. As a non-limiting example, the large single stranded viral genome may be 4.7 kb in size. As another non-limiting example, the large single stranded viral genome may be 4.8 kb in size. As yet another non-limiting example, the large single stranded viral genome may be 6.0 kb in size. Additionally, the viral genome may comprise a promoter and a polyA tail.

[0268] In one embodiment, the viral genome which comprises a payload described herein, may be a large double stranded viral genome. A large double stranded viral genome may be 2.2 to 3.0 kb in size such as about 2.2, 2.3, 2.4, 2.5, 2.6, 2.7, 2.8, 2.9 and 3.0 kb in size. As a non-limiting example, the large double stranded viral genome may be 2.4 kb in size. Additionally, the viral genome may comprise a promoter and a polyA tail.

### Viral Genome Component: Inverted Terminal Repeats (ITRs)

[0269] The AAV particles of the present invention comprise a viral genome with at least one ITR region and a payload region. In one embodiment the viral genome has two ITRs. These two ITRs flank the payload region at the 5′ and 3′ ends. The ITRs function as origins of replication comprising recognition sites for replication. ITRs comprise sequence regions which can be complementary and symmetrically arranged. ITRs incorporated into viral genomes of the invention may be comprised of naturally occurring polynucleotide sequences or recombinantly derived polynucleotide sequences.

[0270] The ITRs may be derived from the same serotype as the capsid, selected from any of the serotypes listed in Table 1, or a derivative thereof. The ITR may be of a different serotype from the capsid. In one embodiment the AAV particle has more than one ITR. In a non-limiting example, the AAV particle has a viral genome comprising two ITRs. In one embodiment the ITRs are of the same serotype as one another. In another embodiment the ITRs are of different serotypes. Non-limiting examples include zero, one or both of the ITRs having the same serotype as the capsid. In one embodiment both ITRs of the viral genome of the AAV particle are AAV2 ITRs.

[0271] Independently, each ITR may be about 100 to about 150 nucleotides in length. An ITR may be about 100-105 nucleotides in length, 106-110 nucleotides in length, 111-115 nucleotides in length, 116-120 nucleotides in length, 121-125 nucleotides in length, 126-130 nucleotides in length, 131-135 nucleotides in length, 136-140 nucleotides in length, 141-145 nucleotides in length or 146-150 nucleotides in length. In one embodiment the ITRs are 140-142 nucleotides in length. Non limiting examples of ITR length are 102, 140, 141, 142, 145 nucleotides in length, and those having at least 95% identity thereto.

[0272] In one embodiment, the AAV particle comprises a nucleic acid sequence encoding an siRNA molecule which may be located near the 5′ end of the flip ITR in an expression vector. In another embodiment, the AAV particle comprises a nucleic acid sequence encoding an siRNA molecule may be located near the 3′ end of the flip ITR in an expression vector. In yet another embodiment, the AAV particle comprises a nucleic acid sequence encoding an siRNA molecule may be located near the 5′ end of the flop ITR in an expression vector. In yet another embodiment, the AAV particle comprises a nucleic acid sequence encoding an siRNA molecule may be located near the 3′ end of the flop ITR in an expression vector. In one embodiment, the AAV particle comprises a nucleic acid sequence encoding an siRNA molecule may be located between the 5′ end of the flip ITR and the 3′ end of the flop ITR in an expression vector. In one embodiment, the AAV particle comprises a nucleic acid sequence encoding an siRNA molecule may be located between (e.g., half-way between the 5′ end of the flip ITR and 3′ end of the flop ITR or the 3′ end of the flop ITR and the 5′ end of the flip ITR), the 3′ end of the flip ITR and the 5′ end of the flip ITR in an expression vector. As a non-limiting example, the AAV particle comprises a nucleic acid sequence encoding an siRNA molecule may be located within 1, 2, 3, 4, 5, 6, 7, 8, 9, 10, 11, 12, 13, 14, 15, 16, 17, 18, 19, 20, 21, 22, 23, 24, 25, 26, 27, 28, 29, 30 or more than 30 nucleotides downstream from the 5′ or 3′ end of an ITR (e.g., Flip or Flop ITR) in an expression vector. As a non-limiting example, the AAV particle comprises a nucleic acid sequence encoding an siRNA molecule may be located within 1, 2, 3, 4, 5, 6, 7, 8, 9, 10, 11, 12, 13, 14, 15, 16, 17, 18, 19, 20, 21, 22, 23, 24, 25, 26, 27, 28, 29, 30 or more than 30 nucleotides upstream from the 5′ or 3′ end of an ITR (e.g., Flip or Flop ITR) in an expression vector. As another non-limiting example, the AAV particle comprises a nucleic acid sequence encoding an siRNA molecule may be located within 1-5, 1-10, 1-15, 1-20, 1-25, 1-30, 5-10, 5-15, 5-20, 5-25, 5-30, 10-15, 10-20, 10-25, 10-30, 15-20, 15-25, 15-30, 20-25, 20-30 or 25-30 nucleotides downstream from the 5′ or 3′ end of an ITR (e.g., Flip or Flop ITR) in an expression vector. As another non-limiting example, the AAV particle comprises a nucleic acid sequence encoding an siRNA molecule may be located within 1-5, 1-10, 1-15, 1-20, 1-25, 1-30, 5-10, 5-15, 5-20, 5-25, 5-30, 10-15, 10-20, 10-25, 10-30, 15-20, 15-25, 15-30, 20-25, 20-30 or 25-30 upstream from the 5′ or 3′ end of an ITR (e.g., Flip or Flop ITR) in an expression vector. As a non-limiting example, the AAV particle comprises a nucleic acid sequence encoding an siRNA molecule may be located within the first 1%, 2%, 3%, 4%, 5%, 6%, 7%, 8%, 9%, 10%, 15%, 20%, 25% or more than 25% of the nucleotides upstream from the 5′ or 3′ end of an ITR (e.g., Flip or Flop ITR) in an expression vector. As another non-limiting example, the AAV particle comprises a nucleic acid sequence encoding an siRNA molecule may be located with the first 1-5%, 1-10%, 1-15%, 1-20%, 1-25%, 5-10%, 5-15%, 5-20%, 5-25%, 10-15%, 10-20%, 10-25%, 15-20%, 15-25%, or 20-25% downstream from the 5′ or 3′ end of an ITR (e.g., Flip or Flop ITR) in an expression vector.

### Viral Genome Component: Promoters

[0273] In one embodiment, the payload region of the viral genome comprises at least one element to enhance the transgene target specificity and expression (See e.g., Powell et al. Viral Expression Cassette Elements to Enhance Transgene Target Specificity and Expression in Gene Therapy, 2015; the contents of which are herein incorporated by reference in its entirety). Non-limiting examples of elements to enhance the transgene target specificity and expression include promoters, endogenous miRNAs, post-transcriptional regulatory elements (PREs), polyadenylation (PolyA) signal sequences and upstream enhancers (USEs), CMV enhancers and introns.

[0274] A person skilled in the art may recognize that expression of the polypeptides of the invention in a target cell may require a specific promoter, including but not limited to, a promoter that is species specific, inducible, tissue-specific, or cell cycle-specific (Parr et al., Nat. Med. 3:1145-9 (1997); the contents of which are herein incorporated by reference in their entirety).

[0275] In one embodiment, the promoter is deemed to be efficient when it drives expression of the polypeptide(s) encoded in the payload region of the viral genome of the AAV particle.

[0276] In one embodiment, the promoter is a promoter deemed to be efficient to drive the expression of the modulatory polynucleotide.

[0277] In one embodiment, the promoter is a promoter deemed to be efficient when it drives expression in the cell being targeted.

[0278] In one embodiment, the promoter drives expression of the payload for a period of time in targeted tissues. Expression driven by a promoter may be for a period of 1 hour, 2, hours, 3 hours, 4 hours, 5 hours, 6 hours, 7 hours, 8 hours, 9 hours, 10 hours, 11 hours, 12 hours, 13 hours, 14 hours, 15 hours, 16 hours, 17 hours, 18 hours, 19 hours, 20 hours, 21 hours, 22 hours, 23 hours, 1 day, 2 days, 3 days, 4 days, 5 days, 6 days, 1 week, 8 days, 9 days, 10 days, 11 days, 12 days, 13 days, 2 weeks, 15 days, 16 days, 17 days, 18 days, 19 days, 20 days, 3 weeks, 22 days, 23 days, 24 days, 25 days, 26 days, 27 days, 28 days, 29 days, 30 days, 31 days, 1 month, 2 months, 3 months, 4 months, 5 months, 6 months, 7 months, 8 months, 9 months, 10 months, 11 months, 1 year, 13 months, 14 months, 15 months, 16 months, 17 months, 18 months, 19 months, 20 months, 21 months, 22 months, 23 months, 2 years, 3 years, 4 years, 5 years, 6 years, 7 years, 8 years, 9 years, 10 years or more than 10 years. Expression may be for 1-5 hours, 1-12 hours, 1-2 days, 1-5 days, 1-2 weeks, 1-3 weeks, 1-4 weeks, 1-2 months, 1-4 months, 1-6 months, 2-6 months, 3-6 months, 3-9 months, 4-8 months, 6-12 months, 1-2 years, 1-5 years, 2-5 years, 3-6 years, 3-8 years, 4-8 years or 5-10 years.

[0279] In one embodiment, the promoter drives expression of the payload for at least 1 month, 2 months, 3 months, 4 months, 5 months, 6 months, 7 months, 8 months, 9 months, 10 months, 11 months, 1 year, 2 years, 3 years 4 years, 5 years, 6 years, 7 years, 8 years, 9 years, 10 years, 11 years, 12 years, 13 years, 14 years, 15 years, 16 years, 17 years, 18 years, 19 years, 20 years, 21 years, 22 years, 23 years, 24 years, 25 years, 26 years, 27 years, 28 years, 29 years, 30 years, 31 years, 32 years, 33 years, 34 years, 35 years, 36 years, 37 years, 38 years, 39 years, 40 years, 41 years, 42 years, 43 years, 44 years, 45 years, 46 years, 47 years, 48 years, 49 years, 50 years, 55 years, 60 years, 65 years, or more than 65 years.

[0280] Promoters may be naturally occurring or non-naturally occurring. Non-limiting examples of promoters include viral promoters, plant promoters and mammalian promoters. In some embodiments, the promoters may be human promoters. In some embodiments, the promoter may be truncated.

[0281] Promoters which drive or promote expression in most tissues include, but are not limited to, human elongation factor 1α-subunit (EF1α), cytomegalovirus (CMV) immediate-early enhancer and/or promoter, chicken β-actin (CBA) and its derivative CAG, β glucuronidase (GUSB), or ubiquitin C (UBC). Tissue-specific expression elements can be used to restrict expression to certain cell types such as, but not limited to, muscle specific promoters, B cell promoters, monocyte promoters, leukocyte promoters, macrophage promoters, pancreatic acinar cell promoters, endothelial cell promoters, lung tissue promoters, astrocyte promoters, or nervous system promoters which can be used to restrict expression to neurons, astrocytes, or oligodendrocytes.

[0282] Non-limiting examples of muscle-specific promoters include mammalian muscle creatine kinase (MCK) promoter, mammalian desmin (DES) promoter, mammalian troponin I (TNNI2) promoter, and mammalian skeletal alpha-actin (ASKA) promoter (see, e.g. U.S. Patent Publication US 20110212529, the contents of which are herein incorporated by reference in their entirety)

[0283] Non-limiting examples of tissue-specific expression elements for neurons include neuron-specific enolase (NSE), platelet-derived growth factor (PDGF), platelet-derived growth factor B-chain (PDGF-β), synapsin (Syn), methyl-CpG binding protein 2 (MeCP2), Ca²⁺/calmodulin-dependent protein kinase II (CaMKII), metabotropic glutamate receptor 2 (mGluR2), neurofilament light (NFL) or heavy (NFH), β-globin minigene nβ2, preproenkephalin (PPE), enkephalin (Enk) and excitatory amino acid transporter 2 (EAAT2) promoters. Non-limiting examples of tissue-specific expression elements for astrocytes include glial fibrillary acidic protein (GFAP) and EAAT2 promoters. A non-limiting example of a tissue-specific expression element for oligodendrocytes includes the myelin basic protein (MBP) promoter.

[0284] In one embodiment, the promoter may be less than 1 kb. The promoter may have a length of 200, 210, 220, 230, 240, 250, 260, 270, 280, 290, 300, 310, 320, 330, 340, 350, 360, 370, 380, 390, 400, 410, 420, 430, 440, 450, 460, 470, 480, 490, 500, 510, 520, 530, 540, 550, 560, 570, 580, 590, 600, 610, 620, 630, 640, 650, 660, 670, 680, 690, 700, 710, 720, 730, 740, 750, 760, 770, 780, 790, 800 or more than 800 nucleotides. The promoter may have a length between 200-300, 200-400, 200-500, 200-600, 200-700, 200-800, 300-400, 300-500, 300-600, 300-700, 300-800, 400-500, 400-600, 400-700, 400-800, 500-600, 500-700, 500-800, 600-700, 600-800 or 700-800.

[0285] In one embodiment, the promoter may be a combination of two or more components of the same or different starting or parental promoters such as, but not limited to, CMV and CBA. Each component may have a length of 200, 210, 220, 230, 240, 250, 260, 270, 280, 290, 300, 310, 320, 330, 340, 350, 360, 370, 380, 381, 382, 383, 384, 385, 386, 387, 388, 389, 390, 400, 410, 420, 430, 440, 450, 460, 470, 480, 490, 500, 510, 520, 530, 540, 550, 560, 570, 580, 590, 600, 610, 620, 630, 640, 650, 660, 670, 680, 690, 700, 710, 720, 730, 740, 750, 760, 770, 780, 790, 800 or more than 800. Each component may have a length between 200-300, 200-400, 200-500, 200-600, 200-700, 200-800, 300-400, 300-500, 300-600, 300-700, 300-800, 400-500, 400-600, 400-700, 400-800, 500-600, 500-700, 500-800, 600-700, 600-800 or 700-800. In one embodiment, the promoter is a combination of a 382 nucleotide CMV-enhancer sequence and a 260 nucleotide CBA-promoter sequence.

[0286] In one embodiment, the viral genome comprises a ubiquitous promoter. Non-limiting examples of ubiquitous promoters include CMV, CBA (including derivatives CAG, CBh, etc.), EF-1α, PGK, UBC, GUSB (hGBp), and UCOE (promoter of HNRPA2B1-CBX3).

[0287] Yu et al. (Molecular Pain 2011, 7:63; the contents of which are herein incorporated by reference in their entirety) evaluated the expression of eGFP under the CAG, EFIα, PGK and UBC promoters in rat DRG cells and primary DRG cells using lentiviral vectors and found that UBC showed weaker expression than the other 3 promoters and only 10-12% glial expression was seen for all promoters. Soderblom et al. (E. Neuro 2015; the contents of which are herein incorporated by reference in its entirety) evaluated the expression of eGFP in AAV8 with CMV and UBC promoters and AAV2 with the CMV promoter after injection in the motor cortex. Intranasal administration of a plasmid containing a UBC or EFIα promoter showed a sustained airway expression greater than the expression with the CMV promoter (See e.g., Gill et al., Gene Therapy 2001, Vol. 8, 1539-1546; the contents of which are herein incorporated by reference in their entirety). Husain et al. (Gene Therapy 2009; the contents of which are herein incorporated by reference in its entirety) evaluated an HβH construct with a hGUSB promoter, a HSV-1LAT promoter and an NSE promoter and found that the HβH construct showed weaker expression than NSE in mouse brain. Passini and Wolfe (J. Virol. 2001, 12382-12392, the contents of which are herein incorporated by reference in its entirety) evaluated the long term effects of the HβH vector following an intraventricular injection in neonatal mice and found that there was sustained expression for at least 1 year. Low expression in all brain regions was found by Xu et al. (Gene Therapy 2001, 8, 1323-1332; the contents of which are herein incorporated by reference in their entirety) when NFL and NFH promoters were used as compared to the CMV-lacZ, CMV-luc, EF, GFAP, hENK, nAChR, PPE, PPE+wpre, NSE (0.3 kb), NSE (1.8 kb) and NSE (1.8 kb+wpre). Xu et al. found that the promoter activity in descending order was NSE (1.8 kb), EF, NSE (0.3 kb), GFAP, CMV, hENK, PPE, NFL and NFH. NFL is a 650 nucleotide promoter and NFH is a 920 nucleotide promoter which are both absent in the liver but NFH is abundant in the sensory proprioceptive neurons, brain and spinal cord and NFH is present in the heart. Scn8a is a 470 nucleotide promoter which expresses throughout the DRG, spinal cord and brain with particularly high expression seen in the hippocampal neurons and cerebellar Purkinje cells, cortex, thalamus and hypothalamus (See e.g., Drews et al. Identification of evolutionary conserved, functional noncoding elements in the promoter region of the sodium channel gene SCN8A, Mamm Genome (2007) 18:723-731; and Raymond et al. Expression of Alternatively Spliced Sodium Channel α-subunit genes, Journal of Biological Chemistry (2004) 279(44) 46234-46241; the contents of each of which are herein incorporated by reference in their entireties).

[0288] Any of promoters taught by the aforementioned Yu, Soderblom, Gill, Husain, Passini, Xu, Drews or Raymond may be used in the present inventions.

[0289] In one embodiment, the promoter is not cell specific.

[0290] In one embodiment, the promoter is an ubiquitin c (UBC) promoter. The UBC promoter may have a size of 300-350 nucleotides. As a non-limiting example, the UBC promoter is 332 nucleotides.

[0291] In one embodiment, the promoter is a β-glucuronidase (GUSB) promoter. The GUSB promoter may have a size of 350-400 nucleotides. As a non-limiting example, the GUSB promoter is 378 nucleotides.

[0292] In one embodiment, the promoter is a neurofilament light (NFL) promoter. The NFL promoter may have a size of 600-700 nucleotides. As a non-limiting example, the NFL promoter is 650 nucleotides. As a non-limiting example, the construct may be AAV-promoter-CMV/globin intron-modulatory polynucleotide-RBG, where the AAV may be self-complementary and the AAV may be the DJ serotype.

[0293] In one embodiment, the promoter is a neurofilament heavy (NFH) promoter. The NFH promoter may have a size of 900-950 nucleotides. As a non-limiting example, the NFH promoter is 920 nucleotides. As a non-limiting example, the construct may be AAV-promoter-CMV/globin intron-modulatory polynucleotide-RBG, where the AAV may be self-complementary and the AAV may be the DJ serotype.

[0294] In one embodiment, the promoter is a scn8a promoter. The scn8a promoter may have a size of 450-500 nucleotides. As a non-limiting example, the scn8a promoter is 470 nucleotides. As a non-limiting example, the construct may be AAV-promoter-CMV/globin intron-modulatory polynucleotide-RBG, where the AAV may be self-complementary and the AAV may be the DJ serotype

[0295] In one embodiment, the viral genome comprises a Pol III promoter.

[0296] In one embodiment, the viral genome comprises a P1 promoter.

[0297] In one embodiment, the viral genome comprises a FXN promoter.

[0298] In one embodiment, the promoter is a phosphoglycerate kinase 1 (PGK) promoter.

[0299] In one embodiment, the promoter is a chicken β-actin (CBA) promoter.

[0300] In one embodiment, the promoter is a CAG promoter which is a construct comprising the cytomegalovirus (CMV) enhancer fused to the chicken beta-actin (CBA) promoter.

[0301] In one embodiment, the promoter is a cytomegalovirus (CMV) promoter.

[0302] In one embodiment, the viral genome comprises a Pol III promoter, for example, a Pol III type 3 promoter.

[0303] In one embodiment, comprises an U3, U6, U7, 7SK, H1, or MRP, EBER, seleno-cysteine tRNA, 7SL, adenovirus VA-1, or telomerase gene promoter.

[0304] In one embodiment, the viral genome comprises an H1 promoter.

[0305] In one embodiment, the viral genome comprises a U6 promoter.

[0306] In one embodiment, the promoter is a liver or a skeletal muscle promoter. Non-limiting examples of liver promoters include human α-1-antitrypsin (hAAT) and thyroxine binding globulin (TBG). Non-limiting examples of skeletal muscle promoters include Desmin, MCK or synthetic C5-12.

[0307] In one embodiment, the promoter is a RNA pol III promoter. As a non-limiting example, the RNA pol III promoter is U6. As a non-limiting example, the RNA pol III promoter is H1.

[0308] In one embodiment, the promoter is a RNA Pol II promoter, including, for example, a truncated RNA Pol II promoter.

[0309] In one embodiment, the viral genome comprises two promoters. As a non-limiting example, the promoters are an EF1α promoter and a CMV promoter.

[0310] In one embodiment, the viral genome comprises an enhancer element, a promoter and/or a 5′UTR intron. The enhancer element, also referred to herein as an “enhancer,” may be, but is not limited to, a CMV enhancer, the promoter may be, but is not limited to, a CMV, CBA, UBC, GUSB, NSE, Synapsin, MeCP2, and GFAP promoter and the 5′UTR/intron may be, but is not limited to, SV40, and CBA-MVM. As a non-limiting example, the enhancer, promoter and/or intron used in combination may be: (1) CMV enhancer, CMV promoter, SV40 5′UTR intron; (2) CMV enhancer, CBA promoter, SV 40 5′UTR intron; (3) CMV enhancer, CBA promoter, CBA-MVM 5′UTR intron; (4) UBC promoter; (5) GUSB promoter; (6) NSE promoter; (7) Synapsin promoter; (8) MeCP2 promoter, (9) GFAP promoter, (10) H1 promoter; and (11) U6 promoter.

[0311] In one embodiment, the viral genome comprises an engineered promoter.

[0312] In another embodiment the viral genome comprises a promoter from a naturally expressed protein.

### Viral Genome Component: Untranslated Regions (UTRs)

[0313] By definition, wild type untranslated regions (UTRs) of a gene are transcribed but not translated. Generally, the 5′ UTR starts at the transcription start site and ends at the start codon and the 3′ UTR starts immediately following the stop codon and continues until the termination signal for transcription.

[0314] Features typically found in abundantly expressed genes of specific target organs may be engineered into UTRs to enhance the stability and protein production. As a non-limiting example, a 5′ UTR from mRNA normally expressed in the liver (e.g., albumin, serum amyloid A, Apolipoprotein A/B/E, transferrin, alpha fetoprotein, erythropoietin, or Factor VIII) may be used in the viral genomes of the AAV particles of the invention to enhance expression in hepatic cell lines or liver.

[0315] While not wishing to be bound by theory, wild-type 5′ untranslated regions (UTRs) include features which play roles in translation initiation. Kozak sequences, which are commonly known to be involved in the process by which the ribosome initiates translation of many genes, are usually included in 5′ UTRs. Kozak sequences have the consensus CCR(A/G)CCAUGG, where R is a purine (adenine or guanine) three bases upstream of the start codon (ATG), which is followed by another ‘G’.

[0316] In one embodiment, the 5′UTR in the viral genome includes a Kozak sequence.

[0317] In one embodiment, the 5′UTR in the viral genome does not include a Kozak sequence.

[0318] While not wishing to be bound by theory, wild-type 3′ UTRs are known to have stretches of Adenosines and Uridines embedded therein. These AU rich signatures are particularly prevalent in genes with high rates of turnover. Based on their sequence features and functional properties, the AU rich elements (AREs) can be separated into three classes (Chen et al, 1995, the contents of which are herein incorporated by reference in its entirety): Class I AREs, such as, but not limited to, c-Myc and MyoD, contain several dispersed copies of an AUUUA motif within U-rich regions. Class II AREs, such as, but not limited to, GM-CSF and TNF-α, possess two or more overlapping UUAUUUA(U/A)(U/A) nonamers. Class III ARES, such as, but not limited to, c-Jun and Myogenin, are less well defined. These U rich regions do not contain an AUUUA motif. Most proteins binding to the AREs are known to destabilize the messenger, whereas members of the ELAV family, most notably HuR, have been documented to increase the stability of mRNA. HuR binds to AREs of all the three classes. Engineering the HuR specific binding sites into the 3′ UTR of nucleic acid molecules will lead to HuR binding and thus, stabilization of the message in vivo.

[0319] Introduction, removal or modification of 3′ UTR AU rich elements (AREs) can be used to modulate the stability of polynucleotides. When engineering specific polynucleotides, e.g., payload regions of viral genomes, one or more copies of an ARE can be introduced to make polynucleotides less stable and thereby curtail translation and decrease production of the resultant protein. Likewise, AREs can be identified and removed or mutated to increase the intracellular stability and thus increase translation and production of the resultant protein.

[0320] In one embodiment, the 3′ UTR of the viral genome may include an oligo(dT) sequence for templated addition of a poly-A tail.

[0321] In one embodiment, the viral genome may include at least one miRNA seed, binding site or full sequence. microRNAs (or miRNA or miR) are 19-25 nucleotide noncoding RNAs that bind to the sites of nucleic acid targets and down-regulate gene expression either by reducing nucleic acid molecule stability or by inhibiting translation. A microRNA sequence comprises a “seed” region, i.e., a sequence in the region of positions 2-8 of the mature microRNA, which sequence has perfect Watson-Crick complementarity to the miRNA target sequence of the nucleic acid.

[0322] In one embodiment, the viral genome may be engineered to include, alter or remove at least one miRNA binding site, sequence or seed region.

[0323] Any UTR from any gene known in the art may be incorporated into the viral genome of the AAV particle. These UTRs, or portions thereof, may be placed in the same orientation as in the gene from which they were selected or they may be altered in orientation or location. In one embodiment, the UTR used in the viral genome of the AAV particle may be inverted, shortened, lengthened, made with one or more other 5′ UTRs or 3′ UTRs known in the art. As used herein, the term “altered” as it relates to a UTR, means that the UTR has been changed in some way in relation to a reference sequence. For example, a 3′ or 5′ UTR may be altered relative to a wild type or native UTR by the change in orientation or location as taught above or may be altered by the inclusion of additional nucleotides, deletion of nucleotides, swapping or transposition of nucleotides.

[0324] In one embodiment, the viral genome of the AAV particle comprises at least one artificial UTRs which is not a variant of a wild type UTR.

[0325] In one embodiment, the viral genome of the AAV particle comprises UTRs which have been selected from a family of transcripts whose proteins share a common function, structure, feature or property.

### Viral Genome Component: Polyadenylation Sequence

[0326] In one embodiment, the viral genome of the AAV particles of the present invention comprise at least one polyadenylation sequence. The viral genome of the AAV particle may comprise a polyadenylation sequence between the 3′ end of the payload coding sequence and the 5′ end of the 3′ITR.

[0327] In one embodiment, the polyadenylation sequence or “polyA sequence” may range from absent to about 500 nucleotides in length. The polyadenylation sequence may be, but is not limited to, 1, 2, 3, 4, 5, 6, 7, 8, 9, 10, 11, 12, 13, 14, 15, 16, 17, 18, 19, 20, 21, 22, 23, 24, 25, 26, 27, 28, 29, 30, 31, 32, 33, 34, 35, 36, 37, 38, 39, 40, 41, 42, 43, 44, 45, 46, 47, 48, 49, 50, 51, 52, 53, 54, 55, 56, 57, 58, 59, 60, 61, 62, 63, 64, 65, 66, 67, 68, 69, 70, 71, 72, 73, 74, 75, 76, 77, 78, 79, 80, 81, 82, 83, 84, 85, 86, 87, 88, 89, 90, 91, 92, 93, 94, 95, 96, 97, 98, 99, 100, 101, 102, 103, 104, 105, 106, 107, 108, 109, 110, 111, 112, 113, 114, 115, 116, 117, 118, 119, 120, 121, 122, 123, 124, 125, 126, 127, 128, 129, 130, 131, 132, 133, 134, 135, 136, 137, 138, 139, 140, 141, 142, 143, 144, 145, 146, 147, 148, 149, 150, 151, 152, 153, 154, 155, 156, 157, 158, 159, 160, 161, 162, 163, 164, 165, 166, 167, 168, 169, 170, 171, 172, 173, 174, 175, 176, 177, 178, 179, 180, 181, 182, 183, 184, 185, 186, 187, 188, 189, 190, 191, 192, 193, 194, 195, 196, 197, 198, 199, 200, 201, 202, 203, 204, 205, 206, 207, 208, 209, 210, 211, 212, 213, 214, 215, 216, 217, 218, 219, 220, 221, 222, 223, 224, 225, 226, 227, 228, 229, 230, 231, 232, 233, 234, 235, 236, 237, 238, 239, 240, 241, 242, 243, 244, 245, 246, 247, 248, 249, 250, 251, 252, 253, 254, 255, 256, 257, 258, 259, 260, 261, 262, 263, 264, 265, 266, 267, 268, 269, 270, 271, 272, 273, 274, 275, 276, 277, 278, 279, 280, 281, 282, 283, 284, 285, 286, 287, 288, 289, 290, 291, 292, 293, 294, 295, 296, 297, 298, 299, 300, 301, 302, 303, 304, 305, 306, 307, 308, 309, 310, 311, 312, 313, 314, 315, 316, 317, 318, 319, 320, 321, 322, 323, 324, 325, 326, 327, 328, 329, 330, 331, 332, 333, 334, 335, 336, 337, 338, 339, 340, 341, 342, 343, 344, 345, 346, 347, 348, 349, 350, 351, 352, 353, 354, 355, 356, 357, 358, 359, 360, 361, 362, 363, 364, 365, 366, 367, 368, 369, 370, 371, 372, 373, 374, 375, 376, 377, 378, 379, 380, 381, 382, 383, 384, 385, 386, 387, 388, 389, 390, 391, 392, 393, 394, 395, 396, 397, 398, 399, 400, 401, 402, 403, 404, 405, 406, 407, 408, 409, 410, 411, 412, 413, 414, 415, 416, 417, 418, 419, 420, 421, 422, 423, 424, 425, 426, 427, 428, 429, 430, 431, 432, 433, 434, 435, 436, 437, 438, 439, 440, 441, 442, 443, 444, 445, 446, 447, 448, 449, 450, 451, 452, 453, 454, 455, 456, 457, 458, 459, 460, 461, 462, 463, 464, 465, 466, 467, 468, 469, 470, 471, 472, 473, 474, 475, 476, 477, 478, 479, 480, 481, 482, 483, 484, 485, 486, 487, 488, 489, 490, 491, 492, 493, 494, 495, 496, 497, 498, 499, and 500 nucleotides in length.

[0328] In one embodiment, the polyadenylation sequence is 50-100 nucleotides in length.

[0329] In one embodiment, the polyadenylation sequence is 50-150 nucleotides in length.

[0330] In one embodiment, the polyadenylation sequence is 50-160 nucleotides in length.

[0331] In one embodiment, the polyadenylation sequence is 50-200 nucleotides in length.

[0332] In one embodiment, the polyadenylation sequence is 60-100 nucleotides in length.

[0333] In one embodiment, the polyadenylation sequence is 60-150 nucleotides in length.

[0334] In one embodiment, the polyadenylation sequence is 60-160 nucleotides in length.

[0335] In one embodiment, the polyadenylation sequence is 60-200 nucleotides in length.

[0336] In one embodiment, the polyadenylation sequence is 70-100 nucleotides in length.

[0337] In one embodiment, the polyadenylation sequence is 70-150 nucleotides in length.

[0338] In one embodiment, the polyadenylation sequence is 70-160 nucleotides in length.

[0339] In one embodiment, the polyadenylation sequence is 70-200 nucleotides in length.

[0340] In one embodiment, the polyadenylation sequence is 80-100 nucleotides in length.

[0341] In one embodiment, the polyadenylation sequence is 80-150 nucleotides in length.

[0342] In one embodiment, the polyadenylation sequence is 80-160 nucleotides in length.

[0343] In one embodiment, the polyadenylation sequence is 80-200 nucleotides in length.

[0344] In one embodiment, the polyadenylation sequence is 90-100 nucleotides in length.

[0345] In one embodiment, the polyadenylation sequence is 90-150 nucleotides in length.

[0346] In one embodiment, the polyadenylation sequence is 90-160 nucleotides in length.

[0347] In one embodiment, the polyadenylation sequence is 90-200 nucleotides in length.

[0348] In one embodiment, the AAV particle comprises a nucleic acid sequence encoding an siRNA molecule may be located upstream of the polyadenylation sequence in an expression vector. Further, the AAV particle comprises a nucleic acid sequence encoding an siRNA molecule may be located downstream of a promoter such as, but not limited to, CMV, U6, CAG, CBA or a CBA promoter with a SV40 intron or a human betaglobin intron in an expression vector. As a non-limiting example, the AAV particle comprises a nucleic acid sequence encoding an siRNA molecule may be located within 1, 2, 3, 4, 5, 6, 7, 8, 9, 10, 11, 12, 13, 14, 15, 16, 17, 18, 19, 20, 21, 22, 23, 24, 25, 26, 27, 28, 29, 30 or more than 30 nucleotides downstream from the promoter and/or upstream of the polyadenylation sequence in an expression vector. As another non-limiting example, the AAV particle comprises a nucleic acid sequence encoding an siRNA molecule may be located within 1-5, 1-10, 1-15, 1-20, 1-25, 1-30, 5-10, 5-15, 5-20, 5-25, 5-30, 10-15, 10-20, 10-25, 10-30, 15-20, 15-25, 15-30, 20-25, 20-30 or 25-30 nucleotides downstream from the promoter and/or upstream of the polyadenylation sequence in an expression vector. As a non-limiting example, the AAV particle comprises a nucleic acid sequence encoding an siRNA molecule may be located within the first 1%, 2%, 3%, 4%, 5%, 6%, 7%, 8%, 9%, 10%, 15%, 20%, 25% or more than 25% of the nucleotides downstream from the promoter and/or upstream of the polyadenylation sequence in an expression vector. As another non-limiting example, the AAV particle comprises a nucleic acid sequence encoding an siRNA molecule may be located with the first 1-5%, 1-10%, 1-15%, 1-20%, 1-25%, 5-10%, 5-15%, 5-20%, 5-25%, 10-15%, 10-20%, 10-25%, 15-20%, 15-25%, or 20-25% downstream from the promoter and/or upstream of the polyadenylation sequence in an expression vector.

[0349] In one embodiment, the AAV particle comprises a rabbit globin polyadenylation (polyA) signal sequence.

[0350] In one embodiment, the AAV particle comprises a human growth hormone polyadenylation (polyA) signal sequence.

### Viral Genome Component: Introns

[0351] In one embodiment, the payload region comprises at least one element to enhance the expression such as one or more introns or portions thereof. Non-limiting examples of introns include, MVM (67-97 bps), F.IX truncated intron 1 (300 bps), β-globin SD/immunoglobulin heavy chain splice acceptor (250 bps), adenovirus splice donor/immunoglobin splice acceptor (500 bps), SV40 late splice donor/splice acceptor (19S/16S) (180 bps) and hybrid adenovirus splice donor/IgG splice acceptor (230 bps).

[0352] In one embodiment, the intron or intron portion may be 100-500 nucleotides in length. The intron may have a length of 80, 90, 100, 110, 120, 130, 140, 150, 160, 170, 171, 172, 173, 174, 175, 176, 177, 178, 179, 180, 190, 200, 210, 220, 230, 240, 250, 260, 270, 280, 290, 300, 310, 320, 330, 340, 350, 360, 370, 380, 390, 400, 410, 420, 430, 440, 450, 460, 470, 480, 490 or 500. The intron may have a length between 80-100, 80-120, 80-140, 80-160, 80-180, 80-200, 80-250, 80-300, 80-350, 80-400, 80-450, 80-500, 200-300, 200-400, 200-500, 300-400, 300-500, or 400-500.

[0353] In one embodiment, the AAV viral genome may comprise a promoter such as, but not limited to, CMV or U6. As a non-limiting example, the promoter for the AAV comprising the nucleic acid sequence for the siRNA molecules of the present invention is a CMV promoter. As another non-limiting example, the promoter for the AAV comprising the nucleic acid sequence for the siRNA molecules of the present invention is a U6 promoter.

[0354] In one embodiment, the AAV viral genome may comprise a CMV promoter.

[0355] In one embodiment, the AAV viral genome may comprise a U6 promoter.

[0356] In one embodiment, the AAV viral genome may comprise a CMV and a U6 promoter.

[0357] In one embodiment, the AAV viral genome may comprise a Pol III promoter.

[0358] In one embodiment, the AAV viral genome may comprise a Pol III type 3 promoter.

[0359] In one embodiment, the AAV viral genome may comprise a H1 promoter.

[0360] In one embodiment, the AAV viral genome may comprise a U6 promoter.

[0361] In one embodiment, the AAV viral genome may comprise a CBA promoter.

[0362] In one embodiment, the encoded siRNA molecule may be located downstream of a promoter in an expression vector such as, but not limited to, CMV, U6, H1, CBA, CAG, or a CBA promoter with an intron such as SV40 or others known in the art. Further, the encoded siRNA molecule may also be located upstream of the polyadenylation sequence in an expression vector. As a non-limiting example, the encoded siRNA molecule may be located within 1, 2, 3, 4, 5, 6, 7, 8, 9, 10, 11, 12, 13, 14, 15, 16, 17, 18, 19, 20, 21, 22, 23, 24, 25, 26, 27, 28, 29, 30 or more than 30 nucleotides downstream from the promoter and/or upstream of the polyadenylation sequence in an expression vector. As another non-limiting example, the encoded siRNA molecule may be located within 1-5, 1-10, 1-15, 1-20, 1-25, 1-30, 5-10, 5-15, 5-20, 5-25, 5-30, 10-15, 10-20, 10-25, 10-30, 15-20, 15-25, 15-30, 20-25, 20-30 or 25-30 nucleotides downstream from the promoter and/or upstream of the polyadenylation sequence in an expression vector. As a non-limiting example, the encoded siRNA molecule may be located within the first 1%, 2%, 3%, 4%, 5%, 6%, 7%, 8%, 9%, 10%, 15%, 20%, 25% or more than 25% of the nucleotides downstream from the promoter and/or upstream of the polyadenylation sequence in an expression vector. As another non-limiting example, the encoded siRNA molecule may be located with the first 1-5%, 1-10%, 1-15%, 1-20%, 1-25%, 5-10%, 5-15%, 5-20%, 5-25%, 10-15%, 10-20%, 10-25%, 15-20%, 15-25%, or 20-25% downstream from the promoter and/or upstream of the polyadenylation sequence in an expression vector.

### Viral Genome Component: Filler Sequence

[0363] In one embodiment, the viral genome comprises one or more filler sequences.

[0364] In one embodiment, the viral genome comprises one or more filler sequences in order to have the length of the viral genome be the optimal size for packaging. As a non-limiting example, the viral genome comprises at least one filler sequence in order to have the length of the viral genome be about 2.3 kb. As a non-limiting example, the viral genome comprises at least one filler sequence in order to have the length of the viral genome be about 4.6 kb.

[0365] In one embodiment, the viral genome comprises one or more filler sequences in order to reduce the likelihood that a hairpin structure of the vector genome (e.g., a modulatory polynucleotide described herein) may be read as an inverted terminal repeat (ITR) during expression and/or packaging. As a non-limiting example, the viral genome comprises at least one filler sequence in order to have the length of the viral genome be about 2.3 kb. As a non-limiting example, the viral genome comprises at least one filler sequence in order to have the length of the viral genome be about 4.6 kb

[0366] In one embodiment, the viral genome is a single stranded (ss) viral genome and comprises one or more filler sequences which have a length about between 0.1 kb-3.8 kb, such as, but not limited to, 0.1 kb, 0.2 kb, 0.3 kb, 0.4 kb, 0.5 kb, 0.6 kb, 0.7 kb, 0.8 kb, 0.9 kb, 1 kb, 1.1 kb, 1.2 kb, 1.3 kb, 1.4 kb, 1.5 kb, 1.6 kb, 1.7 kb, 1.8 kb, 1.9 kb, 2 kb, 2.1 kb, 2.2 kb, 2.3 kb, 2.4 kb, 2.5 kb, 2.6 kb, 2.7 kb, 2.8 kb, 2.9 kb, 3 kb, 3.1 kb, 3.2 kb, 3.3 kb, 3.4 kb, 3.5 kb, 3.6 kb, 3.7 kb, or 3.8 kb. As a non-limiting example, the total length filler sequence in the vector genome is 3.1 kb. As a non-limiting example, the total length filler sequence in the vector genome is 2.7 kb. As a non-limiting example, the total length filler sequence in the vector genome is 0.8 kb. As a non-limiting example, the total length filler sequence in the vector genome is 0.4 kb. As a non-limiting example, the length of each filler sequence in the vector genome is 0.8 kb. As a non-limiting example, the length of each filler sequence in the vector genome is 0.4 kb.

[0367] In one embodiment, the viral genome is a self-complementary (sc) viral genome and comprises one or more filler sequences which have a length about between 0.1 kb-1.5 kb, such as, but not limited to, 0.1 kb, 0.2 kb, 0.3 kb, 0.4 kb, 0.5 kb, 0.6 kb, 0.7 kb, 0.8 kb, 0.9 kb, 1 kb, 1.1 kb, 1.2 kb, 1.3 kb, 1.4 kb, or 1.5 kb. As a non-limiting example, the total length filler sequence in the vector genome is 0.8 kb. As a non-limiting example, the total length filler sequence in the vector genome is 0.4 kb. As a non-limiting example, the length of each filler sequence in the vector genome is 0.8 kb. As a non-limiting example, the length of each filler sequence in the vector genome is 0.4 kb

[0368] In one embodiment, the viral genome comprises any portion of a filler sequence. The viral genome may comprise 1%, 2%, 3%, 4%, 5%, 6%, 7%, 8%, 9%, 10%, 15%, 20%, 25%, 30%, 35%, 40%, 45%, 50%, 55%, 60%, 65%, 70%, 75%, 80%, 85%, 90%, 95%, or 99% of a filler sequence.

[0369] In one embodiment, the viral genome is a single stranded (ss) viral genome and comprises one or more filler sequences in order to have the length of the viral genome be about 4.6 kb. As a non-limiting example, the viral genome comprises at least one filler sequence and the filler sequence is located 3′ to the 5′ ITR sequence. As a non-limiting example, the viral genome comprises at least one filler sequence and the filler sequence is located 5′ to a promoter sequence. As a non-limiting example, the viral genome comprises at least one filler sequence and the filler sequence is located 3′ to the polyadenylation signal sequence. As a non-limiting example, the viral genome comprises at least one filler sequence and the filler sequence is located 5′ to the 3′ ITR sequence. As a non-limiting example, the viral genome comprises at least one filler sequence, and the filler sequence is located between two intron sequences. As a non-limiting example, the viral genome comprises at least one filler sequence, and the filler sequence is located within an intron sequence. As a non-limiting example, the viral genome comprises two filler sequences, and the first filler sequence is located 3′ to the 5′ ITR sequence and the second filler sequence is located 3′ to the polyadenylation signal sequence. As a non-limiting example, the viral genome comprises two filler sequences, and the first filler sequence is located 5′ to a promoter sequence and the second filler sequence is located 3′ to the polyadenylation signal sequence. As a non-limiting example, the viral genome comprises two filler sequences, and the first filler sequence is located 3′ to the 5′ ITR sequence and the second filler sequence is located 5′ to the 5′ ITR sequence.

[0370] In one embodiment, the viral genome is a self-complementary (sc) viral genome and comprises one or more filler sequences in order to have the length of the viral genome be about 2.3 kb. As a non-limiting example, the viral genome comprises at least one filler sequence and the filler sequence is located 3′ to the 5′ ITR sequence. As a non-limiting example, the viral genome comprises at least one filler sequence and the filler sequence is located 5′ to a promoter sequence. As a non-limiting example, the viral genome comprises at least one filler sequence and the filler sequence is located 3′ to the polyadenylation signal sequence. As a non-limiting example, the viral genome comprises at least one filler sequence and the filler sequence is located 5′ to the 3′ ITR sequence. As a non-limiting example, the viral genome comprises at least one filler sequence, and the filler sequence is located between two intron sequences. As a non-limiting example, the viral genome comprises at least one filler sequence, and the filler sequence is located within an intron sequence. As a non-limiting example, the viral genome comprises two filler sequences, and the first filler sequence is located 3′ to the 5′ ITR sequence and the second filler sequence is located 3′ to the polyadenylation signal sequence. As a non-limiting example, the viral genome comprises two filler sequences, and the first filler sequence is located 5′ to a promoter sequence and the second filler sequence is located 3′ to the polyadenylation signal sequence. As a non-limiting example, the viral genome comprises two filler sequences, and the first filler sequence is located 3′ to the 5′ ITR sequence and the second filler sequence is located 5′ to the 5′ ITR sequence.

[0371] In one embodiment, the viral genome may comprise one or more filler sequences between one of more regions of the viral genome. In one embodiment, the filler region may be located before a region such as, but not limited to, a payload region, an inverted terminal repeat (ITR), a promoter region, an intron region, an enhancer region, a polyadenylation signal sequence region, a multiple cloning site (MCS) region, and/or an exon region. In one embodiment, the filler region may be located after a region such as, but not limited to, a payload region, an inverted terminal repeat (ITR), a promoter region, an intron region, an enhancer region, a polyadenylation signal sequence region, a multiple cloning site (MCS) region, and/or an exon region. In one embodiment, the filler region may be located before and after a region such as, but not limited to, a payload region, an inverted terminal repeat (ITR), a promoter region, an intron region, an enhancer region, a polyadenylation signal sequence region, a multiple cloning site (MCS) region, and/or an exon region.

[0372] In one embodiment, the viral genome may comprise one or more filler sequences which bifurcates at least one region of the viral genome. The bifurcated region of the viral genome may comprise 1%, 2%, 3%, 4%, 5%, 6%, 7%, 8%, 9%, 10%, 15%, 20%, 25%, 30%, 35%, 40%, 45%, 50%, 55%, 60%, 65%, 70%, 75%, 80%, 85%, 90%, 95%, or 99% of the of the region to the 5′ of the filler sequence region. As a non-limiting example, the filler sequence may bifurcate at least one region so that 10% of the region is located 5′ to the filler sequence and 90% of the region is located 3′ to the filler sequence. As a non-limiting example, the filler sequence may bifurcate at least one region so that 20% of the region is located 5′ to the filler sequence and 80% of the region is located 3′ to the filler sequence. As a non-limiting example, the filler sequence may bifurcate at least one region so that 30% of the region is located 5′ to the filler sequence and 70% of the region is located 3′ to the filler sequence. As a non-limiting example, the filler sequence may bifurcate at least one region so that 40% of the region is located 5′ to the filler sequence and 60% of the region is located 3′ to the filler sequence. As a non-limiting example, the filler sequence may bifurcate at least one region so that 50% of the region is located 5′ to the filler sequence and 50% of the region is located 3′ to the filler sequence. As a non-limiting example, the filler sequence may bifurcate at least one region so that 60% of the region is located 5′ to the filler sequence and 40% of the region is located 3′ to the filler sequence. As a non-limiting example, the filler sequence may bifurcate at least one region so that 70% of the region is located 5′ to the filler sequence and 30% of the region is located 3′ to the filler sequence. As a non-limiting example, the filler sequence may bifurcate at least one region so that 80% of the region is located 5′ to the filler sequence and 20% of the region is located 3′ to the filler sequence. As a non-limiting example, the filler sequence may bifurcate at least one region so that 90% of the region is located 5′ to the filler sequence and 10% of the region is located 3′ to the filler sequence.

[0373] In one embodiment, the viral genome comprises a filler sequence after the 5′ ITR.

[0374] In one embodiment, the viral genome comprises a filler sequence after the promoter region. In one embodiment, the viral genome comprises a filler sequence after the payload region. In one embodiment, the viral genome comprises a filler sequence after the intron region. In one embodiment, the viral genome comprises a filler sequence after the enhancer region. In one embodiment, the viral genome comprises a filler sequence after the polyadenylation signal sequence region. In one embodiment, the viral genome comprises a filler sequence after the MCS region. In one embodiment, the viral genome comprises a filler sequence after the exon region.

[0375] In one embodiment, the viral genome comprises a filler sequence before the promoter region. In one embodiment, the viral genome comprises a filler sequence before the payload region. In one embodiment, the viral genome comprises a filler sequence before the intron region. In one embodiment, the viral genome comprises a filler sequence before the enhancer region. In one embodiment, the viral genome comprises a filler sequence before the polyadenylation signal sequence region. In one embodiment, the viral genome comprises a filler sequence before the MCS region. In one embodiment, the viral genome comprises a filler sequence before the exon region.

[0376] In one embodiment, the viral genome comprises a filler sequence before the 3′ ITR.

[0377] In one embodiment, a filler sequence may be located between two regions, such as, but not limited to, the 5′ ITR and the promoter region. In one embodiment, a filler sequence may be located between two regions, such as, but not limited to, the 5′ ITR and the payload region. In one embodiment, a filler sequence may be located between two regions, such as, but not limited to, the 5′ ITR and the intron region. In one embodiment, a filler sequence may be located between two regions, such as, but not limited to, the 5′ ITR and the enhancer region. In one embodiment, a filler sequence may be located between two regions, such as, but not limited to, the 5′ ITR and the polyadenylation signal sequence region. In one embodiment, a filler sequence may be located between two regions, such as, but not limited to, the 5′ ITR and the MCS region.

[0378] In one embodiment, a filler sequence may be located between two regions, such as, but not limited to, the 5′ ITR and the exon region.

[0379] In one embodiment, a filler sequence may be located between two regions, such as, but not limited to, the promoter region and the payload region. In one embodiment, a filler sequence may be located between two regions, such as, but not limited to, the promoter region and the intron region. In one embodiment, a filler sequence may be located between two regions, such as, but not limited to, the promoter region and the enhancer region. In one embodiment, a filler sequence may be located between two regions, such as, but not limited to, the promoter region and the polyadenylation signal sequence region. In one embodiment, a filler sequence may be located between two regions, such as, but not limited to, the promoter region and the MCS region. In one embodiment, a filler sequence may be located between two regions, such as, but not limited to, the promoter region and the exon region. In one embodiment, a filler sequence may be located between two regions, such as, but not limited to, the promoter region and the 3′ ITR.

[0380] In one embodiment, a filler sequence may be located between two regions, such as, but not limited to, the payload region and the intron region. In one embodiment, a filler sequence may be located between two regions, such as, but not limited to, the payload region and the enhancer region. In one embodiment, a filler sequence may be located between two regions, such as, but not limited to, the payload region and the polyadenylation signal sequence region. In one embodiment, a filler sequence may be located between two regions, such as, but not limited to, the payload region and the MCS region. In one embodiment, a filler sequence may be located between two regions, such as, but not limited to, the payload region and the exon region.

[0381] In one embodiment, a filler sequence may be located between two regions, such as, but not limited to, the payload region and the 3′ ITR.

[0382] In one embodiment, a filler sequence may be located between two regions, such as, but not limited to, the intron region and the enhancer region. In one embodiment, a filler sequence may be located between two regions, such as, but not limited to, the intron region and the polyadenylation signal sequence region. In one embodiment, a filler sequence may be located between two regions, such as, but not limited to, the intron region and the MCS region. In one embodiment, a filler sequence may be located between two regions, such as, but not limited to, the intron region and the exon region. In one embodiment, a filler sequence may be located between two regions, such as, but not limited to, the intron region and the 3′ ITR. In one embodiment, a filler sequence may be located between two regions, such as, but not limited to, the enhancer region and the polyadenylation signal sequence region. In one embodiment, a filler sequence may be located between two regions, such as, but not limited to, the enhancer region and the MCS region. In one embodiment, a filler sequence may be located between two regions, such as, but not limited to, the enhancer region and the exon region. In one embodiment, a filler sequence may be located between two regions, such as, but not limited to, the enhancer region and the 3′ ITR.

[0383] In one embodiment, a filler sequence may be located between two regions, such as, but not limited to, the polyadenylation signal sequence region and the MCS region. In one embodiment, a filler sequence may be located between two regions, such as, but not limited to, the polyadenylation signal sequence region and the exon region. In one embodiment, a filler sequence may be located between two regions, such as, but not limited to, the polyadenylation signal sequence region and the 3′ ITR.

[0384] In one embodiment, a filler sequence may be located between two regions, such as, but not limited to, the MCS region and the exon region. In one embodiment, a filler sequence may be located between two regions, such as, but not limited to, the MCS region and the 3′ ITR.

[0385] In one embodiment, a filler sequence may be located between two regions, such as, but not limited to, the exon region and the 3′ ITR.

[0386] In one embodiment, a viral genome may comprise two filler sequences, the first filler sequence may be located between the 5′ ITR and promoter region, and the second filler sequence may be located between the promoter region and payload region. In one embodiment, a viral genome may comprise two filler sequences, the first filler sequence may be located between the 5′ ITR and promoter region, and the second filler sequence may be located between the promoter region and intron region. In one embodiment, a viral genome may comprise two filler sequences, the first filler sequence may be located between the 5′ ITR and promoter region, and the second filler sequence may be located between the promoter region and enhancer region. In one embodiment, a viral genome may comprise two filler sequences, the first filler sequence may be located between the 5′ ITR and promoter region, and the second filler sequence may be located between the promoter region and polyadenylation signal sequence region. In one embodiment, a viral genome may comprise two filler sequences, the first filler sequence may be located between the 5′ ITR and promoter region, and the second filler sequence may be located between the promoter region and MCS region. In one embodiment, a viral genome may comprise two filler sequences, the first filler sequence may be located between the 5′ ITR and promoter region, and the second filler sequence may be located between the promoter region and exon region. In one embodiment, a viral genome may comprise two filler sequences, the first filler sequence may be located between the 5′ ITR and promoter region, and the second filler sequence may be located between the promoter region and 3′ ITR. In one embodiment, a viral genome may comprise two filler sequences, the first filler sequence may be located between the 5′ ITR and promoter region, and the second filler sequence may be located between the payload region and intron region. In one embodiment, a viral genome may comprise two filler sequences, the first filler sequence may be located between the 5′ ITR and promoter region, and the second filler sequence may be located between the payload region and enhancer region. In one embodiment, a viral genome may comprise two filler sequences, the first filler sequence may be located between the 5′ ITR and promoter region, and the second filler sequence may be located between the payload region and polyadenylation signal sequence region. In one embodiment, a viral genome may comprise two filler sequences, the first filler sequence may be located between the 5′ ITR and promoter region, and the second filler sequence may be located between the payload region and MCS region. In one embodiment, a viral genome may comprise two filler sequences, the first filler sequence may be located between the 5′ ITR and promoter region, and the second filler sequence may be located between the payload region and exon region. In one embodiment, a viral genome may comprise two filler sequences, the first filler sequence may be located between the 5′ ITR and promoter region, and the second filler sequence may be located between the payload region and 3′ ITR. In one embodiment, a viral genome may comprise two filler sequences, the first filler sequence may be located between the 5′ ITR and promoter region, and the second filler sequence may be located between the intron region and enhancer region. In one embodiment, a viral genome may comprise two filler sequences, the first filler sequence may be located between the 5′ ITR and promoter region, and the second filler sequence may be located between the intron region and polyadenylation signal sequence region. In one embodiment, a viral genome may comprise two filler sequences, the first filler sequence may be located between the 5′ ITR and promoter region, and the second filler sequence may be located between the intron region and MCS region. In one embodiment, a viral genome may comprise two filler sequences, the first filler sequence may be located between the 5′ ITR and promoter region, and the second filler sequence may be located between the intron region and exon region. In one embodiment, a viral genome may comprise two filler sequences, the first filler sequence may be located between the 5′ ITR and promoter region, and the second filler sequence may be located between the intron region and 3′ ITR. In one embodiment, a viral genome may comprise two filler sequences, the first filler sequence may be located between the 5′ ITR and promoter region, and the second filler sequence may be located between the enhancer region and polyadenylation signal sequence region. In one embodiment, a viral genome may comprise two filler sequences, the first filler sequence may be located between the 5′ ITR and promoter region, and the second filler sequence may be located between the enhancer region and MCS region. In one embodiment, a viral genome may comprise two filler sequences, the first filler sequence may be located between the 5′ ITR and promoter region, and the second filler sequence may be located between the enhancer region and exon region. In one embodiment, a viral genome may comprise two filler sequences, the first filler sequence may be located between the 5′ ITR and promoter region, and the second filler sequence may be located between the enhancer region and 3′ ITR. In one embodiment, a viral genome may comprise two filler sequences, the first filler sequence may be located between the 5′ ITR and promoter region, and the second filler sequence may be located between the polyadenylation signal sequence region and MCS region. In one embodiment, a viral genome may comprise two filler sequences, the first filler sequence may be located between the 5′ ITR and promoter region, and the second filler sequence may be located between the polyadenylation signal sequence region and exon region. In one embodiment, a viral genome may comprise two filler sequences, the first filler sequence may be located between the 5′ ITR and promoter region, and the second filler sequence may be located between the polyadenylation signal sequence region and 3′ ITR. In one embodiment, a viral genome may comprise two filler sequences, the first filler sequence may be located between the 5′ ITR and promoter region, and the second filler sequence may be located between the MCS region and exon region. In one embodiment, a viral genome may comprise two filler sequences, the first filler sequence may be located between the 5′ ITR and promoter region, and the second filler sequence may be located between the MCS region and 3′ ITR. In one embodiment, a viral genome may comprise two filler sequences, the first filler sequence may be located between the 5′ ITR and promoter region, and the second filler sequence may be located between the exon region and 3′ ITR.

[0387] In one embodiment, a viral genome may comprise two filler sequences, the first filler sequence may be located between the 5′ ITR and payload region, and the second filler sequence may be located between the promoter region and payload region. In one embodiment, a viral genome may comprise two filler sequences, the first filler sequence may be located between the 5′ ITR and payload region, and the second filler sequence may be located between the promoter region and intron region. In one embodiment, a viral genome may comprise two filler sequences, the first filler sequence may be located between the 5′ ITR and payload region, and the second filler sequence may be located between the promoter region and enhancer region. In one embodiment, a viral genome may comprise two filler sequences, the first filler sequence may be located between the 5′ ITR and payload region, and the second filler sequence may be located between the promoter region and polyadenylation signal sequence region. In one embodiment, a viral genome may comprise two filler sequences, the first filler sequence may be located between the 5′ ITR and payload region, and the second filler sequence may be located between the promoter region and MCS region. In one embodiment, a viral genome may comprise two filler sequences, the first filler sequence may be located between the 5′ ITR and payload region, and the second filler sequence may be located between the promoter region and exon region. In one embodiment, a viral genome may comprise two filler sequences, the first filler sequence may be located between the 5′ ITR and payload region, and the second filler sequence may be located between the promoter region and 3′ ITR. In one embodiment, a viral genome may comprise two filler sequences, the first filler sequence may be located between the 5′ ITR and payload region, and the second filler sequence may be located between the payload region and intron region. In one embodiment, a viral genome may comprise two filler sequences, the first filler sequence may be located between the 5′ ITR and payload region, and the second filler sequence may be located between the payload region and enhancer region. In one embodiment, a viral genome may comprise two filler sequences, the first filler sequence may be located between the 5′ ITR and payload region, and the second filler sequence may be located between the payload region and polyadenylation signal sequence region. In one embodiment, a viral genome may comprise two filler sequences, the first filler sequence may be located between the 5′ ITR and payload region, and the second filler sequence may be located between the payload region and MCS region. In one embodiment, a viral genome may comprise two filler sequences, the first filler sequence may be located between the 5′ ITR and payload region, and the second filler sequence may be located between the payload region and exon region. In one embodiment, a viral genome may comprise two filler sequences, the first filler sequence may be located between the 5′ ITR and payload region, and the second filler sequence may be located between the payload region and 3′ ITR. In one embodiment, a viral genome may comprise two filler sequences, the first filler sequence may be located between the 5′ ITR and payload region, and the second filler sequence may be located between the intron region and enhancer region. In one embodiment, a viral genome may comprise two filler sequences, the first filler sequence may be located between the 5′ ITR and payload region, and the second filler sequence may be located between the intron region and polyadenylation signal sequence region. In one embodiment, a viral genome may comprise two filler sequences, the first filler sequence may be located between the 5′ ITR and payload region, and the second filler sequence may be located between the intron region and MCS region. In one embodiment, a viral genome may comprise two filler sequences, the first filler sequence may be located between the 5′ ITR and payload region, and the second filler sequence may be located between the intron region and exon region. In one embodiment, a viral genome may comprise two filler sequences, the first filler sequence may be located between the 5′ ITR and payload region, and the second filler sequence may be located between the intron region and 3′ ITR. In one embodiment, a viral genome may comprise two filler sequences, the first filler sequence may be located between the 5′ ITR and payload region, and the second filler sequence may be located between the enhancer region and polyadenylation signal sequence region. In one embodiment, a viral genome may comprise two filler sequences, the first filler sequence may be located between the 5′ ITR and payload region, and the second filler sequence may be located between the enhancer region and MCS region. In one embodiment, a viral genome may comprise two filler sequences, the first filler sequence may be located between the 5′ ITR and payload region, and the second filler sequence may be located between the enhancer region and exon region. In one embodiment, a viral genome may comprise two filler sequences, the first filler sequence may be located between the 5′ ITR and payload region, and the second filler sequence may be located between the enhancer region and 3′ ITR. In one embodiment, a viral genome may comprise two filler sequences, the first filler sequence may be located between the 5′ ITR and payload region, and the second filler sequence may be located between the polyadenylation signal sequence region and MCS region. In one embodiment, a viral genome may comprise two filler sequences, the first filler sequence may be located between the 5′ ITR and payload region, and the second filler sequence may be located between the polyadenylation signal sequence region and exon region. In one embodiment, a viral genome may comprise two filler sequences, the first filler sequence may be located between the 5′ ITR and payload region, and the second filler sequence may be located between the polyadenylation signal sequence region and 3′ ITR. In one embodiment, a viral genome may comprise two filler sequences, the first filler sequence may be located between the 5′ ITR and payload region, and the second filler sequence may be located between the MCS region and exon region. In one embodiment, a viral genome may comprise two filler sequences, the first filler sequence may be located between the 5′ ITR and payload region, and the second filler sequence may be located between the MCS region and 3′ ITR. In one embodiment, a viral genome may comprise two filler sequences, the first filler sequence may be located between the 5′ ITR and payload region, and the second filler sequence may be located between the exon region and 3′ ITR.

[0388] In one embodiment, a viral genome may comprise two filler sequences, the first filler sequence may be located between the 5′ ITR and intron region, and the second filler sequence may be located between the promoter region and payload region. In one embodiment, a viral genome may comprise two filler sequences, the first filler sequence may be located between the 5′ ITR and intron region, and the second filler sequence may be located between the promoter region and intron region. In one embodiment, a viral genome may comprise two filler sequences, the first filler sequence may be located between the 5′ ITR and intron region, and the second filler sequence may be located between the promoter region and enhancer region. In one embodiment, a viral genome may comprise two filler sequences, the first filler sequence may be located between the 5′ ITR and intron region, and the second filler sequence may be located between the promoter region and polyadenylation signal sequence region. In one embodiment, a viral genome may comprise two filler sequences, the first filler sequence may be located between the 5′ ITR and intron region, and the second filler sequence may be located between the promoter region and MCS region. In one embodiment, a viral genome may comprise two filler sequences, the first filler sequence may be located between the 5′ ITR and intron region, and the second filler sequence may be located between the promoter region and exon region. In one embodiment, a viral genome may comprise two filler sequences, the first filler sequence may be located between the 5′ ITR and intron region, and the second filler sequence may be located between the promoter region and 3′ ITR. In one embodiment, a viral genome may comprise two filler sequences, the first filler sequence may be located between the 5′ ITR and intron region, and the second filler sequence may be located between the payload region and intron region. In one embodiment, a viral genome may comprise two filler sequences, the first filler sequence may be located between the 5′ ITR and intron region, and the second filler sequence may be located between the payload region and enhancer region. In one embodiment, a viral genome may comprise two filler sequences, the first filler sequence may be located between the 5′ ITR and intron region, and the second filler sequence may be located between the payload region and polyadenylation signal sequence region. In one embodiment, a viral genome may comprise two filler sequences, the first filler sequence may be located between the 5′ ITR and intron region, and the second filler sequence may be located between the payload region and MCS region. In one embodiment, a viral genome may comprise two filler sequences, the first filler sequence may be located between the 5′ ITR and intron region, and the second filler sequence may be located between the payload region and exon region. In one embodiment, a viral genome may comprise two filler sequences, the first filler sequence may be located between the 5′ ITR and intron region, and the second filler sequence may be located between the payload region and 3′ ITR. In one embodiment, a viral genome may comprise two filler sequences, the first filler sequence may be located between the 5′ ITR and intron region, and the second filler sequence may be located between the intron region and enhancer region. In one embodiment, a viral genome may comprise two filler sequences, the first filler sequence may be located between the 5′ ITR and intron region, and the second filler sequence may be located between the intron region and polyadenylation signal sequence region. In one embodiment, a viral genome may comprise two filler sequences, the first filler sequence may be located between the 5′ ITR and intron region, and the second filler sequence may be located between the intron region and MCS region. In one embodiment, a viral genome may comprise two filler sequences, the first filler sequence may be located between the 5′ ITR and intron region, and the second filler sequence may be located between the intron region and exon region. In one embodiment, a viral genome may comprise two filler sequences, the first filler sequence may be located between the 5′ ITR and intron region, and the second filler sequence may be located between the intron region and 3′ ITR. In one embodiment, a viral genome may comprise two filler sequences, the first filler sequence may be located between the 5′ ITR and intron region, and the second filler sequence may be located between the enhancer region and polyadenylation signal sequence region. In one embodiment, a viral genome may comprise two filler sequences, the first filler sequence may be located between the 5′ ITR and intron region, and the second filler sequence may be located between the enhancer region and MCS region. In one embodiment, a viral genome may comprise two filler sequences, the first filler sequence may be located between the 5′ ITR and intron region, and the second filler sequence may be located between the enhancer region and exon region. In one embodiment, a viral genome may comprise two filler sequences, the first filler sequence may be located between the 5′ ITR and intron region, and the second filler sequence may be located between the enhancer region and 3′ ITR. In one embodiment, a viral genome may comprise two filler sequences, the first filler sequence may be located between the 5′ ITR and intron region, and the second filler sequence may be located between the polyadenylation signal sequence region and MCS region. In one embodiment, a viral genome may comprise two filler sequences, the first filler sequence may be located between the 5′ ITR and intron region, and the second filler sequence may be located between the polyadenylation signal sequence region and exon region. In one embodiment, a viral genome may comprise two filler sequences, the first filler sequence may be located between the 5′ ITR and intron region, and the second filler sequence may be located between the polyadenylation signal sequence region and 3′ ITR. In one embodiment, a viral genome may comprise two filler sequences, the first filler sequence may be located between the 5′ ITR and intron region, and the second filler sequence may be located between the MCS region and exon region. In one embodiment, a viral genome may comprise two filler sequences, the first filler sequence may be located between the 5′ ITR and intron region, and the second filler sequence may be located between the MCS region and 3′ ITR. In one embodiment, a viral genome may comprise two filler sequences, the first filler sequence may be located between the 5′ ITR and intron region, and the second filler sequence may be located between the exon region and 3′ ITR.

[0389] In one embodiment, a viral genome may comprise two filler sequences, the first filler sequence may be located between the 5′ ITR and enhancer region, and the second filler sequence may be located between the promoter region and payload region. In one embodiment, a viral genome may comprise two filler sequences, the first filler sequence may be located between the 5′ ITR and enhancer region, and the second filler sequence may be located between the promoter region and intron region. In one embodiment, a viral genome may comprise two filler sequences, the first filler sequence may be located between the 5′ ITR and enhancer region, and the second filler sequence may be located between the promoter region and enhancer region. In one embodiment, a viral genome may comprise two filler sequences, the first filler sequence may be located between the 5′ ITR and enhancer region, and the second filler sequence may be located between the promoter region and polyadenylation signal sequence region. In one embodiment, a viral genome may comprise two filler sequences, the first filler sequence may be located between the 5′ ITR and enhancer region, and the second filler sequence may be located between the promoter region and MCS region. In one embodiment, a viral genome may comprise two filler sequences, the first filler sequence may be located between the 5′ ITR and enhancer region, and the second filler sequence may be located between the promoter region and exon region. In one embodiment, a viral genome may comprise two filler sequences, the first filler sequence may be located between the 5′ ITR and enhancer region, and the second filler sequence may be located between the promoter region and 3′ ITR. In one embodiment, a viral genome may comprise two filler sequences, the first filler sequence may be located between the 5′ ITR and enhancer region, and the second filler sequence may be located between the payload region and intron region. In one embodiment, a viral genome may comprise two filler sequences, the first filler sequence may be located between the 5′ ITR and enhancer region, and the second filler sequence may be located between the payload region and enhancer region. In one embodiment, a viral genome may comprise two filler sequences, the first filler sequence may be located between the 5′ ITR and enhancer region, and the second filler sequence may be located between the payload region and polyadenylation signal sequence region. In one embodiment, a viral genome may comprise two filler sequences, the first filler sequence may be located between the 5′ ITR and enhancer region, and the second filler sequence may be located between the payload region and MCS region. In one embodiment, a viral genome may comprise two filler sequences, the first filler sequence may be located between the 5′ ITR and enhancer region, and the second filler sequence may be located between the payload region and exon region. In one embodiment, a viral genome may comprise two filler sequences, the first filler sequence may be located between the 5′ ITR and enhancer region, and the second filler sequence may be located between the payload region and 3′ ITR. In one embodiment, a viral genome may comprise two filler sequences, the first filler sequence may be located between the 5′ ITR and enhancer region, and the second filler sequence may be located between the intron region and enhancer region. In one embodiment, a viral genome may comprise two filler sequences, the first filler sequence may be located between the 5′ ITR and enhancer region, and the second filler sequence may be located between the intron region and polyadenylation signal sequence region. In one embodiment, a viral genome may comprise two filler sequences, the first filler sequence may be located between the 5′ ITR and enhancer region, and the second filler sequence may be located between the intron region and MCS region. In one embodiment, a viral genome may comprise two filler sequences, the first filler sequence may be located between the 5′ ITR and enhancer region, and the second filler sequence may be located between the intron region and exon region. In one embodiment, a viral genome may comprise two filler sequences, the first filler sequence may be located between the 5′ ITR and enhancer region, and the second filler sequence may be located between the intron region and 3′ ITR. In one embodiment, a viral genome may comprise two filler sequences, the first filler sequence may be located between the 5′ ITR and enhancer region, and the second filler sequence may be located between the enhancer region and polyadenylation signal sequence region. In one embodiment, a viral genome may comprise two filler sequences, the first filler sequence may be located between the 5′ ITR and enhancer region, and the second filler sequence may be located between the enhancer region and MCS region. In one embodiment, a viral genome may comprise two filler sequences, the first filler sequence may be located between the 5′ ITR and enhancer region, and the second filler sequence may be located between the enhancer region and exon region. In one embodiment, a viral genome may comprise two filler sequences, the first filler sequence may be located between the 5′ ITR and enhancer region, and the second filler sequence may be located between the enhancer region and 3′ ITR. In one embodiment, a viral genome may comprise two filler sequences, the first filler sequence may be located between the 5′ ITR and enhancer region, and the second filler sequence may be located between the polyadenylation signal sequence region and MCS region. In one embodiment, a viral genome may comprise two filler sequences, the first filler sequence may be located between the 5′ ITR and enhancer region, and the second filler sequence may be located between the polyadenylation signal sequence region and exon region. In one embodiment, a viral genome may comprise two filler sequences, the first filler sequence may be located between the 5′ ITR and enhancer region, and the second filler sequence may be located between the polyadenylation signal sequence region and 3′ ITR. In one embodiment, a viral genome may comprise two filler sequences, the first filler sequence may be located between the 5′ ITR and enhancer region, and the second filler sequence may be located between the MCS region and exon region. In one embodiment, a viral genome may comprise two filler sequences, the first filler sequence may be located between the 5′ ITR and enhancer region, and the second filler sequence may be located between the MCS region and 3′ ITR. In one embodiment, a viral genome may comprise two filler sequences, the first filler sequence may be located between the 5′ ITR and enhancer region, and the second filler sequence may be located between the exon region and 3′ ITR.

[0390] In one embodiment, a viral genome may comprise two filler sequences, the first filler sequence may be located between the 5′ ITR and polyadenylation signal sequence region, and the second filler sequence may be located between the promoter region and payload region. In one embodiment, a viral genome may comprise two filler sequences, the first filler sequence may be located between the 5′ ITR and polyadenylation signal sequence region, and the second filler sequence may be located between the promoter region and intron region. In one embodiment, a viral genome may comprise two filler sequences, the first filler sequence may be located between the 5′ ITR and polyadenylation signal sequence region, and the second filler sequence may be located between the promoter region and enhancer region. In one embodiment, a viral genome may comprise two filler sequences, the first filler sequence may be located between the 5′ ITR and polyadenylation signal sequence region, and the second filler sequence may be located between the promoter region and polyadenylation signal sequence region. In one embodiment, a viral genome may comprise two filler sequences, the first filler sequence may be located between the 5′ ITR and polyadenylation signal sequence region, and the second filler sequence may be located between the promoter region and MCS region. In one embodiment, a viral genome may comprise two filler sequences, the first filler sequence may be located between the 5′ ITR and polyadenylation signal sequence region, and the second filler sequence may be located between the promoter region and exon region. In one embodiment, a viral genome may comprise two filler sequences, the first filler sequence may be located between the 5′ ITR and polyadenylation signal sequence region, and the second filler sequence may be located between the promoter region and 3′ ITR. In one embodiment, a viral genome may comprise two filler sequences, the first filler sequence may be located between the 5′ ITR and polyadenylation signal sequence region, and the second filler sequence may be located between the payload region and intron region. In one embodiment, a viral genome may comprise two filler sequences, the first filler sequence may be located between the 5′ ITR and polyadenylation signal sequence region, and the second filler sequence may be located between the payload region and enhancer region. In one embodiment, a viral genome may comprise two filler sequences, the first filler sequence may be located between the 5′ ITR and polyadenylation signal sequence region, and the second filler sequence may be located between the payload region and polyadenylation signal sequence region. In one embodiment, a viral genome may comprise two filler sequences, the first filler sequence may be located between the 5′ ITR and polyadenylation signal sequence region, and the second filler sequence may be located between the payload region and MCS region. In one embodiment, a viral genome may comprise two filler sequences, the first filler sequence may be located between the 5′ ITR and polyadenylation signal sequence region, and the second filler sequence may be located between the payload region and exon region. In one embodiment, a viral genome may comprise two filler sequences, the first filler sequence may be located between the 5′ ITR and polyadenylation signal sequence region, and the second filler sequence may be located between the payload region and 3′ ITR. In one embodiment, a viral genome may comprise two filler sequences, the first filler sequence may be located between the 5′ ITR and polyadenylation signal sequence region, and the second filler sequence may be located between the intron region and enhancer region. In one embodiment, a viral genome may comprise two filler sequences, the first filler sequence may be located between the 5′ ITR and polyadenylation signal sequence region, and the second filler sequence may be located between the intron region and polyadenylation signal sequence region. In one embodiment, a viral genome may comprise two filler sequences, the first filler sequence may be located between the 5′ ITR and polyadenylation signal sequence region, and the second filler sequence may be located between the intron region and MCS region. In one embodiment, a viral genome may comprise two filler sequences, the first filler sequence may be located between the 5′ ITR and polyadenylation signal sequence region, and the second filler sequence may be located between the intron region and exon region. In one embodiment, a viral genome may comprise two filler sequences, the first filler sequence may be located between the 5′ ITR and polyadenylation signal sequence region, and the second filler sequence may be located between the intron region and 3′ ITR. In one embodiment, a viral genome may comprise two filler sequences, the first filler sequence may be located between the 5′ ITR and polyadenylation signal sequence region, and the second filler sequence may be located between the enhancer region and polyadenylation signal sequence region. In one embodiment, a viral genome may comprise two filler sequences, the first filler sequence may be located between the 5′ ITR and polyadenylation signal sequence region, and the second filler sequence may be located between the enhancer region and MCS region. In one embodiment, a viral genome may comprise two filler sequences, the first filler sequence may be located between the 5′ ITR and polyadenylation signal sequence region, and the second filler sequence may be located between the enhancer region and exon region. In one embodiment, a viral genome may comprise two filler sequences, the first filler sequence may be located between the 5′ ITR and polyadenylation signal sequence region, and the second filler sequence may be located between the enhancer region and 3′ ITR. In one embodiment, a viral genome may comprise two filler sequences, the first filler sequence may be located between the 5′ ITR and polyadenylation signal sequence region, and the second filler sequence may be located between the polyadenylation signal sequence region and MCS region. In one embodiment, a viral genome may comprise two filler sequences, the first filler sequence may be located between the 5′ ITR and polyadenylation signal sequence region, and the second filler sequence may be located between the polyadenylation signal sequence region and exon region. In one embodiment, a viral genome may comprise two filler sequences, the first filler sequence may be located between the 5′ ITR and polyadenylation signal sequence region, and the second filler sequence may be located between the polyadenylation signal sequence region and 3′ ITR. In one embodiment, a viral genome may comprise two filler sequences, the first filler sequence may be located between the 5′ ITR and polyadenylation signal sequence region, and the second filler sequence may be located between the MCS region and exon region. In one embodiment, a viral genome may comprise two filler sequences, the first filler sequence may be located between the 5′ ITR and polyadenylation signal sequence region, and the second filler sequence may be located between the MCS region and 3′ ITR. In one embodiment, a viral genome may comprise two filler sequences, the first filler sequence may be located between the 5′ ITR and polyadenylation signal sequence region, and the second filler sequence may be located between the exon region and 3′ ITR.

[0391] In one embodiment, a viral genome may comprise two filler sequences, the first filler sequence may be located between the 5′ ITR and MCS region, and the second filler sequence may be located between the promoter region and payload region. In one embodiment, a viral genome may comprise two filler sequences, the first filler sequence may be located between the 5′ ITR and MCS region, and the second filler sequence may be located between the promoter region and intron region. In one embodiment, a viral genome may comprise two filler sequences, the first filler sequence may be located between the 5′ ITR and MCS region, and the second filler sequence may be located between the promoter region and enhancer region. In one embodiment, a viral genome may comprise two filler sequences, the first filler sequence may be located between the 5′ ITR and MCS region, and the second filler sequence may be located between the promoter region and polyadenylation signal sequence region. In one embodiment, a viral genome may comprise two filler sequences, the first filler sequence may be located between the 5′ ITR and MCS region, and the second filler sequence may be located between the promoter region and MCS region. In one embodiment, a viral genome may comprise two filler sequences, the first filler sequence may be located between the 5′ ITR and MCS region, and the second filler sequence may be located between the promoter region and exon region. In one embodiment, a viral genome may comprise two filler sequences, the first filler sequence may be located between the 5′ ITR and MCS region, and the second filler sequence may be located between the promoter region and 3′ ITR. In one embodiment, a viral genome may comprise two filler sequences, the first filler sequence may be located between the 5′ ITR and MCS region, and the second filler sequence may be located between the payload region and intron region. In one embodiment, a viral genome may comprise two filler sequences, the first filler sequence may be located between the 5′ ITR and MCS region, and the second filler sequence may be located between the payload region and enhancer region. In one embodiment, a viral genome may comprise two filler sequences, the first filler sequence may be located between the 5′ ITR and MCS region, and the second filler sequence may be located between the payload region and polyadenylation signal sequence region. In one embodiment, a viral genome may comprise two filler sequences, the first filler sequence may be located between the 5′ ITR and MCS region, and the second filler sequence may be located between the payload region and MCS region. In one embodiment, a viral genome may comprise two filler sequences, the first filler sequence may be located between the 5′ ITR and MCS region, and the second filler sequence may be located between the payload region and exon region. In one embodiment, a viral genome may comprise two filler sequences, the first filler sequence may be located between the 5′ ITR and MCS region, and the second filler sequence may be located between the payload region and 3′ ITR. In one embodiment, a viral genome may comprise two filler sequences, the first filler sequence may be located between the 5′ ITR and MCS region, and the second filler sequence may be located between the intron region and enhancer region. In one embodiment, a viral genome may comprise two filler sequences, the first filler sequence may be located between the 5′ ITR and MCS region, and the second filler sequence may be located between the intron region and polyadenylation signal sequence region. In one embodiment, a viral genome may comprise two filler sequences, the first filler sequence may be located between the 5′ ITR and MCS region, and the second filler sequence may be located between the intron region and MCS region. In one embodiment, a viral genome may comprise two filler sequences, the first filler sequence may be located between the 5′ ITR and MCS region, and the second filler sequence may be located between the intron region and exon region. In one embodiment, a viral genome may comprise two filler sequences, the first filler sequence may be located between the 5′ ITR and MCS region, and the second filler sequence may be located between the intron region and 3′ ITR. In one embodiment, a viral genome may comprise two filler sequences, the first filler sequence may be located between the 5′ ITR and MCS region, and the second filler sequence may be located between the enhancer region and polyadenylation signal sequence region. In one embodiment, a viral genome may comprise two filler sequences, the first filler sequence may be located between the 5′ ITR and MCS region, and the second filler sequence may be located between the enhancer region and MCS region. In one embodiment, a viral genome may comprise two filler sequences, the first filler sequence may be located between the 5′ ITR and MCS region, and the second filler sequence may be located between the enhancer region and exon region. In one embodiment, a viral genome may comprise two filler sequences, the first filler sequence may be located between the 5′ ITR and MCS region, and the second filler sequence may be located between the enhancer region and 3′ ITR. In one embodiment, a viral genome may comprise two filler sequences, the first filler sequence may be located between the 5′ ITR and MCS region, and the second filler sequence may be located between the polyadenylation signal sequence region and MCS region. In one embodiment, a viral genome may comprise two filler sequences, the first filler sequence may be located between the 5′ ITR and MCS region, and the second filler sequence may be located between the polyadenylation signal sequence region and exon region. In one embodiment, a viral genome may comprise two filler sequences, the first filler sequence may be located between the 5′ ITR and MCS region, and the second filler sequence may be located between the polyadenylation signal sequence region and 3′ ITR. In one embodiment, a viral genome may comprise two filler sequences, the first filler sequence may be located between the 5′ ITR and MCS region, and the second filler sequence may be located between the MCS region and exon region. In one embodiment, a viral genome may comprise two filler sequences, the first filler sequence may be located between the 5′ ITR and MCS region, and the second filler sequence may be located between the MCS region and 3′ ITR. In one embodiment, a viral genome may comprise two filler sequences, the first filler sequence may be located between the 5′ ITR and MCS region, and the second filler sequence may be located between the exon region and 3′ ITR.

[0392] In one embodiment, a viral genome may comprise two filler sequences, the first filler sequence may be located between the 5′ ITR and exon region, and the second filler sequence may be located between the promoter region and payload region. In one embodiment, a viral genome may comprise two filler sequences, the first filler sequence may be located between the 5′ ITR and exon region, and the second filler sequence may be located between the promoter region and intron region. In one embodiment, a viral genome may comprise two filler sequences, the first filler sequence may be located between the 5′ ITR and exon region, and the second filler sequence may be located between the promoter region and enhancer region. In one embodiment, a viral genome may comprise two filler sequences, the first filler sequence may be located between the 5′ ITR and exon region, and the second filler sequence may be located between the promoter region and polyadenylation signal sequence region. In one embodiment, a viral genome may comprise two filler sequences, the first filler sequence may be located between the 5′ ITR and exon region, and the second filler sequence may be located between the promoter region and MCS region. In one embodiment, a viral genome may comprise two filler sequences, the first filler sequence may be located between the 5′ ITR and exon region, and the second filler sequence may be located between the promoter region and exon region. In one embodiment, a viral genome may comprise two filler sequences, the first filler sequence may be located between the 5′ ITR and exon region, and the second filler sequence may be located between the promoter region and 3′ ITR. In one embodiment, a viral genome may comprise two filler sequences, the first filler sequence may be located between the 5′ ITR and exon region, and the second filler sequence may be located between the payload region and intron region. In one embodiment, a viral genome may comprise two filler sequences, the first filler sequence may be located between the 5′ ITR and exon region, and the second filler sequence may be located between the payload region and enhancer region. In one embodiment, a viral genome may comprise two filler sequences, the first filler sequence may be located between the 5′ ITR and exon region, and the second filler sequence may be located between the payload region and polyadenylation signal sequence region. In one embodiment, a viral genome may comprise two filler sequences, the first filler sequence may be located between the 5′ ITR and exon region, and the second filler sequence may be located between the payload region and MCS region. In one embodiment, a viral genome may comprise two filler sequences, the first filler sequence may be located between the 5′ ITR and exon region, and the second filler sequence may be located between the payload region and exon region. In one embodiment, a viral genome may comprise two filler sequences, the first filler sequence may be located between the 5′ ITR and exon region, and the second filler sequence may be located between the payload region and 3′ ITR. In one embodiment, a viral genome may comprise two filler sequences, the first filler sequence may be located between the 5′ ITR and exon region, and the second filler sequence may be located between the intron region and enhancer region. In one embodiment, a viral genome may comprise two filler sequences, the first filler sequence may be located between the 5′ ITR and exon region, and the second filler sequence may be located between the intron region and polyadenylation signal sequence region. In one embodiment, a viral genome may comprise two filler sequences, the first filler sequence may be located between the 5′ ITR and exon region, and the second filler sequence may be located between the intron region and MCS region. In one embodiment, a viral genome may comprise two filler sequences, the first filler sequence may be located between the 5′ ITR and exon region, and the second filler sequence may be located between the intron region and exon region. In one embodiment, a viral genome may comprise two filler sequences, the first filler sequence may be located between the 5′ ITR and exon region, and the second filler sequence may be located between the intron region and 3′ ITR. In one embodiment, a viral genome may comprise two filler sequences, the first filler sequence may be located between the 5′ ITR and exon region, and the second filler sequence may be located between the enhancer region and polyadenylation signal sequence region. In one embodiment, a viral genome may comprise two filler sequences, the first filler sequence may be located between the 5′ ITR and exon region, and the second filler sequence may be located between the enhancer region and MCS region. In one embodiment, a viral genome may comprise two filler sequences, the first filler sequence may be located between the 5′ ITR and exon region, and the second filler sequence may be located between the enhancer region and exon region. In one embodiment, a viral genome may comprise two filler sequences, the first filler sequence may be located between the 5′ ITR and exon region, and the second filler sequence may be located between the enhancer region and 3′ ITR. In one embodiment, a viral genome may comprise two filler sequences, the first filler sequence may be located between the 5′ ITR and exon region, and the second filler sequence may be located between the polyadenylation signal sequence region and MCS region. In one embodiment, a viral genome may comprise two filler sequences, the first filler sequence may be located between the 5′ ITR and exon region, and the second filler sequence may be located between the polyadenylation signal sequence region and exon region. In one embodiment, a viral genome may comprise two filler sequences, the first filler sequence may be located between the 5′ ITR and exon region, and the second filler sequence may be located between the polyadenylation signal sequence region and 3′ ITR. In one embodiment, a viral genome may comprise two filler sequences, the first filler sequence may be located between the 5′ ITR and exon region, and the second filler sequence may be located between the MCS region and exon region. In one embodiment, a viral genome may comprise two filler sequences, the first filler sequence may be located between the 5′ ITR and exon region, and the second filler sequence may be located between the MCS region and 3′ ITR. In one embodiment, a viral genome may comprise two filler sequences, the first filler sequence may be located between the 5′ ITR and exon region, and the second filler sequence may be located between the exon region and 3′ ITR.

[0393] In one embodiment, a viral genome may comprise two filler sequences, the first filler sequence may be located between the promoter region and payload region, and the second filler sequence may be located between the payload region and intron region. In one embodiment, a viral genome may comprise two filler sequences, the first filler sequence may be located between the promoter region and payload region, and the second filler sequence may be located between the payload region and enhancer region. In one embodiment, a viral genome may comprise two filler sequences, the first filler sequence may be located between the promoter region and payload region, and the second filler sequence may be located between the payload region and polyadenylation signal sequence region. In one embodiment, a viral genome may comprise two filler sequences, the first filler sequence may be located between the promoter region and payload region, and the second filler sequence may be located between the payload region and MCS region. In one embodiment, a viral genome may comprise two filler sequences, the first filler sequence may be located between the promoter region and payload region, and the second filler sequence may be located between the payload region and exon region. In one embodiment, a viral genome may comprise two filler sequences, the first filler sequence may be located between the promoter region and payload region, and the second filler sequence may be located between the payload region and 3′ ITR. In one embodiment, a viral genome may comprise two filler sequences, the first filler sequence may be located between the promoter region and payload region, and the second filler sequence may be located between the intron region and enhancer region. In one embodiment, a viral genome may comprise two filler sequences, the first filler sequence may be located between the promoter region and payload region, and the second filler sequence may be located between the intron region and polyadenylation signal sequence region. In one embodiment, a viral genome may comprise two filler sequences, the first filler sequence may be located between the promoter region and payload region, and the second filler sequence may be located between the intron region and MCS region. In one embodiment, a viral genome may comprise two filler sequences, the first filler sequence may be located between the promoter region and payload region, and the second filler sequence may be located between the intron region and exon region. In one embodiment, a viral genome may comprise two filler sequences, the first filler sequence may be located between the promoter region and payload region, and the second filler sequence may be located between the intron region and 3′ ITR. In one embodiment, a viral genome may comprise two filler sequences, the first filler sequence may be located between the promoter region and payload region, and the second filler sequence may be located between the enhancer region and polyadenylation signal sequence region. In one embodiment, a viral genome may comprise two filler sequences, the first filler sequence may be located between the promoter region and payload region, and the second filler sequence may be located between the enhancer region and MCS region. In one embodiment, a viral genome may comprise two filler sequences, the first filler sequence may be located between the promoter region and payload region, and the second filler sequence may be located between the enhancer region and exon region. In one embodiment, a viral genome may comprise two filler sequences, the first filler sequence may be located between the promoter region and payload region, and the second filler sequence may be located between the enhancer region and 3′ ITR. In one embodiment, a viral genome may comprise two filler sequences, the first filler sequence may be located between the promoter region and payload region, and the second filler sequence may be located between the polyadenylation signal sequence region and MCS region. In one embodiment, a viral genome may comprise two filler sequences, the first filler sequence may be located between the promoter region and payload region, and the second filler sequence may be located between the polyadenylation signal sequence region and exon region. In one embodiment, a viral genome may comprise two filler sequences, the first filler sequence may be located between the promoter region and payload region, and the second filler sequence may be located between the polyadenylation signal sequence region and 3′ ITR. In one embodiment, a viral genome may comprise two filler sequences, the first filler sequence may be located between the promoter region and payload region, and the second filler sequence may be located between the MCS region and exon region. In one embodiment, a viral genome may comprise two filler sequences, the first filler sequence may be located between the promoter region and payload region, and the second filler sequence may be located between the MCS region and 3′ ITR. In one embodiment, a viral genome may comprise two filler sequences, the first filler sequence may be located between the promoter region and payload region, and the second filler sequence may be located between the exon region and 3′ ITR.

[0394] In one embodiment, a viral genome may comprise two filler sequences, the first filler sequence may be located between the promoter region and intron region, and the second filler sequence may be located between the payload region and intron region. In one embodiment, a viral genome may comprise two filler sequences, the first filler sequence may be located between the promoter region and intron region, and the second filler sequence may be located between the payload region and enhancer region. In one embodiment, a viral genome may comprise two filler sequences, the first filler sequence may be located between the promoter region and intron region, and the second filler sequence may be located between the payload region and polyadenylation signal sequence region. In one embodiment, a viral genome may comprise two filler sequences, the first filler sequence may be located between the promoter region and intron region, and the second filler sequence may be located between the payload region and MCS region. In one embodiment, a viral genome may comprise two filler sequences, the first filler sequence may be located between the promoter region and intron region, and the second filler sequence may be located between the payload region and exon region. In one embodiment, a viral genome may comprise two filler sequences, the first filler sequence may be located between the promoter region and intron region, and the second filler sequence may be located between the payload region and 3′ ITR. In one embodiment, a viral genome may comprise two filler sequences, the first filler sequence may be located between the promoter region and intron region, and the second filler sequence may be located between the intron region and enhancer region. In one embodiment, a viral genome may comprise two filler sequences, the first filler sequence may be located between the promoter region and intron region, and the second filler sequence may be located between the intron region and polyadenylation signal sequence region. In one embodiment, a viral genome may comprise two filler sequences, the first filler sequence may be located between the promoter region and intron region, and the second filler sequence may be located between the intron region and MCS region. In one embodiment, a viral genome may comprise two filler sequences, the first filler sequence may be located between the promoter region and intron region, and the second filler sequence may be located between the intron region and exon region. In one embodiment, a viral genome may comprise two filler sequences, the first filler sequence may be located between the promoter region and intron region, and the second filler sequence may be located between the intron region and 3′ ITR. In one embodiment, a viral genome may comprise two filler sequences, the first filler sequence may be located between the promoter region and intron region, and the second filler sequence may be located between the enhancer region and polyadenylation signal sequence region. In one embodiment, a viral genome may comprise two filler sequences, the first filler sequence may be located between the promoter region and intron region, and the second filler sequence may be located between the enhancer region and MCS region. In one embodiment, a viral genome may comprise two filler sequences, the first filler sequence may be located between the promoter region and intron region, and the second filler sequence may be located between the enhancer region and exon region. In one embodiment, a viral genome may comprise two filler sequences, the first filler sequence may be located between the promoter region and intron region, and the second filler sequence may be located between the enhancer region and 3′ ITR. In one embodiment, a viral genome may comprise two filler sequences, the first filler sequence may be located between the promoter region and intron region, and the second filler sequence may be located between the polyadenylation signal sequence region and MCS region. In one embodiment, a viral genome may comprise two filler sequences, the first filler sequence may be located between the promoter region and intron region, and the second filler sequence may be located between the polyadenylation signal sequence region and exon region. In one embodiment, a viral genome may comprise two filler sequences, the first filler sequence may be located between the promoter region and intron region, and the second filler sequence may be located between the polyadenylation signal sequence region and 3′ ITR. In one embodiment, a viral genome may comprise two filler sequences, the first filler sequence may be located between the promoter region and intron region, and the second filler sequence may be located between the MCS region and exon region. In one embodiment, a viral genome may comprise two filler sequences, the first filler sequence may be located between the promoter region and intron region, and the second filler sequence may be located between the MCS region and 3′ ITR. In one embodiment, a viral genome may comprise two filler sequences, the first filler sequence may be located between the promoter region and intron region, and the second filler sequence may be located between the exon region and 3′ ITR.

[0395] In one embodiment, a viral genome may comprise two filler sequences, the first filler sequence may be located between the promoter region and enhancer region, and the second filler sequence may be located between the payload region and intron region. In one embodiment, a viral genome may comprise two filler sequences, the first filler sequence may be located between the promoter region and enhancer region, and the second filler sequence may be located between the payload region and enhancer region. In one embodiment, a viral genome may comprise two filler sequences, the first filler sequence may be located between the promoter region and enhancer region, and the second filler sequence may be located between the payload region and polyadenylation signal sequence region. In one embodiment, a viral genome may comprise two filler sequences, the first filler sequence may be located between the promoter region and enhancer region, and the second filler sequence may be located between the payload region and MCS region. In one embodiment, a viral genome may comprise two filler sequences, the first filler sequence may be located between the promoter region and enhancer region, and the second filler sequence may be located between the payload region and exon region. In one embodiment, a viral genome may comprise two filler sequences, the first filler sequence may be located between the promoter region and enhancer region, and the second filler sequence may be located between the payload region and 3′ ITR. In one embodiment, a viral genome may comprise two filler sequences, the first filler sequence may be located between the promoter region and enhancer region, and the second filler sequence may be located between the intron region and enhancer region. In one embodiment, a viral genome may comprise two filler sequences, the first filler sequence may be located between the promoter region and enhancer region, and the second filler sequence may be located between the intron region and polyadenylation signal sequence region. In one embodiment, a viral genome may comprise two filler sequences, the first filler sequence may be located between the promoter region and enhancer region, and the second filler sequence may be located between the intron region and MCS region. In one embodiment, a viral genome may comprise two filler sequences, the first filler sequence may be located between the promoter region and enhancer region, and the second filler sequence may be located between the intron region and exon region. In one embodiment, a viral genome may comprise two filler sequences, the first filler sequence may be located between the promoter region and enhancer region, and the second filler sequence may be located between the intron region and 3′ ITR. In one embodiment, a viral genome may comprise two filler sequences, the first filler sequence may be located between the promoter region and enhancer region, and the second filler sequence may be located between the enhancer region and polyadenylation signal sequence region. In one embodiment, a viral genome may comprise two filler sequences, the first filler sequence may be located between the promoter region and enhancer region, and the second filler sequence may be located between the enhancer region and MCS region. In one embodiment, a viral genome may comprise two filler sequences, the first filler sequence may be located between the promoter region and enhancer region, and the second filler sequence may be located between the enhancer region and exon region. In one embodiment, a viral genome may comprise two filler sequences, the first filler sequence may be located between the promoter region and enhancer region, and the second filler sequence may be located between the enhancer region and 3′ ITR. In one embodiment, a viral genome may comprise two filler sequences, the first filler sequence may be located between the promoter region and enhancer region, and the second filler sequence may be located between the polyadenylation signal sequence region and MCS region. In one embodiment, a viral genome may comprise two filler sequences, the first filler sequence may be located between the promoter region and enhancer region, and the second filler sequence may be located between the polyadenylation signal sequence region and exon region. In one embodiment, a viral genome may comprise two filler sequences, the first filler sequence may be located between the promoter region and enhancer region, and the second filler sequence may be located between the polyadenylation signal sequence region and 3′ ITR. In one embodiment, a viral genome may comprise two filler sequences, the first filler sequence may be located between the promoter region and enhancer region, and the second filler sequence may be located between the MCS region and exon region. In one embodiment, a viral genome may comprise two filler sequences, the first filler sequence may be located between the promoter region and enhancer region, and the second filler sequence may be located between the MCS region and 3′ ITR. In one embodiment, a viral genome may comprise two filler sequences, the first filler sequence may be located between the promoter region and enhancer region, and the second filler sequence may be located between the exon region and 3′ ITR.

[0396] In one embodiment, a viral genome may comprise two filler sequences, the first filler sequence may be located between the promoter region and polyadenylation signal sequence region, and the second filler sequence may be located between the payload region and intron region. In one embodiment, a viral genome may comprise two filler sequences, the first filler sequence may be located between the promoter region and polyadenylation signal sequence region, and the second filler sequence may be located between the payload region and enhancer region. In one embodiment, a viral genome may comprise two filler sequences, the first filler sequence may be located between the promoter region and polyadenylation signal sequence region, and the second filler sequence may be located between the payload region and polyadenylation signal sequence region. In one embodiment, a viral genome may comprise two filler sequences, the first filler sequence may be located between the promoter region and polyadenylation signal sequence region, and the second filler sequence may be located between the payload region and MCS region. In one embodiment, a viral genome may comprise two filler sequences, the first filler sequence may be located between the promoter region and polyadenylation signal sequence region, and the second filler sequence may be located between the payload region and exon region. In one embodiment, a viral genome may comprise two filler sequences, the first filler sequence may be located between the promoter region and polyadenylation signal sequence region, and the second filler sequence may be located between the payload region and 3′ ITR. In one embodiment, a viral genome may comprise two filler sequences, the first filler sequence may be located between the promoter region and polyadenylation signal sequence region, and the second filler sequence may be located between the intron region and enhancer region. In one embodiment, a viral genome may comprise two filler sequences, the first filler sequence may be located between the promoter region and polyadenylation signal sequence region, and the second filler sequence may be located between the intron region and polyadenylation signal sequence region. In one embodiment, a viral genome may comprise two filler sequences, the first filler sequence may be located between the promoter region and polyadenylation signal sequence region, and the second filler sequence may be located between the intron region and MCS region. In one embodiment, a viral genome may comprise two filler sequences, the first filler sequence may be located between the promoter region and polyadenylation signal sequence region, and the second filler sequence may be located between the intron region and exon region. In one embodiment, a viral genome may comprise two filler sequences, the first filler sequence may be located between the promoter region and polyadenylation signal sequence region, and the second filler sequence may be located between the intron region and 3′ ITR. In one embodiment, a viral genome may comprise two filler sequences, the first filler sequence may be located between the promoter region and polyadenylation signal sequence region, and the second filler sequence may be located between the enhancer region and polyadenylation signal sequence region. In one embodiment, a viral genome may comprise two filler sequences, the first filler sequence may be located between the promoter region and polyadenylation signal sequence region, and the second filler sequence may be located between the enhancer region and MCS region. In one embodiment, a viral genome may comprise two filler sequences, the first filler sequence may be located between the promoter region and polyadenylation signal sequence region, and the second filler sequence may be located between the enhancer region and exon region. In one embodiment, a viral genome may comprise two filler sequences, the first filler sequence may be located between the promoter region and polyadenylation signal sequence region, and the second filler sequence may be located between the enhancer region and 3′ ITR. In one embodiment, a viral genome may comprise two filler sequences, the first filler sequence may be located between the promoter region and polyadenylation signal sequence region, and the second filler sequence may be located between the polyadenylation signal sequence region and MCS region. In one embodiment, a viral genome may comprise two filler sequences, the first filler sequence may be located between the promoter region and polyadenylation signal sequence region, and the second filler sequence may be located between the polyadenylation signal sequence region and exon region. In one embodiment, a viral genome may comprise two filler sequences, the first filler sequence may be located between the promoter region and polyadenylation signal sequence region, and the second filler sequence may be located between the polyadenylation signal sequence region and 3′ ITR. In one embodiment, a viral genome may comprise two filler sequences, the first filler sequence may be located between the promoter region and polyadenylation signal sequence region, and the second filler sequence may be located between the MCS region and exon region. In one embodiment, a viral genome may comprise two filler sequences, the first filler sequence may be located between the promoter region and polyadenylation signal sequence region, and the second filler sequence may be located between the MCS region and 3′ ITR. In one embodiment, a viral genome may comprise two filler sequences, the first filler sequence may be located between the promoter region and polyadenylation signal sequence region, and the second filler sequence may be located between the exon region and 3′ ITR.

[0397] In one embodiment, a viral genome may comprise two filler sequences, the first filler sequence may be located between the promoter region and exon region, and the second filler sequence may be located between the payload region and intron region. In one embodiment, a viral genome may comprise two filler sequences, the first filler sequence may be located between the promoter region and exon region, and the second filler sequence may be located between the payload region and enhancer region. In one embodiment, a viral genome may comprise two filler sequences, the first filler sequence may be located between the promoter region and exon region, and the second filler sequence may be located between the payload region and polyadenylation signal sequence region. In one embodiment, a viral genome may comprise two filler sequences, the first filler sequence may be located between the promoter region and exon region, and the second filler sequence may be located between the payload region and MCS region. In one embodiment, a viral genome may comprise two filler sequences, the first filler sequence may be located between the promoter region and exon region, and the second filler sequence may be located between the payload region and exon region. In one embodiment, a viral genome may comprise two filler sequences, the first filler sequence may be located between the promoter region and exon region, and the second filler sequence may be located between the payload region and 3′ ITR. In one embodiment, a viral genome may comprise two filler sequences, the first filler sequence may be located between the promoter region and exon region, and the second filler sequence may be located between the intron region and enhancer region. In one embodiment, a viral genome may comprise two filler sequences, the first filler sequence may be located between the promoter region and exon region, and the second filler sequence may be located between the intron region and polyadenylation signal sequence region. In one embodiment, a viral genome may comprise two filler sequences, the first filler sequence may be located between the promoter region and exon region, and the second filler sequence may be located between the intron region and MCS region. In one embodiment, a viral genome may comprise two filler sequences, the first filler sequence may be located between the promoter region and exon region, and the second filler sequence may be located between the intron region and exon region. In one embodiment, a viral genome may comprise two filler sequences, the first filler sequence may be located between the promoter region and exon region, and the second filler sequence may be located between the intron region and 3′ ITR. In one embodiment, a viral genome may comprise two filler sequences, the first filler sequence may be located between the promoter region and exon region, and the second filler sequence may be located between the enhancer region and polyadenylation signal sequence region. In one embodiment, a viral genome may comprise two filler sequences, the first filler sequence may be located between the promoter region and exon region, and the second filler sequence may be located between the enhancer region and MCS region. In one embodiment, a viral genome may comprise two filler sequences, the first filler sequence may be located between the promoter region and exon region, and the second filler sequence may be located between the enhancer region and exon region. In one embodiment, a viral genome may comprise two filler sequences, the first filler sequence may be located between the promoter region and exon region, and the second filler sequence may be located between the enhancer region and 3′ ITR. In one embodiment, a viral genome may comprise two filler sequences, the first filler sequence may be located between the promoter region and exon region, and the second filler sequence may be located between the polyadenylation signal sequence region and MCS region. In one embodiment, a viral genome may comprise two filler sequences, the first filler sequence may be located between the promoter region and exon region, and the second filler sequence may be located between the polyadenylation signal sequence region and exon region. In one embodiment, a viral genome may comprise two filler sequences, the first filler sequence may be located between the promoter region and exon region, and the second filler sequence may be located between the polyadenylation signal sequence region and 3′ ITR. In one embodiment, a viral genome may comprise two filler sequences, the first filler sequence may be located between the promoter region and exon region, and the second filler sequence may be located between the MCS region and exon region. In one embodiment, a viral genome may comprise two filler sequences, the first filler sequence may be located between the promoter region and exon region, and the second filler sequence may be located between the MCS region and 3′ ITR. In one embodiment, a viral genome may comprise two filler sequences, the first filler sequence may be located between the promoter region and exon region, and the second filler sequence may be located between the exon region and 3′ ITR.

[0398] In one embodiment, a viral genome may comprise two filler sequences, the first filler sequence may be located between the promoter region and MCS region, and the second filler sequence may be located between the payload region and intron region. In one embodiment, a viral genome may comprise two filler sequences, the first filler sequence may be located between the promoter region and MCS region, and the second filler sequence may be located between the payload region and enhancer region. In one embodiment, a viral genome may comprise two filler sequences, the first filler sequence may be located between the promoter region and MCS region, and the second filler sequence may be located between the payload region and polyadenylation signal sequence region. In one embodiment, a viral genome may comprise two filler sequences, the first filler sequence may be located between the promoter region and MCS region, and the second filler sequence may be located between the payload region and MCS region. In one embodiment, a viral genome may comprise two filler sequences, the first filler sequence may be located between the promoter region and MCS region, and the second filler sequence may be located between the payload region and exon region. In one embodiment, a viral genome may comprise two filler sequences, the first filler sequence may be located between the promoter region and MCS region, and the second filler sequence may be located between the payload region and 3′ ITR. In one embodiment, a viral genome may comprise two filler sequences, the first filler sequence may be located between the promoter region and MCS region, and the second filler sequence may be located between the intron region and enhancer region. In one embodiment, a viral genome may comprise two filler sequences, the first filler sequence may be located between the promoter region and MCS region, and the second filler sequence may be located between the intron region and polyadenylation signal sequence region. In one embodiment, a viral genome may comprise two filler sequences, the first filler sequence may be located between the promoter region and MCS region, and the second filler sequence may be located between the intron region and MCS region. In one embodiment, a viral genome may comprise two filler sequences, the first filler sequence may be located between the promoter region and MCS region, and the second filler sequence may be located between the intron region and exon region. In one embodiment, a viral genome may comprise two filler sequences, the first filler sequence may be located between the promoter region and MCS region, and the second filler sequence may be located between the intron region and 3′ ITR. In one embodiment, a viral genome may comprise two filler sequences, the first filler sequence may be located between the promoter region and MCS region, and the second filler sequence may be located between the enhancer region and polyadenylation signal sequence region. In one embodiment, a viral genome may comprise two filler sequences, the first filler sequence may be located between the promoter region and MCS region, and the second filler sequence may be located between the enhancer region and MCS region. In one embodiment, a viral genome may comprise two filler sequences, the first filler sequence may be located between the promoter region and MCS region, and the second filler sequence may be located between the enhancer region and exon region. In one embodiment, a viral genome may comprise two filler sequences, the first filler sequence may be located between the promoter region and MCS region, and the second filler sequence may be located between the enhancer region and 3′ ITR. In one embodiment, a viral genome may comprise two filler sequences, the first filler sequence may be located between the promoter region and MCS region, and the second filler sequence may be located between the polyadenylation signal sequence region and MCS region. In one embodiment, a viral genome may comprise two filler sequences, the first filler sequence may be located between the promoter region and MCS region, and the second filler sequence may be located between the polyadenylation signal sequence region and exon region. In one embodiment, a viral genome may comprise two filler sequences, the first filler sequence may be located between the promoter region and MCS region, and the second filler sequence may be located between the polyadenylation signal sequence region and 3′ ITR. In one embodiment, a viral genome may comprise two filler sequences, the first filler sequence may be located between the promoter region and MCS region, and the second filler sequence may be located between the MCS region and exon region. In one embodiment, a viral genome may comprise two filler sequences, the first filler sequence may be located between the promoter region and MCS region, and the second filler sequence may be located between the MCS region and 3′ ITR. In one embodiment, a viral genome may comprise two filler sequences, the first filler sequence may be located between the promoter region and MCS region, and the second filler sequence may be located between the exon region and 3′ ITR.

[0399] In one embodiment, a viral genome may comprise two filler sequences, the first filler sequence may be located between the promoter region and 3′ITR, and the second filler sequence may be located between the payload region and intron region. In one embodiment, a viral genome may comprise two filler sequences, the first filler sequence may be located between the promoter region and 3′ITR, and the second filler sequence may be located between the payload region and enhancer region. In one embodiment, a viral genome may comprise two filler sequences, the first filler sequence may be located between the promoter region and 3′ITR, and the second filler sequence may be located between the payload region and polyadenylation signal sequence region. In one embodiment, a viral genome may comprise two filler sequences, the first filler sequence may be located between the promoter region and 3′ITR, and the second filler sequence may be located between the payload region and MCS region. In one embodiment, a viral genome may comprise two filler sequences, the first filler sequence may be located between the promoter region and 3′ITR, and the second filler sequence may be located between the payload region and exon region. In one embodiment, a viral genome may comprise two filler sequences, the first filler sequence may be located between the promoter region and 3′ITR, and the second filler sequence may be located between the payload region and 3′ ITR. In one embodiment, a viral genome may comprise two filler sequences, the first filler sequence may be located between the promoter region and 3′ITR, and the second filler sequence may be located between the intron region and enhancer region. In one embodiment, a viral genome may comprise two filler sequences, the first filler sequence may be located between the promoter region and 3′ITR, and the second filler sequence may be located between the intron region and polyadenylation signal sequence region. In one embodiment, a viral genome may comprise two filler sequences, the first filler sequence may be located between the promoter region and 3′ITR, and the second filler sequence may be located between the intron region and MCS region. In one embodiment, a viral genome may comprise two filler sequences, the first filler sequence may be located between the promoter region and 3′ITR, and the second filler sequence may be located between the intron region and exon region. In one embodiment, a viral genome may comprise two filler sequences, the first filler sequence may be located between the promoter region and 3′ITR, and the second filler sequence may be located between the intron region and 3′ ITR. In one embodiment, a viral genome may comprise two filler sequences, the first filler sequence may be located between the promoter region and 3′ITR, and the second filler sequence may be located between the enhancer region and polyadenylation signal sequence region. In one embodiment, a viral genome may comprise two filler sequences, the first filler sequence may be located between the promoter region and 3′ITR, and the second filler sequence may be located between the enhancer region and MCS region. In one embodiment, a viral genome may comprise two filler sequences, the first filler sequence may be located between the promoter region and 3′ITR, and the second filler sequence may be located between the enhancer region and exon region. In one embodiment, a viral genome may comprise two filler sequences, the first filler sequence may be located between the promoter region and 3′ITR, and the second filler sequence may be located between the enhancer region and 3′ ITR. In one embodiment, a viral genome may comprise two filler sequences, the first filler sequence may be located between the promoter region and 3′ITR, and the second filler sequence may be located between the polyadenylation signal sequence region and MCS region. In one embodiment, a viral genome may comprise two filler sequences, the first filler sequence may be located between the promoter region and 3′ITR, and the second filler sequence may be located between the polyadenylation signal sequence region and exon region. In one embodiment, a viral genome may comprise two filler sequences, the first filler sequence may be located between the promoter region and 3′ITR, and the second filler sequence may be located between the polyadenylation signal sequence region and 3′ ITR. In one embodiment, a viral genome may comprise two filler sequences, the first filler sequence may be located between the promoter region and 3′ITR, and the second filler sequence may be located between the MCS region and exon region. In one embodiment, a viral genome may comprise two filler sequences, the first filler sequence may be located between the promoter region and 3′ITR, and the second filler sequence may be located between the MCS region and 3′ ITR. In one embodiment, a viral genome may comprise two filler sequences, the first filler sequence may be located between the promoter region and 3′ITR, and the second filler sequence may be located between the exon region and 3′ ITR.

[0400] In one embodiment, a viral genome may comprise two filler sequences, the first filler sequence may be located between the payload region and intron region, and the second filler sequence may be located between the intron region and enhancer region. In one embodiment, a viral genome may comprise two filler sequences, the first filler sequence may be located between the payload region and intron region, and the second filler sequence may be located between the intron region and polyadenylation signal sequence region. In one embodiment, a viral genome may comprise two filler sequences, the first filler sequence may be located between the payload region and intron region, and the second filler sequence may be located between the intron region and MCS region. In one embodiment, a viral genome may comprise two filler sequences, the first filler sequence may be located between the payload region and intron region, and the second filler sequence may be located between the intron region and exon region. In one embodiment, a viral genome may comprise two filler sequences, the first filler sequence may be located between the payload region and intron region, and the second filler sequence may be located between the intron region and 3′ ITR. In one embodiment, a viral genome may comprise two filler sequences, the first filler sequence may be located between the payload region and intron region, and the second filler sequence may be located between the enhancer region and polyadenylation signal sequence region. In one embodiment, a viral genome may comprise two filler sequences, the first filler sequence may be located between the payload region and intron region, and the second filler sequence may be located between the enhancer region and MCS region. In one embodiment, a viral genome may comprise two filler sequences, the first filler sequence may be located between the payload region and intron region, and the second filler sequence may be located between the enhancer region and exon region. In one embodiment, a viral genome may comprise two filler sequences, the first filler sequence may be located between the payload region and intron region, and the second filler sequence may be located between the enhancer region and 3′ ITR. In one embodiment, a viral genome may comprise two filler sequences, the first filler sequence may be located between the payload region and intron region, and the second filler sequence may be located between the polyadenylation signal sequence region and MCS region. In one embodiment, a viral genome may comprise two filler sequences, the first filler sequence may be located between the payload region and intron region, and the second filler sequence may be located between the polyadenylation signal sequence region and exon region. In one embodiment, a viral genome may comprise two filler sequences, the first filler sequence may be located between the payload region and intron region, and the second filler sequence may be located between the polyadenylation signal sequence region and 3′ ITR. In one embodiment, a viral genome may comprise two filler sequences, the first filler sequence may be located between the payload region and intron region, and the second filler sequence may be located between the MCS region and exon region. In one embodiment, a viral genome may comprise two filler sequences, the first filler sequence may be located between the payload region and intron region, and the second filler sequence may be located between the MCS region and 3′ ITR. In one embodiment, a viral genome may comprise two filler sequences, the first filler sequence may be located between the payload region and intron region, and the second filler sequence may be located between the exon region and 3′ ITR.

[0401] In one embodiment, a viral genome may comprise two filler sequences, the first filler sequence may be located between the payload region and enhancer region, and the second filler sequence may be located between the intron region and enhancer region. In one embodiment, a viral genome may comprise two filler sequences, the first filler sequence may be located between the payload region and enhancer region, and the second filler sequence may be located between the intron region and polyadenylation signal sequence region. In one embodiment, a viral genome may comprise two filler sequences, the first filler sequence may be located between the payload region and enhancer region, and the second filler sequence may be located between the intron region and MCS region. In one embodiment, a viral genome may comprise two filler sequences, the first filler sequence may be located between the payload region and enhancer region, and the second filler sequence may be located between the intron region and exon region. In one embodiment, a viral genome may comprise two filler sequences, the first filler sequence may be located between the payload region and enhancer region, and the second filler sequence may be located between the intron region and 3′ ITR. In one embodiment, a viral genome may comprise two filler sequences, the first filler sequence may be located between the payload region and enhancer region, and the second filler sequence may be located between the enhancer region and polyadenylation signal sequence region. In one embodiment, a viral genome may comprise two filler sequences, the first filler sequence may be located between the payload region and enhancer region, and the second filler sequence may be located between the enhancer region and MCS region. In one embodiment, a viral genome may comprise two filler sequences, the first filler sequence may be located between the payload region and enhancer region, and the second filler sequence may be located between the enhancer region and exon region. In one embodiment, a viral genome may comprise two filler sequences, the first filler sequence may be located between the payload region and enhancer region, and the second filler sequence may be located between the enhancer region and 3′ ITR. In one embodiment, a viral genome may comprise two filler sequences, the first filler sequence may be located between the payload region and enhancer region, and the second filler sequence may be located between the polyadenylation signal sequence region and MCS region. In one embodiment, a viral genome may comprise two filler sequences, the first filler sequence may be located between the payload region and enhancer region, and the second filler sequence may be located between the polyadenylation signal sequence region and exon region. In one embodiment, a viral genome may comprise two filler sequences, the first filler sequence may be located between the payload region and enhancer region, and the second filler sequence may be located between the polyadenylation signal sequence region and 3′ ITR. In one embodiment, a viral genome may comprise two filler sequences, the first filler sequence may be located between the payload region and enhancer region, and the second filler sequence may be located between the MCS region and exon region. In one embodiment, a viral genome may comprise two filler sequences, the first filler sequence may be located between the payload region and enhancer region, and the second filler sequence may be located between the MCS region and 3′ ITR. In one embodiment, a viral genome may comprise two filler sequences, the first filler sequence may be located between the payload region and enhancer region, and the second filler sequence may be located between the exon region and 3′ ITR.

[0402] In one embodiment, a viral genome may comprise two filler sequences, the first filler sequence may be located between the payload region and polyadenylation signal sequence region, and the second filler sequence may be located between the intron region and enhancer region. In one embodiment, a viral genome may comprise two filler sequences, the first filler sequence may be located between the payload region and polyadenylation signal sequence region, and the second filler sequence may be located between the intron region and polyadenylation signal sequence region. In one embodiment, a viral genome may comprise two filler sequences, the first filler sequence may be located between the payload region and polyadenylation signal sequence region, and the second filler sequence may be located between the intron region and MCS region. In one embodiment, a viral genome may comprise two filler sequences, the first filler sequence may be located between the payload region and polyadenylation signal sequence region, and the second filler sequence may be located between the intron region and exon region. In one embodiment, a viral genome may comprise two filler sequences, the first filler sequence may be located between the payload region and polyadenylation signal sequence region, and the second filler sequence may be located between the intron region and 3′ ITR. In one embodiment, a viral genome may comprise two filler sequences, the first filler sequence may be located between the payload region and polyadenylation signal sequence region, and the second filler sequence may be located between the enhancer region and polyadenylation signal sequence region. In one embodiment, a viral genome may comprise two filler sequences, the first filler sequence may be located between the payload region and polyadenylation signal sequence region, and the second filler sequence may be located between the enhancer region and MCS region. In one embodiment, a viral genome may comprise two filler sequences, the first filler sequence may be located between the payload region and polyadenylation signal sequence region, and the second filler sequence may be located between the enhancer region and exon region. In one embodiment, a viral genome may comprise two filler sequences, the first filler sequence may be located between the payload region and polyadenylation signal sequence region, and the second filler sequence may be located between the enhancer region and 3′ ITR. In one embodiment, a viral genome may comprise two filler sequences, the first filler sequence may be located between the payload region and polyadenylation signal sequence region, and the second filler sequence may be located between the polyadenylation signal sequence region and MCS region. In one embodiment, a viral genome may comprise two filler sequences, the first filler sequence may be located between the payload region and polyadenylation signal sequence region, and the second filler sequence may be located between the polyadenylation signal sequence region and exon region. In one embodiment, a viral genome may comprise two filler sequences, the first filler sequence may be located between the payload region and polyadenylation signal sequence region, and the second filler sequence may be located between the polyadenylation signal sequence region and 3′ ITR. In one embodiment, a viral genome may comprise two filler sequences, the first filler sequence may be located between the payload region and polyadenylation signal sequence region, and the second filler sequence may be located between the MCS region and exon region. In one embodiment, a viral genome may comprise two filler sequences, the first filler sequence may be located between the payload region and polyadenylation signal sequence region, and the second filler sequence may be located between the MCS region and 3′ ITR. In one embodiment, a viral genome may comprise two filler sequences, the first filler sequence may be located between the payload region and polyadenylation signal sequence region, and the second filler sequence may be located between the exon region and 3′ ITR.

[0403] In one embodiment, a viral genome may comprise two filler sequences, the first filler sequence may be located between the payload region and MCS region, and the second filler sequence may be located between the intron region and enhancer region. In one embodiment, a viral genome may comprise two filler sequences, the first filler sequence may be located between the payload region and MCS region, and the second filler sequence may be located between the intron region and polyadenylation signal sequence region. In one embodiment, a viral genome may comprise two filler sequences, the first filler sequence may be located between the payload region and MCS region, and the second filler sequence may be located between the intron region and MCS region. In one embodiment, a viral genome may comprise two filler sequences, the first filler sequence may be located between the payload region and MCS region, and the second filler sequence may be located between the intron region and exon region. In one embodiment, a viral genome may comprise two filler sequences, the first filler sequence may be located between the payload region and MCS region, and the second filler sequence may be located between the intron region and 3′ ITR. In one embodiment, a viral genome may comprise two filler sequences, the first filler sequence may be located between the payload region and MCS region, and the second filler sequence may be located between the enhancer region and polyadenylation signal sequence region. In one embodiment, a viral genome may comprise two filler sequences, the first filler sequence may be located between the payload region and MCS region, and the second filler sequence may be located between the enhancer region and MCS region. In one embodiment, a viral genome may comprise two filler sequences, the first filler sequence may be located between the payload region and MCS region, and the second filler sequence may be located between the enhancer region and exon region. In one embodiment, a viral genome may comprise two filler sequences, the first filler sequence may be located between the payload region and MCS region, and the second filler sequence may be located between the enhancer region and 3′ ITR. In one embodiment, a viral genome may comprise two filler sequences, the first filler sequence may be located between the payload region and MCS region, and the second filler sequence may be located between the polyadenylation signal sequence region and MCS region. In one embodiment, a viral genome may comprise two filler sequences, the first filler sequence may be located between the payload region and MCS region, and the second filler sequence may be located between the polyadenylation signal sequence region and exon region. In one embodiment, a viral genome may comprise two filler sequences, the first filler sequence may be located between the payload region and MCS region, and the second filler sequence may be located between the polyadenylation signal sequence region and 3′ ITR. In one embodiment, a viral genome may comprise two filler sequences, the first filler sequence may be located between the payload region and MCS region, and the second filler sequence may be located between the MCS region and exon region. In one embodiment, a viral genome may comprise two filler sequences, the first filler sequence may be located between the payload region and MCS region, and the second filler sequence may be located between the MCS region and 3′ ITR. In one embodiment, a viral genome may comprise two filler sequences, the first filler sequence may be located between the payload region and MCS region, and the second filler sequence may be located between the exon region and 3′ ITR.

[0404] In one embodiment, a viral genome may comprise two filler sequences, the first filler sequence may be located between the payload region and exon region, and the second filler sequence may be located between the intron region and enhancer region. In one embodiment, a viral genome may comprise two filler sequences, the first filler sequence may be located between the payload region and exon region, and the second filler sequence may be located between the intron region and polyadenylation signal sequence region. In one embodiment, a viral genome may comprise two filler sequences, the first filler sequence may be located between the payload region and exon region, and the second filler sequence may be located between the intron region and MCS region. In one embodiment, a viral genome may comprise two filler sequences, the first filler sequence may be located between the payload region and exon region, and the second filler sequence may be located between the intron region and exon region. In one embodiment, a viral genome may comprise two filler sequences, the first filler sequence may be located between the payload region and exon region, and the second filler sequence may be located between the intron region and 3′ ITR. In one embodiment, a viral genome may comprise two filler sequences, the first filler sequence may be located between the payload region and exon region, and the second filler sequence may be located between the enhancer region and polyadenylation signal sequence region. In one embodiment, a viral genome may comprise two filler sequences, the first filler sequence may be located between the payload region and exon region, and the second filler sequence may be located between the enhancer region and MCS region. In one embodiment, a viral genome may comprise two filler sequences, the first filler sequence may be located between the payload region and exon region, and the second filler sequence may be located between the enhancer region and exon region. In one embodiment, a viral genome may comprise two filler sequences, the first filler sequence may be located between the payload region and exon region, and the second filler sequence may be located between the enhancer region and 3′ ITR. In one embodiment, a viral genome may comprise two filler sequences, the first filler sequence may be located between the payload region and exon region, and the second filler sequence may be located between the polyadenylation signal sequence region and MCS region. In one embodiment, a viral genome may comprise two filler sequences, the first filler sequence may be located between the payload region and exon region, and the second filler sequence may be located between the polyadenylation signal sequence region and exon region. In one embodiment, a viral genome may comprise two filler sequences, the first filler sequence may be located between the payload region and exon region, and the second filler sequence may be located between the polyadenylation signal sequence region and 3′ ITR. In one embodiment, a viral genome may comprise two filler sequences, the first filler sequence may be located between the payload region and exon region, and the second filler sequence may be located between the MCS region and exon region. In one embodiment, a viral genome may comprise two filler sequences, the first filler sequence may be located between the payload region and exon region, and the second filler sequence may be located between the MCS region and 3′ ITR. In one embodiment, a viral genome may comprise two filler sequences, the first filler sequence may be located between the payload region and exon region, and the second filler sequence may be located between the exon region and 3′ ITR.

[0405] In one embodiment, a viral genome may comprise two filler sequences, the first filler sequence may be located between the payload region and 3′ ITR region, and the second filler sequence may be located between the intron region and enhancer region. In one embodiment, a viral genome may comprise two filler sequences, the first filler sequence may be located between the payload region and 3′ ITR region, and the second filler sequence may be located between the intron region and polyadenylation signal sequence region. In one embodiment, a viral genome may comprise two filler sequences, the first filler sequence may be located between the payload region and 3′ ITR region, and the second filler sequence may be located between the intron region and MCS region. In one embodiment, a viral genome may comprise two filler sequences, the first filler sequence may be located between the payload region and 3′ ITR region, and the second filler sequence may be located between the intron region and exon region. In one embodiment, a viral genome may comprise two filler sequences, the first filler sequence may be located between the payload region and 3′ ITR region, and the second filler sequence may be located between the intron region and 3′ ITR. In one embodiment, a viral genome may comprise two filler sequences, the first filler sequence may be located between the payload region and 3′ ITR region, and the second filler sequence may be located between the enhancer region and polyadenylation signal sequence region. In one embodiment, a viral genome may comprise two filler sequences, the first filler sequence may be located between the payload region and 3′ ITR region, and the second filler sequence may be located between the enhancer region and MCS region. In one embodiment, a viral genome may comprise two filler sequences, the first filler sequence may be located between the payload region and 3′ ITR region, and the second filler sequence may be located between the enhancer region and exon region. In one embodiment, a viral genome may comprise two filler sequences, the first filler sequence may be located between the payload region and 3′ ITR region, and the second filler sequence may be located between the enhancer region and 3′ ITR. In one embodiment, a viral genome may comprise two filler sequences, the first filler sequence may be located between the payload region and 3′ ITR region, and the second filler sequence may be located between the polyadenylation signal sequence region and MCS region. In one embodiment, a viral genome may comprise two filler sequences, the first filler sequence may be located between the payload region and 3′ ITR region, and the second filler sequence may be located between the polyadenylation signal sequence region and exon region. In one embodiment, a viral genome may comprise two filler sequences, the first filler sequence may be located between the payload region and 3′ ITR region, and the second filler sequence may be located between the polyadenylation signal sequence region and 3′ ITR. In one embodiment, a viral genome may comprise two filler sequences, the first filler sequence may be located between the payload region and 3′ ITR region, and the second filler sequence may be located between the MCS region and exon region. In one embodiment, a viral genome may comprise two filler sequences, the first filler sequence may be located between the payload region and 3′ ITR region, and the second filler sequence may be located between the MCS region and 3′ ITR. In one embodiment, a viral genome may comprise two filler sequences, the first filler sequence may be located between the payload region and 3′ ITR region, and the second filler sequence may be located between the exon region and 3′ ITR.

[0406] In one embodiment, a viral genome may comprise two filler sequences, the first filler sequence may be located between the intron region and enhancer region, and the second filler sequence may be located between the enhancer region and polyadenylation signal sequence region. In one embodiment, a viral genome may comprise two filler sequences, the first filler sequence may be located between the intron region and enhancer region, and the second filler sequence may be located between the enhancer region and MCS region. In one embodiment, a viral genome may comprise two filler sequences, the first filler sequence may be located between the intron region and enhancer region, and the second filler sequence may be located between the enhancer region and exon region. In one embodiment, a viral genome may comprise two filler sequences, the first filler sequence may be located between the intron region and enhancer region, and the second filler sequence may be located between the enhancer region and 3′ ITR. In one embodiment, a viral genome may comprise two filler sequences, the first filler sequence may be located between the intron region and enhancer region, and the second filler sequence may be located between the polyadenylation signal sequence region and MCS region. In one embodiment, a viral genome may comprise two filler sequences, the first filler sequence may be located between the intron region and enhancer region, and the second filler sequence may be located between the polyadenylation signal sequence region and exon region. In one embodiment, a viral genome may comprise two filler sequences, the first filler sequence may be located between the intron region and enhancer region, and the second filler sequence may be located between the polyadenylation signal sequence region and 3′ ITR. In one embodiment, a viral genome may comprise two filler sequences, the first filler sequence may be located between the intron region and enhancer region, and the second filler sequence may be located between the MCS region and exon region. In one embodiment, a viral genome may comprise two filler sequences, the first filler sequence may be located between the intron region and enhancer region, and the second filler sequence may be located between the MCS region and 3′ ITR. In one embodiment, a viral genome may comprise two filler sequences, the first filler sequence may be located between the intron region and enhancer region, and the second filler sequence may be located between the exon region and 3′ ITR.

[0407] In one embodiment, a viral genome may comprise two filler sequences, the first filler sequence may be located between the intron region and polyadenylation signal sequence region, and the second filler sequence may be located between the enhancer region and polyadenylation signal sequence region. In one embodiment, a viral genome may comprise two filler sequences, the first filler sequence may be located between the intron region and polyadenylation signal sequence region, and the second filler sequence may be located between the enhancer region and MCS region. In one embodiment, a viral genome may comprise two filler sequences, the first filler sequence may be located between the intron region and polyadenylation signal sequence region, and the second filler sequence may be located between the enhancer region and exon region. In one embodiment, a viral genome may comprise two filler sequences, the first filler sequence may be located between the intron region and polyadenylation signal sequence region, and the second filler sequence may be located between the enhancer region and 3′ ITR. In one embodiment, a viral genome may comprise two filler sequences, the first filler sequence may be located between the intron region and polyadenylation signal sequence region, and the second filler sequence may be located between the polyadenylation signal sequence region and MCS region. In one embodiment, a viral genome may comprise two filler sequences, the first filler sequence may be located between the intron region and polyadenylation signal sequence region, and the second filler sequence may be located between the polyadenylation signal sequence region and exon region. In one embodiment, a viral genome may comprise two filler sequences, the first filler sequence may be located between the intron region and polyadenylation signal sequence region, and the second filler sequence may be located between the polyadenylation signal sequence region and 3′ ITR. In one embodiment, a viral genome may comprise two filler sequences, the first filler sequence may be located between the intron region and polyadenylation signal sequence region, and the second filler sequence may be located between the MCS region and exon region. In one embodiment, a viral genome may comprise two filler sequences, the first filler sequence may be located between the intron region and polyadenylation signal sequence region, and the second filler sequence may be located between the MCS region and 3′ ITR. In one embodiment, a viral genome may comprise two filler sequences, the first filler sequence may be located between the intron region and polyadenylation signal sequence region, and the second filler sequence may be located between the exon region and 3′ ITR.

[0408] In one embodiment, a viral genome may comprise two filler sequences, the first filler sequence may be located between the intron region and MCS region, and the second filler sequence may be located between the enhancer region and polyadenylation signal sequence region. In one embodiment, a viral genome may comprise two filler sequences, the first filler sequence may be located between the intron region and MCS region, and the second filler sequence may be located between the enhancer region and MCS region. In one embodiment, a viral genome may comprise two filler sequences, the first filler sequence may be located between the intron region and MCS region, and the second filler sequence may be located between the enhancer region and exon region. In one embodiment, a viral genome may comprise two filler sequences, the first filler sequence may be located between the intron region and MCS region, and the second filler sequence may be located between the enhancer region and 3′ ITR. In one embodiment, a viral genome may comprise two filler sequences, the first filler sequence may be located between the intron region and MCS region, and the second filler sequence may be located between the polyadenylation signal sequence region and MCS region. In one embodiment, a viral genome may comprise two filler sequences, the first filler sequence may be located between the intron region and MCS region, and the second filler sequence may be located between the polyadenylation signal sequence region and exon region. In one embodiment, a viral genome may comprise two filler sequences, the first filler sequence may be located between the intron region and MCS region, and the second filler sequence may be located between the polyadenylation signal sequence region and 3′ ITR. In one embodiment, a viral genome may comprise two filler sequences, the first filler sequence may be located between the intron region and MCS region, and the second filler sequence may be located between the MCS region and exon region. In one embodiment, a viral genome may comprise two filler sequences, the first filler sequence may be located between the intron region and MCS region, and the second filler sequence may be located between the MCS region and 3′ ITR. In one embodiment, a viral genome may comprise two filler sequences, the first filler sequence may be located between the intron region and MCS region, and the second filler sequence may be located between the exon region and 3′ ITR.

[0409] In one embodiment, a viral genome may comprise two filler sequences, the first filler sequence may be located between the intron region and exon region, and the second filler sequence may be located between the enhancer region and polyadenylation signal sequence region. In one embodiment, a viral genome may comprise two filler sequences, the first filler sequence may be located between the intron region and exon region, and the second filler sequence may be located between the enhancer region and MCS region. In one embodiment, a viral genome may comprise two filler sequences, the first filler sequence may be located between the intron region and exon region, and the second filler sequence may be located between the enhancer region and exon region. In one embodiment, a viral genome may comprise two filler sequences, the first filler sequence may be located between the intron region and exon region, and the second filler sequence may be located between the enhancer region and 3′ ITR. In one embodiment, a viral genome may comprise two filler sequences, the first filler sequence may be located between the intron region and exon region, and the second filler sequence may be located between the polyadenylation signal sequence region and MCS region. In one embodiment, a viral genome may comprise two filler sequences, the first filler sequence may be located between the intron region and exon region, and the second filler sequence may be located between the polyadenylation signal sequence region and exon region. In one embodiment, a viral genome may comprise two filler sequences, the first filler sequence may be located between the intron region and exon region, and the second filler sequence may be located between the polyadenylation signal sequence region and 3′ ITR. In one embodiment, a viral genome may comprise two filler sequences, the first filler sequence may be located between the intron region and exon region, and the second filler sequence may be located between the MCS region and exon region. In one embodiment, a viral genome may comprise two filler sequences, the first filler sequence may be located between the intron region and exon region, and the second filler sequence may be located between the MCS region and 3′ ITR. In one embodiment, a viral genome may comprise two filler sequences, the first filler sequence may be located between the intron region and exon region, and the second filler sequence may be located between the exon region and 3′ ITR.

[0410] In one embodiment, a viral genome may comprise two filler sequences, the first filler sequence may be located between the intron region and 3′ITR, and the second filler sequence may be located between the enhancer region and polyadenylation signal sequence region. In one embodiment, a viral genome may comprise two filler sequences, the first filler sequence may be located between the intron region and 3′ITR, and the second filler sequence may be located between the enhancer region and MCS region. In one embodiment, a viral genome may comprise two filler sequences, the first filler sequence may be located between the intron region and 3′ITR, and the second filler sequence may be located between the enhancer region and exon region. In one embodiment, a viral genome may comprise two filler sequences, the first filler sequence may be located between the intron region and 3′ITR, and the second filler sequence may be located between the enhancer region and 3′ ITR. In one embodiment, a viral genome may comprise two filler sequences, the first filler sequence may be located between the intron region and 3′ITR, and the second filler sequence may be located between the polyadenylation signal sequence region and MCS region. In one embodiment, a viral genome may comprise two filler sequences, the first filler sequence may be located between the intron region and 3′ITR, and the second filler sequence may be located between the polyadenylation signal sequence region and exon region. In one embodiment, a viral genome may comprise two filler sequences, the first filler sequence may be located between the intron region and 3′ITR, and the second filler sequence may be located between the polyadenylation signal sequence region and 3′ ITR. In one embodiment, a viral genome may comprise two filler sequences, the first filler sequence may be located between the intron region and 3′ITR, and the second filler sequence may be located between the MCS region and exon region. In one embodiment, a viral genome may comprise two filler sequences, the first filler sequence may be located between the intron region and 3′ITR, and the second filler sequence may be located between the MCS region and 3′ ITR. In one embodiment, a viral genome may comprise two filler sequences, the first filler sequence may be located between the intron region and 3′ITR, and the second filler sequence may be located between the exon region and 3′ ITR.

[0411] In one embodiment, a viral genome may comprise two filler sequences, the first filler sequence may be located between the enhancer region and polyadenylation signal sequence region, and the second filler sequence may be located between the polyadenylation signal sequence region and MCS region. In one embodiment, a viral genome may comprise two filler sequences, the first filler sequence may be located between the enhancer region and polyadenylation signal sequence region, and the second filler sequence may be located between the polyadenylation signal sequence region and exon region. In one embodiment, a viral genome may comprise two filler sequences, the first filler sequence may be located between the enhancer region and polyadenylation signal sequence region, and the second filler sequence may be located between the polyadenylation signal sequence region and 3′ ITR. In one embodiment, a viral genome may comprise two filler sequences, the first filler sequence may be located between the enhancer region and polyadenylation signal sequence region, and the second filler sequence may be located between the MCS region and exon region. In one embodiment, a viral genome may comprise two filler sequences, the first filler sequence may be located between the enhancer region and polyadenylation signal sequence region, and the second filler sequence may be located between the MCS region and 3′ ITR. In one embodiment, a viral genome may comprise two filler sequences, the first filler sequence may be located between the enhancer region and polyadenylation signal sequence region, and the second filler sequence may be located between the exon region and 3′ ITR.

[0412] In one embodiment, a viral genome may comprise two filler sequences, the first filler sequence may be located between the enhancer region and MCS region, and the second filler sequence may be located between the polyadenylation signal sequence region and MCS region. In one embodiment, a viral genome may comprise two filler sequences, the first filler sequence may be located between the enhancer region and MCS region, and the second filler sequence may be located between the polyadenylation signal sequence region and exon region. In one embodiment, a viral genome may comprise two filler sequences, the first filler sequence may be located between the enhancer region and MCS region, and the second filler sequence may be located between the polyadenylation signal sequence region and 3′ ITR. In one embodiment, a viral genome may comprise two filler sequences, the first filler sequence may be located between the enhancer region and MCS region, and the second filler sequence may be located between the MCS region and exon region. In one embodiment, a viral genome may comprise two filler sequences, the first filler sequence may be located between the enhancer region and MCS region, and the second filler sequence may be located between the MCS region and 3′ ITR. In one embodiment, a viral genome may comprise two filler sequences, the first filler sequence may be located between the enhancer region and MCS region, and the second filler sequence may be located between the exon region and 3′ ITR.

[0413] In one embodiment, a viral genome may comprise two filler sequences, the first filler sequence may be located between the enhancer region and exon region, and the second filler sequence may be located between the polyadenylation signal sequence region and MCS region. In one embodiment, a viral genome may comprise two filler sequences, the first filler sequence may be located between the enhancer region and exon region, and the second filler sequence may be located between the polyadenylation signal sequence region and exon region. In one embodiment, a viral genome may comprise two filler sequences, the first filler sequence may be located between the enhancer region and exon region, and the second filler sequence may be located between the polyadenylation signal sequence region and 3′ ITR. In one embodiment, a viral genome may comprise two filler sequences, the first filler sequence may be located between the enhancer region and exon region, and the second filler sequence may be located between the MCS region and exon region. In one embodiment, a viral genome may comprise two filler sequences, the first filler sequence may be located between the enhancer region and exon region, and the second filler sequence may be located between the MCS region and 3′ ITR. In one embodiment, a viral genome may comprise two filler sequences, the first filler sequence may be located between the enhancer region and exon region, and the second filler sequence may be located between the exon region and 3′ ITR.

[0414] In one embodiment, a viral genome may comprise two filler sequences, the first filler sequence may be located between the enhancer region and 3′ ITR, and the second filler sequence may be located between the polyadenylation signal sequence region and MCS region. In one embodiment, a viral genome may comprise two filler sequences, the first filler sequence may be located between the enhancer region and 3′ ITR, and the second filler sequence may be located between the polyadenylation signal sequence region and exon region. In one embodiment, a viral genome may comprise two filler sequences, the first filler sequence may be located between the enhancer region and 3′ ITR, and the second filler sequence may be located between the polyadenylation signal sequence region and 3′ ITR. In one embodiment, a viral genome may comprise two filler sequences, the first filler sequence may be located between the enhancer region and 3′ ITR, and the second filler sequence may be located between the MCS region and exon region. In one embodiment, a viral genome may comprise two filler sequences, the first filler sequence may be located between the enhancer region and 3′ ITR, and the second filler sequence may be located between the MCS region and 3′ ITR. In one embodiment, a viral genome may comprise two filler sequences, the first filler sequence may be located between the enhancer region and 3′ ITR, and the second filler sequence may be located between the exon region and 3′ ITR.

[0415] In one embodiment, a viral genome may comprise two filler sequences, the first filler sequence may be located between the polyadenylation signal sequence region and MCS region, and the second filler sequence may be located between the MCS region and exon region. In one embodiment, a viral genome may comprise two filler sequences, the first filler sequence may be located between the polyadenylation signal sequence region and MCS region, and the second filler sequence may be located between the MCS region and 3′ ITR. In one embodiment, a viral genome may comprise two filler sequences, the first filler sequence may be located between the polyadenylation signal sequence region and MCS region, and the second filler sequence may be located between the exon region and 3′ ITR.

[0416] In one embodiment, a viral genome may comprise two filler sequences, the first filler sequence may be located between the polyadenylation signal sequence region and exon region, and the second filler sequence may be located between the MCS region and exon region. In one embodiment, a viral genome may comprise two filler sequences, the first filler sequence may be located between the polyadenylation signal sequence region and exon region, and the second filler sequence may be located between the MCS region and 3′ ITR. In one embodiment, a viral genome may comprise two filler sequences, the first filler sequence may be located between the polyadenylation signal sequence region and exon region, and the second filler sequence may be located between the exon region and 3′ ITR.

[0417] In one embodiment, a viral genome may comprise two filler sequences, the first filler sequence may be located between the polyadenylation signal sequence region and 3′ ITR, and the second filler sequence may be located between the MCS region and exon region. In one embodiment, a viral genome may comprise two filler sequences, the first filler sequence may be located between the polyadenylation signal sequence region and 3′ ITR, and the second filler sequence may be located between the MCS region and 3′ ITR. In one embodiment, a viral genome may comprise two filler sequences, the first filler sequence may be located between the polyadenylation signal sequence region and 3′ ITR, and the second filler sequence may be located between the exon region and 3′ ITR.

[0418] In one embodiment, a viral genome may comprise two filler sequences, the first filler sequence may be located between the MCS region and exon region, and the second filler sequence may be located between the exon region and 3′ ITR.

### Payloads of the Invention

[0419] The AAV particles of the present disclosure comprise at least one payload region. As used herein, “payload” or “payload region” refers to one or more polynucleotides or polynucleotide regions encoded by or within a viral genome or an expression product of such polynucleotide or polynucleotide region, e.g., a transgene, a polynucleotide encoding a polypeptide or multi-polypeptide or a modulatory nucleic acid or regulatory nucleic acid. Payloads of the present invention typically encode modulatory polynucleotides or fragments or variants thereof.

[0420] The payload region may be constructed in such a way as to reflect a region similar to or mirroring the natural organization of an mRNA.

[0421] The payload region may comprise a combination of coding and non-coding nucleic acid sequences.

[0422] In some embodiments, the AAV payload region may encode a coding or non-coding RNA.

[0423] In one embodiment, the AAV particle comprises a viral genome with a payload region comprising nucleic acid sequences encoding a siRNA, miRNA or other RNAi agent. In such an embodiment, a viral genome encoding more than one polypeptide may be replicated and packaged into a viral particle. A target cell transduced with a viral particle may express the encoded siRNA, miRNA or other RNAi agent inside a single cell.

### Modulatory Polynucleotides

[0424] In one embodiment, modulatory polynucleotides, e.g., RNA or DNA molecules, may be used to treat at least one neurodegenerative disease. As used herein, a “modulatory polynucleotide” is any nucleic acid sequence(s) which functions to modulate (either increase or decrease) the level or amount of a target gene, e.g., mRNA or protein levels.

[0425] In one embodiment, the modulatory polynucleotides may comprise at least one nucleic acid sequence encoding at least one siRNA molecule. The nucleic acids may, independently if there is more than one, encode 1, 2, 3, 4, 5, 6, 7, 8, 9, or more than 9 siRNA molecules.

[0426] In one embodiment, the molecular scaffold may be located downstream of a CMV promoter, fragment or variant thereof.

[0427] In one embodiment, the molecular scaffold may be located downstream of a CBA promoter, fragment or variant thereof.

[0428] In one embodiment, the molecular scaffold may be a natural pri-miRNA scaffold located downstream of a CMV promoter. As a non-limiting example, the natural pri-miRNA scaffold is derived from the human miR155 scaffold.

[0429] In one embodiment, the molecular scaffold may be a natural pri-miRNA scaffold located downstream of a CBA promoter.

[0430] In one embodiment, the selection of a molecular scaffold and modulatory polynucleotide is determined by a method of comparing modulatory polynucleotides in pri-miRNA (see e.g., the method described by Miniarikova et al. Design, Characterization, and Lead Selection of Therapeutic miRNAs Targeting Huntingtin for Development of Gene Therapy for Huntington's Disease. Molecular Therapy-Nucleic Acids (2016) 5, e297 and International Publication No. WO2016102664; the contents of each of which are herein incorporated by reference in their entireties). To evaluate the activities of the modulatory polynucleotides, the molecular scaffold used which may be used is a human pri-miRNA scaffold (e.g., miR155 scaffold) and the promoter may be CMV. The activity may be determined in vitro using HEK293T cells and a reporter (e.g., Luciferase).

[0431] In order to evaluate the optimal molecular scaffold for the modulatory polynucleotide, the modulatory polynucleotide is used in pri-miRNA scaffolds with a CAG promoter. The constructs are co-transfected with a reporter (e.g., luciferase reporter) at 50 ng. Constructs with greater than 80% knockdown at 50 ng co-transfection are considered efficient. In one aspect, the constructs with strong guide-strand activity are preferred. The molecular scaffolds can be processed in HEK293T cells by NGS to determine guide-passenger ratios, and processing variability.

[0432] In one embodiment, the disease to be treated is HD and the modulatory polynucleotide may, but it not limited to, targeting exon 1, CAG repeats, SNP rs362331 in exon 50 and/or SNP rs362307 in exon 67. For exon 1 targeting, the modulatory polynucleotide is determined to be efficient at HTT knockdown if the knockdown is 80% or greater. For CAG targeting, the modulatory polynucleotide is determined to be efficient at HTT knockdown if the knockdown is at least 60%. For SNP targeting, the modulatory polynucleotide is determined to be efficient at HTT knockdown if the knockdown is at least 60%. For allele selectivity for CAG repeats or SNP targeting the modulatory polynucleotides may comprise at least 1 substitution in order to improve allele selectivity. As a non-limiting example, substitution may be a G or C replaced with a T or corresponding U and A or T/U replaced by a C.

[0433] To evaluate the molecular scaffolds and modulatory polynucleotides in vivo the molecular scaffolds comprising the modulatory polynucleotides are packaged in AAV (e.g., the serotype may be AAV5 (see e.g., the method and constructs described in WO2015060722, the contents of which are herein incorporated by reference in their entirety)) and administered to an in vivo model (e.g., For HD, a Hu128/21 HD mouse may be used) and the guide-passenger ratios, 5′ and 3′ end processing, reversal of guide and passenger strands, and knockdown can be determined in different areas of the model.

[0434] In one embodiment, the selection of a molecular scaffold and modulatory polynucleotide is determined by a method of comparing modulatory polynucleotides in natural pri-miRNA and synthetic pri-miRNA. The modulatory polynucleotide may, but it not limited to, targeting an exon other than exon 1. To evaluate the activities of the modulatory polynucleotides, the molecular scaffold is used with a CBA promoter. In one aspect, the activity may be determined in vitro using HEK293T cells, HeLa cell and a reporter (e.g., Luciferase) and knockdown efficient modulatory polynucleotides showed the gene of interest knockdown of at least 80% in the cell tested. Additionally, the modulatory polynucleotides which are considered most efficient showed low to no significant passenger strand (p-strand) activity. In another aspect, the endogenous gene of interest knockdown efficacy is evaluated by transfection in vitro using HEK293T cells, HeLa cell and a reporter. Efficient modulatory polynucleotides show greater than 50% endogenous gene of interest knockdown. In yet another aspect, the endogenous gene of interest knockdown efficacy is evaluated in different cell types (e.g., HEK293, HeLa, primary astrocytes, U251 astrocytes, SH-SY5Y neuron cells and fibroblasts from subjects with the disease to be treated) by infection (e.g., AAV2). Efficient modulatory polynucleotides show greater than 60% endogenous gene of interest knockdown.

[0435] To evaluate the molecular scaffolds and modulatory polynucleotides in vivo the molecular scaffolds comprising the modulatory polynucleotides are packaged in AAV and administered to an in vivo model (e.g., For treating HD, a YAC128 HD mouse model may be used) and the guide-passenger ratios, 5′ and 3′ end processing, ratio of guide to passenger strands, and knockdown can be determined in different areas of the model (e.g., tissue regions). The molecular scaffolds can be processed from in vivo samples by NGS to determine guide-passenger ratios, and processing variability.

[0436] In one embodiment, the modulatory polynucleotide is designed using at least one of the following properties: loop variant, seed mismatch/bulge/wobble variant, stem mismatch, loop variant and vassal stem mismatch variant, seed mismatch and basal stem mismatch variant, stem mismatch and basal stem mismatch variant, seed wobble and basal stem wobble variant, or a stem sequence variant.

siRNA Molecules

[0437] The present invention relates to RNA interference (RNAi) induced inhibition of gene expression for treating neurodegenerative disorders. Provided herein are siRNA duplexes or encoded dsRNA that target the gene of interest (referred to herein collectively as “siRNA molecules”). Such siRNA duplexes or encoded dsRNA can reduce or silence gene expression in cells, such as but not limited to, medium spiny neurons, cortical neurons and/or astrocytes.

[0438] RNAi (also known as post-transcriptional gene silencing (PTGS), quelling, or co-suppression) is a post-transcriptional gene silencing process in which RNA molecules, in a sequence specific manner, inhibit gene expression, typically by causing the destruction of specific mRNA molecules. The active components of RNAi are short/small double stranded RNAs (dsRNAs), called small interfering RNAs (siRNAs), that typically contain 15-30 nucleotides (e.g., 19 to 25, 19 to 24 or 19-21 nucleotides) and 2 nucleotide 3′ overhangs and that match the nucleic acid sequence of the target gene. These short RNA species may be naturally produced in vivo by Dicer-mediated cleavage of larger dsRNAs and they are functional in mammalian cells.

[0439] Naturally expressed small RNA molecules, named microRNAs (miRNAs), elicit gene silencing by regulating the expression of mRNAs. The miRNAs containing RNA Induced Silencing Complex (RISC) targets mRNAs presenting a perfect sequence complementarity with nucleotides 2-7 in the 5′ region of the miRNA which is called the seed region, and other base pairs with its 3′ region. miRNA mediated down regulation of gene expression may be caused by cleavage of the target mRNAs, translational inhibition of the target mRNAs, or mRNA decay. miRNA targeting sequences are usually located in the 3′-UTR of the target mRNAs. A single miRNA may target more than 100 transcripts from various genes, and one mRNA may be targeted by different miRNAs.

[0440] siRNA duplexes or dsRNA targeting a specific mRNA may be designed and synthesized in vitro and introduced into cells for activating RNAi processes. Elbashir et al. demonstrated that 21-nucleotide siRNA duplexes (termed small interfering RNAs) were capable of effecting potent and specific gene knockdown without inducing immune response in mammalian cells (Elbashir S M et al., Nature, 2001, 411, 494-498). Since this initial report, post-transcriptional gene silencing by siRNAs quickly emerged as a powerful tool for genetic analysis in mammalian cells and has the potential to produce novel therapeutics.

[0441] RNAi molecules which were designed to target against a nucleic acid sequence that encodes poly-glutamine repeat proteins which cause poly-glutamine expansion diseases such as Huntington's Disease, are described in U.S. Pat. Nos. 9,169,483 and 9,181,544 and International Patent Publication No. WO2015179525, the content of each of which is herein incorporated by reference in their entirety. U.S. Pat. Nos. 9,169,483 and 9,181,544 and International Patent Publication No. WO2015179525 each provide isolated RNA duplexes comprising a first strand of RNA (e.g., 15 contiguous nucleotides) and second strand of RNA (e.g., complementary to at least 12 contiguous nucleotides of the first strand) where the RNA duplex is about 15 to 30 base pairs in length. The first strand of RNA and second strand of RNA may be operably linked by an RNA loop (˜4 to 50 nucleotides) to form a hairpin structure which may be inserted into an expression cassette. Non-limiting examples of loop portions include SEQ ID NO: 9-14 of U.S. Pat. No. 9,169,483, the content of which is herein incorporated by reference in its entirety. Non-limiting examples of strands of RNA which may be used, either full sequence or part of the sequence, to form RNA duplexes include SEQ ID NO: 1-8 of U.S. Pat. No. 9,169,483 and SEQ ID NO: 1-11, 33-59, 208-210, 213-215 and 218-221 of U.S. Pat. No. 9,181,544, the contents of each of which is herein incorporated by reference in its entirety. Non-limiting examples of RNAi molecules include SEQ ID NOs: 1-8 of U.S. Pat. No. 9,169,483, SEQ ID NOs: 1-11, 33-59, 208-210, 213-215 and 218-221 of U.S. Pat. No. 9,181,544 and SEQ ID NOs: 1, 6, 7, and 35-38 of International Patent Publication No. WO2015179525, the contents of each of which is herein incorporated by reference in their entirety.

[0442] In vitro synthetized siRNA molecules may be introduced into cells in order to activate RNAi. An exogenous siRNA duplex, when it is introduced into cells, similar to the endogenous dsRNAs, can be assembled to form the RNA Induced Silencing Complex (RISC), a multiunit complex that interacts with RNA sequences that are complementary to one of the two strands of the siRNA duplex (i.e., the antisense strand). During the process, the sense strand (or passenger strand) of the siRNA is lost from the complex, while the antisense strand (or guide strand) of the siRNA is matched with its complementary RNA. In particular, the targets of siRNA containing RISC complexes are mRNAs presenting a perfect sequence complementarity. Then, siRNA mediated gene silencing occurs by cleaving, releasing and degrading the target.

[0443] The siRNA duplex comprised of a sense strand homologous to the target mRNA and an antisense strand that is complementary to the target mRNA offers much more advantage in terms of efficiency for target RNA destruction compared to the use of the single strand (ss)-siRNAs (e.g. antisense strand RNA or antisense oligonucleotides). In many cases, it requires higher concentration of the ss-siRNA to achieve the effective gene silencing potency of the corresponding duplex.

[0444] Any of the foregoing molecules may be encoded by a viral genome.

Design and Sequences of siRNA Duplexes Targeting Gene of Interest

[0445] The present invention provides small interfering RNA (siRNA) duplexes (and modulatory polynucleotides encoding them) that target mRNA to interfere with gene expression and/or protein production.

[0446] The encoded siRNA duplex of the present invention contains an antisense strand and a sense strand hybridized together forming a duplex structure, wherein the antisense strand is complementary to the nucleic acid sequence of the targeted gene, and wherein the sense strand is homologous to the nucleic acid sequence of the targeted gene. In some aspects, the 5′ end of the antisense strand has a 5′ phosphate group and the 3′ end of the sense strand contains a 3′hydroxyl group. In other aspects, there are none, one or 2 nucleotide overhangs at the 3′end of each strand.

[0447] Some guidelines for designing siRNAs have been proposed in the art. These guidelines generally recommend generating a 19-nucleotide duplexed region, symmetric 2-3 nucleotide 3′ overhangs, 5′-phosphate and 3′-hydroxyl groups targeting a region in the gene to be silenced. Other rules that may govern siRNA sequence preference include, but are not limited to, (i) A/U at the 5′ end of the antisense strand; (ii) G/C at the 5′ end of the sense strand; (iii) at least five A/U residues in the 5′ terminal one-third of the antisense strand; and (iv) the absence of any GC stretch of more than 9 nucleotides in length. In accordance with such consideration, together with the specific sequence of a target gene, highly effective siRNA molecules essential for suppressing mammalian target gene expression may be readily designed.

[0448] According to the present invention, siRNA molecules (e.g., siRNA duplexes or encoded dsRNA) that target the gene of interest are designed. Such siRNA molecules can specifically, suppress gene expression and protein production. In some aspects, the siRNA molecules are designed and used to selectively “knock out” gene variants in cells, i.e., mutated transcripts. In some aspects, the siRNA molecules are designed and used to selectively “knock down” gene variants in cells. In other aspects, the siRNA molecules are able to inhibit or suppress both the wild type and mutated version of the gene of interest.

[0449] In one embodiment, an siRNA molecule of the present invention comprises a sense strand and a complementary antisense strand in which both strands are hybridized together to form a duplex structure. The antisense strand has sufficient complementarity to the target mRNA sequence to direct target-specific RNAi, i.e., the siRNA molecule has a sequence sufficient to trigger the destruction of the target mRNA by the RNAi machinery or process.

[0450] In one embodiment, an siRNA molecule of the present invention comprises a sense strand and a complementary antisense strand in which both strands are hybridized together to form a duplex structure and where the start site of the hybridization to the mRNA is between nucleotide 10 and 7000 on the mRNA sequence. As a non-limiting example, the start site may be between nucleotide 10-20, 20-30, 30-40, 40-50, 60-70, 70-80, 80-90, 90-100, 100-150, 150-200, 200-250, 250-300, 300-350, 350-400, 400-450, 450-500, 500-550, 550-600, 600-650, 650-700, 700-70, 750-800, 800-850, 850-900, 900-950, 950-1000, 1000-1050, 1050-1100, 1100-1150, 1150-1200, 1200-1250, 1250-1300, 1300-1350, 1350-1400, 1400-1450, 1450-1500, 1500-1550, 1550-1600, 1600-1650, 1650-1700, 1700-1750, 1750-1800, 1800-1850, 1850-1900, 1900-1950, 1950-2000, 2000-2050, 2050-2100, 2100-2150, 2150-2200, 2200-2250, 2250-2300, 2300-2350, 2350-2400, 2400-2450, 2450-2500, 2500-2550, 2550-2600, 2600-2650, 2650-2700, 2700-2750, 2750-2800, 2800-2850, 2850-2900, 2900-2950, 2950-3000, 3000-3050, 3050-3100, 3100-3150, 3150-3200, 3200-3250, 3250-3300, 3300-3350, 3350-3400, 3400-3450, 3450-3500, 3500-3550, 3550-3600, 3600-3650, 3650-3700, 3700-3750, 3750-3800, 3800-3850, 3850-3900, 3900-3950, 3950-4000, 4000-4050, 4050-4100, 4100-4150, 4150-4200, 4200-4250, 4250-4300, 4300-4350, 4350-4400, 4400-4450, 4450-4500, 4500-4550, 4550-4600, 4600-4650, 4650-4700, 4700-4750, 4750-4800, 4800-4850, 4850-4900, 4900-4950, 4950-5000, 5000-5050, 5050-5100, 5100-5150, 5150-5200, 5200-5250, 5250-5300, 5300-5350, 5350-5400, 5400-5450, 5450-5500, 5500-5550, 5550-5600, 5600-5650, 5650-5700, 5700-5750, 5750-5800, 5800-5850, 5850-5900, 5900-5950, 5950-6000, 6000-6050, 6050-6100, 6100-6150, 6150-6200, 6200-6250, 6250-6300, 6300-6350, 6350-6400, 6400-6450, 6450-6500, 6500-6550, 6550-6600, 6600-6650, 6650-6700, 6700-6750, 6750-6800, 6800-6850, 6850-6900, 6900-6950, 6950-7000, 7000-7050, 7050-7100, 7100-7150, 7150-7200, 7200-7250, 7250-7300, 7300-7350, 7350-7400, 7400-7450, 7450-7500, 7500-7550, 7550-7600, 7600-7650, 7650-7700, 7700-7750, 7750-7800, 7800-7850, 7850-7900, 7900-7950, 7950-8000, 8000-8050, 8050-8100, 8100-8150, 8150-8200, 8200-8250, 8250-8300, 8300-8350, 8350-8400, 8400-8450, 8450-8500, 8500-8550, 8550-8600, 8600-8650, 8650-8700, 8700-8750, 8750-8800, 8800-8850, 8850-8900, 8900-8950, 8950-9000, 9000-9050, 9050-9100, 9100-9150, 9150-9200, 9200-9250, 9250-9300, 9300-9350, 9350-9400, 9400-9450, 9450-9500, 9500-9550, 9550-9600, 9600-9650, 9650-9700, 9700-9750, 9750-9800, 9800-9850, 9850-9900, 9900-9950, 9950-10000, 10000-10050, 10050-10100, 10100-10150, 10150-10200, 10200-10250, 10250-10300, 10300-10350, 10350-10400, 10400-10450, 10450-10500, 10500-10550, 10550-10600, 10600-10650, 10650-10700, 10700-10750, 10750-10800, 10800-10850, 10850-10900, 10900-10950, 10950-11000, 11050-11100, 11100-11150, 11150-11200, 11200-11250, 11250-11300, 11300-11350, 11350-11400, 11400-11450, 11450-11500, 11500-11550, 11550-11600, 11600-11650, 11650-11700, 11700-11750, 11750-11800, 11800-11850, 11850-11900, 11900-11950, 11950-12000, 12000-12050, 12050-12100, 12100-12150, 12150-12200, 12200-12250, 12250-12300, 12300-12350, 12350-12400, 12400-12450, 12450-12500, 12500-12550, 12550-12600, 12600-12650, 12650-12700, 12700-12750, 12750-12800, 12800-12850, 12850-12900, 12900-12950, 12950-13000, 13050-13100, 13100-13150, 13150-13200, 13200-13250, 13250-13300, 13300-13350, 13350-13400, 13400-13450, and 13450-13500 on the target mRNA sequence. As yet another non-limiting example, the start site may be nucleotide 10, 11, 12, 13, 14, 15, 16, 17, 18, 19, 20, 21, 22, 23, 24, 25, 26, 27, 28, 29, 30, 31, 32, 33, 34, 35, 36, 37, 38, 39, 40, 41, 42, 43, 44, 45, 46, 47, 48, 49, 50, 51, 52, 53, 54, 55, 56, 57, 58, 59, 60, 61, 62, 63, 64, 65, 66, 67, 68, 69, 70, 71, 72, 73, 74, 75, 76, 77, 78, 79, 80, 81, 82, 83, 84, 85, 86, 87, 88, 89, 90, 91, 92, 93, 94, 95, 96, 97, 98, 99, 100, 101, 102, 103, 104, 105, 106, 107, 108, 109, 110, 111, 112, 113, 114, 115, 116, 117, 118, 119, 120, 121, 122, 123, 124, 125, 126, 127, 128, 129, 130, 131, 132, 133, 134, 135, 136, 137, 138, 139, 140, 141, 142, 143, 144, 145, 146, 147, 148, 149, 150, 151, 152, 153, 154, 155, 156, 157, 158, 159, 160, 161, 162, 163, 164, 165, 166, 167, 168, 169, 170, 171, 172, 173, 174, 175, 176, 177, 178, 179, 180, 181, 182, 183, 184, 185, 186, 187, 188, 189, 190, 191, 192, 193, 194, 195, 196, 197, 198, 199, 200, 201, 202, 203, 204, 205, 206, 207, 208, 209, 210, 211, 212, 213, 214, 215, 216, 217, 218, 219, 220, 221, 222, 223, 224, 225, 226, 227, 228, 229, 230, 231, 232, 233, 234, 235, 236, 237, 238, 239, 240, 241, 242, 243, 244, 245, 246, 247, 248, 249, 250, 251, 252, 253, 254, 255, 256, 257, 258, 259, 260, 261, 262, 263, 264, 265, 266, 267, 268, 269, 270, 271, 272, 273, 274, 275, 276, 277, 278, 279, 280, 281, 282, 283, 284, 285, 286, 287, 288, 289, 290, 291, 292, 293, 294, 295, 296, 297, 298, 299, 300, 301, 302, 303, 304, 305, 306, 307, 308, 309, 310, 311, 312, 313, 314, 315, 316, 317, 318, 319, 320, 321, 322, 323, 324, 325, 326, 327, 328, 329, 330, 331, 332, 333, 334, 335, 336, 337, 338, 339, 340, 341, 342, 343, 344, 345, 346, 347, 348, 349, 350, 351, 352, 353, 354, 355, 356, 357, 358, 359, 360, 361, 362, 363, 364, 365, 366, 367, 368, 369, 370, 371, 372, 373, 374, 375, 376, 377, 378, 379, 380, 381, 382, 383, 384, 385, 386, 387, 388, 389, 390, 391, 392, 393, 394, 395, 396, 397, 398, 399, 400, 401, 402, 403, 404, 405, 406, 407, 408, 409, 410, 411, 412, 413, 414, 415, 416, 417, 418, 419, 420, 421, 422, 423, 424, 425, 426, 427, 428, 429, 430, 431, 432, 433, 434, 435, 436, 437, 438, 439, 440, 441, 442, 443, 444, 445, 446, 447, 448, 449, 450, 451, 452, 453, 454, 455, 456, 457, 458, 459, 460, 461, 462, 463, 464, 465, 466, 467, 468, 469, 470, 471, 472, 473, 474, 475, 476, 477, 478, 479, 480, 481, 482, 483, 484, 485, 486, 487, 488, 489, 490, 491, 492, 493, 494, 495, 496, 497, 498, 499, 500, 501, 502, 503, 504, 505, 506, 507, 508, 509, 510, 511, 512, 513, 514, 515, 516, 517, 518, 519, 520, 521, 522, 523, 524, 525, 526, 527, 528, 529, 530, 531, 532, 533, 534, 535, 536, 537, 538, 539, 540, 541, 542, 543, 544, 545, 546, 547, 548, 549, 550, 551, 552, 553, 554, 555, 556, 557, 558, 559, 560, 561, 562, 563, 564, 565, 566, 567, 568, 569, 570, 571, 572, 573, 574, 575, 576, 577, 578, 579, 580, 581, 582, 583, 584, 585, 586, 587, 588, 589, 590, 591, 592, 593, 594, 595, 596, 597, 598, 599, 600, 601, 602, 603, 604, 605, 606, 607, 608, 609, 610, 611, 612, 613, 614, 615, 616, 617, 618, 619, 620, 621, 622, 623, 624, 625, 626, 627, 628, 629, 630, 631, 632, 633, 634, 635, 636, 637, 638, 639, 640, 641, 642, 643, 644, 645, 646, 647, 648, 649, 650, 651, 652, 653, 654, 655, 656, 657, 658, 659, 660, 661, 662, 663, 664, 665, 666, 667, 668, 669, 670, 671, 672, 673, 674, 675, 676, 677, 678, 679, 680, 681, 682, 683, 684, 685, 686, 687, 688, 689, 690, 691, 692, 693, 694, 695, 696, 697, 698, 699, 700, 701, 702, 703, 704, 705, 706, 707, 708, 709, 710, 711, 712, 713, 714, 715, 716, 717, 718, 719, 720, 721, 722, 723, 724, 725, 726, 727, 728, 729, 730, 731, 732, 733, 734, 735, 736, 737, 738, 739, 740, 741, 742, 743, 744, 745, 746, 747, 748, 749, 750, 751, 752, 753, 754, 755, 756, 757, 758, 759, 760, 761, 762, 763, 764, 765, 766, 767, 768, 769, 770, 771, 772, 773, 774, 775, 776, 777, 778, 779, 780, 781, 782, 783, 784, 785, 786, 787, 788, 789, 790, 791, 792, 793, 794, 795, 796, 797, 798, 799, 800, 801, 802, 803, 804, 805, 806, 807, 808, 809, 810, 811, 812, 813, 814, 815, 816, 817, 818, 819, 820, 821, 822, 823, 824, 825, 826, 827, 828, 829, 830, 831, 832, 833, 834, 835, 836, 837, 838, 839, 840, 841, 842, 843, 844, 845, 846, 847, 848, 849, 850, 851, 852, 853, 854, 855, 856, 857, 858, 859, 860, 861, 862, 863, 864, 865, 866, 867, 868, 869, 870, 871, 872, 873, 874, 875, 876, 877, 878, 879, 880, 881, 882, 883, 884, 885, 886, 887, 888, 889, 890, 891, 892, 893, 894, 895, 896, 897, 898, 899, 900, 901, 902, 903, 904, 905, 906, 907, 908, 909, 910, 911, 912, 913, 914, 915, 916, 917, 918, 919, 920, 921, 922, 923, 924, 925, 926, 927, 928, 929, 930, 931, 932, 933, 934, 935, 936, 937, 938, 939, 940, 941, 942, 943, 944, 945, 946, 947, 948, 949, 950, 951, 952, 953, 954, 955, 956, 957, 958, 959, 960, 961, 962, 963, 964, 965, 966, 967, 968, 969, 970, 971, 972, 973, 974, 975, 976, 977, 978, 979, 980, 981, 982, 983, 984, 985, 986, 987, 988, 989, 990, 991, 992, 993, 994, 995, 996, 997, 998, 999, 1000, 1375, 1376, 1377, 1378, 1379, 1380, 1381, 1382, 1383, 1384, 1385, 1386, 1387, 1388, 1389, 1390, 1391, 1392, 1393, 1394, 1395, 1396, 1397, 1398, 1399, 1400, 1401, 1402, 1403, 1404, 1405, 1406, 1407, 1408, 1409, 1410, 1411, 1412, 1413, 1414, 1415, 1416, 1417, 1418, 1419, 1420, 1421, 1422, 1423, 1424, 1425, 1426, 1427, 1428, 1429, 1430, 1431, 1432, 1433, 1434, 1435, 1436, 1437, 1438, 1439, 1440, 1441, 1442, 1443, 1444, 1445, 1446, 1447, 1448, 1449, 1450, 1660, 1661, 1662, 1663, 1664, 1665, 1666, 1667, 1668, 1669, 1670, 1671, 1672, 1673, 1674, 1675, 2050, 2051, 2052, 2053, 2054, 2055, 2056, 2057, 2058, 2059, 2060, 2061, 2062, 2063, 2064, 2065, 2066, 2067, 2068, 2069, 2070, 2071, 2072, 2073, 2074, 2075, 2076, 2077, 2078, 2079, 2080, 2081, 2082, 2083, 2084, 2085, 2086, 2087, 2088, 2089, 2090, 2091, 2092, 2093, 2094, 2095, 2096, 2097, 2098, 2099, 2100, 2580, 2581, 2582, 2583, 2584, 2585, 2586, 2587, 2588, 2589, 2590, 2591, 2592, 2593, 2594, 2595, 2596, 2597, 2598, 2599, 2600, 2601, 2602, 2603, 2604, 2605, 4525, 4526, 4527, 4528, 4529, 4530, 4531, 4532, 4533, 4534, 4535, 4536, 4537, 4538, 4539, 4540, 4541, 4542, 4543, 4544, 4545, 4546, 4547, 4548, 4549, 4550, 4575, 4576, 4577, 4578, 4579, 4580, 4581, 4582, 4583, 4584, 4585, 4586, 4587, 4588, 4589, 4590, 4591, 4592, 4593, 4594, 4595, 4596, 4597, 4598, 4599, 4600, 4850, 4851, 4852, 4853, 4854, 4855, 4856, 4857, 4858, 4859, 4860, 4861, 4862, 4863, 4864, 4865, 4866, 4867, 4868, 4869, 4870, 4871, 4872, 4873, 4874, 4875, 4876, 4877, 4878, 4879, 4880, 4881, 4882, 4883, 4884, 4885, 4886, 4887, 4888, 4889, 4890, 4891, 4892, 4893, 4894, 4895, 4896, 4897, 4898, 4899, 4900, 5460, 5461, 5462, 5463, 5464, 5465, 5466, 5467, 5468, 5469, 5470, 5471, 5472, 5473, 5474, 5475, 5476, 5477, 5478, 5479, 5480, 6175, 6176, 6177, 6178, 6179, 6180, 6181, 6182, 6183, 6184, 6185, 6186, 6187, 6188, 6189, 6190, 6191, 6192, 6193, 6194, 6195, 6196, 6197, 6198, 6199, 6200, 6315, 6316, 6317, 6318, 6319, 6320, 6321, 6322, 6323, 6324, 6325, 6326, 6327, 6328, 6329, 6330, 6331, 6332, 6333, 6334, 6335, 6336, 6337, 6338, 6339, 6340, 6341, 6342, 6343, 6344, 6345, 6600, 6601, 6602, 6603, 6604, 6605, 6606, 6607, 6608, 6609, 6610, 6611, 6612, 6613, 6614, 6615, 6725, 6726, 6727, 6728, 6729, 6730, 6731, 6732, 6733, 6734, 6735, 6736, 6737, 6738, 6739, 6740, 6741, 6742, 6743, 6744, 6745, 6746, 6747, 6748, 6749, 6750, 6751, 6752, 6753, 6754, 6755, 6756, 6757, 6758, 6759, 6760, 6761, 6762, 6763, 6764, 6765, 6766, 6767, 6768, 6769, 6770, 6771, 6772, 6773, 6774, 6775, 7655, 7656, 7657, 7658, 7659, 7660, 7661, 7662, 7663, 7664, 7665, 7666, 7667, 7668, 7669, 7670, 7671, 7672, 8510, 8511, 8512, 8513, 8514, 8515, 8516, 8715, 8716, 8717, 8718, 8719, 8720, 8721, 8722, 8723, 8724, 8725, 8726, 8727, 8728, 8729, 8730, 8731, 8732, 8733, 8734, 8735, 8736, 8737, 8738, 8739, 8740, 8741, 8742, 8743, 8744, 8745, 9250, 9251, 9252, 9253, 9254, 9255, 9256, 9257, 9258, 9259, 9260, 9261, 9262, 9263, 9264, 9265, 9266, 9267, 9268, 9269, 9270, 9480, 9481, 9482, 9483, 9484, 9485, 9486, 9487, 9488, 9489, 9490, 9491, 9492, 9493, 9494, 9495, 9496, 9497, 9498, 9499, 9500, 9575, 9576, 9577, 9578, 9579, 9580, 9581, 9582, 9583, 9584, 9585, 9586, 9587, 9588, 9589, 9590, 10525, 10526, 10527, 10528, 10529, 10530, 10531, 10532, 10533, 10534, 10535, 10536, 10537, 10538, 10539, 10540, 11545, 11546, 11547, 11548, 11549, 11550, 11551, 11552, 11553, 11554, 11555, 11556, 11557, 11558, 11559, 11560, 11875, 11876, 11877, 11878, 11879, 11880, 11881, 11882, 11883, 11884, 11885, 11886, 11887, 11888, 11889, 11890, 11891, 11892, 11893, 11894, 11895, 11896, 11897, 11898, 11899, 11900, 11915, 11916, 11917, 11918, 11919, 11920, 11921, 11922, 11923, 11924, 11925, 11926, 11927, 11928, 11929, 11930, 11931, 11932, 11933, 11934, 11935, 11936, 11937, 11938, 11939, 11940, 13375, 13376, 13377, 13378, 13379, 13380, 13381, 13382, 13383, 13384, 13385, 13386, 13387, 13388, 13389 and 13390 on the target mRNA sequence.

[0451] In some embodiments, the antisense strand and target mRNA sequences have 100% complementarity. The antisense strand may be complementary to any part of the target mRNA sequence.

[0452] In other embodiments, the antisense strand and target mRNA sequences comprise at least one mismatch. As a non-limiting example, the antisense strand and the target mRNA sequence have at least 30%, 40%, 50%, 60%, 70%, 80%, 81%, 82%, 83%, 84%, 85%, 86%, 87%, 88%, 89%, 90%, 91%, 92%, 93%, 94%, 95%, 96%, 97%, 98% or 99% or at least 20-30%, 20-40%, 20-50%, 20-60%, 20-70%, 20-80%, 20-90%, 20-95%, 20-99%, 30-40%, 30-50%, 30-60%, 30-70%, 30-80%, 30-90%, 30-95%, 30-99%, 40-50%, 40-60%, 40-70%, 40-80%, 40-90%, 40-95%, 40-99%, 50-60%, 50-70%, 50-80%, 50-90%, 50-95%, 50-99%, 60-70%, 60-80%, 60-90%, 60-95%, 60-99%, 70-80%, 70-90%, 70-95%, 70-99%, 80-90%, 80-95%, 80-99%, 90-95%, 90-99% or 95-99% complementarity.

[0453] In one embodiment, an siRNA or dsRNA includes at least two sequences that are complementary to each other.

[0454] According to the present invention, the siRNA molecule has a length from about 10-50 or more nucleotides, i.e., each strand comprising 10-50 nucleotides (or nucleotide analogs). Preferably, the siRNA molecule has a length from about 15-30, e.g., 15, 16, 17, 18, 19, 20, 21, 22, 23, 24, 25, 26, 27, 28, 29, or 30 nucleotides in each strand, wherein one of the strands is sufficiently complementarity to a target region. In one embodiment, each strand of the siRNA molecule has a length from about 19 to 25, 19 to 24 or 19 to 21 nucleotides. In one embodiment, at least one strand of the siRNA molecule is 19 nucleotides in length. In one embodiment, at least one strand of the siRNA molecule is 20 nucleotides in length. In one embodiment, at least one strand of the siRNA molecule is 21 nucleotides in length. In one embodiment, at least one strand of the siRNA molecule is 22 nucleotides in length. In one embodiment, at least one strand of the siRNA molecule is 23 nucleotides in length. In one embodiment, at least one strand of the siRNA molecule is 24 nucleotides in length. In one embodiment, at least one strand of the siRNA molecule is 25 nucleotides in length.\

[0455] In some embodiments, the siRNA molecules of the present invention can be synthetic RNA duplexes comprising about 19 nucleotides to about 25 nucleotides, and two overhanging nucleotides at the 3′-end. In some aspects, the siRNA molecules may be unmodified RNA molecules. In other aspects, the siRNA molecules may contain at least one modified nucleotide, such as base, sugar or backbone modifications.

[0456] In one embodiment, the siRNA molecules of the present invention may comprise an antisense sequence and a sense sequence, or a fragment or variant thereof. As a non-limiting example, the antisense sequence and the sense sequence have at least 30%, 40%, 50%, 60%, 70%, 80%, 81%, 82%, 83%, 84%, 85%, 86%, 87%, 88%, 89%, 90%, 91%, 92%, 93%, 94%, 95%, 96%, 97%, 98% or 99% or at least 20-30%, 20-40%, 20-50%, 20-60%, 20-70%, 20-80%, 20-90%, 20-95%, 20-99%, 30-40%, 30-50%, 30-60%, 30-70%, 30-80%, 30-90%, 30-95%, 30-99%, 40-50%, 40-60%, 40-70%, 40-80%, 40-90%, 40-95%, 40-99%, 50-60%, 50-70%, 50-80%, 50-90%, 50-95%, 50-99%, 60-70%, 60-80%, 60-90%, 60-95%, 60-99%, 70-80%, 70-90%, 70-95%, 70-99%, 80-90%, 80-95%, 80-99%, 90-95%, 90-99% or 95-99% complementarity.

[0457] In other embodiments, the siRNA molecules of the present invention can be encoded in plasmid vectors, AAV particles, viral genome or other nucleic acid expression vectors for delivery to a cell.

[0458] DNA expression plasmids can be used to stably express the siRNA duplexes or dsRNA of the present invention in cells and achieve long-term inhibition of the target gene expression. In one aspect, the sense and antisense strands of a siRNA duplex are typically linked by a short spacer sequence leading to the expression of a stem-loop structure termed short hairpin RNA (shRNA). The hairpin is recognized and cleaved by Dicer, thus generating mature siRNA molecules.

[0459] According to the present invention, AAV particles comprising the nucleic acids encoding the siRNA molecules targeting the mRNA are produced, the AAV serotypes may be any of the serotypes listed in Table 1. Non-limiting examples of the AAV serotypes include, AAV1, AAV2, AAV3, AAV4, AAV5, AAV6, AAV7, AAV8, AAV9, AAV9.47, AAV9(hu14), AAV10, AAV11, AAV12, AAVrh8, AAVrh10, AAV-DJ8, AAV-DJ, AAV-PHP.A, and/or AAV-PHP.B, AAVPHP.B2, AAVPHP.B3, AAVPHP.N/PHP.B-DGT, AAVPHP.B-EST, AAVPHP.B-GGT, AAVPHP.B-ATP, AAVPHP.B-ATT-T, AAVPHP.B-DGT-T, AAVPHP.B-GGT-T, AAVPHP.B-SGS, AAVPHP.B-AQP, AAVPHP.B-QQP, AAVPHP.B-SNP(3), AAVPHP.B-SNP, AAVPHP.B-QGT, AAVPHP.B-NQT, AAVPHP.B-EGS, AAVPHP.B-SGN, AAVPHP.B-EGT, AAVPHP.B-DST, AAVPHP.B-DST, AAVPHP.B-STP, AAVPHP.B-PQP, AAVPHP.B-SQP, AAVPHP.B-QLP, AAVPHP.B-TMP, AAVPHP.B-TTP, AAVPHP.S/G2A12, AAVG2A15/G2A3, AAVG2B4, AAVG2B5 and variants thereof.

[0460] In some embodiments, the siRNA duplexes or encoded dsRNA of the present invention suppress (or degrade) the target mRNA. Accordingly, the siRNA duplexes or encoded dsRNA can be used to substantially inhibit the gene expression in a cell, for example a neuron. In some aspects, the inhibition of the gene expression refers to an inhibition by at least about 20%, preferably by at least about 30%, 40%, 50%, 60%, 70%, 80%, 85%, 90%, 95% and 100%, or at least 20-30%, 20-40%, 20-50%, 20-60%, 20-70%, 20-80%, 20-90%, 20-95%, 20-100%, 30-40%, 30-50%, 30-60%, 30-70%, 30-80%, 30-90%, 30-95%, 30-100%, 40-50%, 40-60%, 40-70%, 40-80%, 40-90%, 40-95%, 40-100%, 50-60%, 50-70%, 50-80%, 50-90%, 50-95%, 50-100%, 60-70%, 60-80%, 60-90%, 60-95%, 60-100%, 70-80%, 70-90%, 70-95%, 70-100%, 80-90%, 80-95%, 80-100%, 90-95%, 90-100% or 95-100%. Accordingly, the protein product of the targeted gene may be inhibited by at least about 20%, preferably by at least about 30%, 40%, 50%, 60%, 70%, 80%, 85%, 90%, 95% and 100%, or at least 20-30%, 20-40%, 20-50%, 20-60%, 20-70%, 20-80%, 20-90%, 20-95%, 20-100%, 30-40%, 30-50%, 30-60%, 30-70%, 30-80%, 30-90%, 30-95%, 30-100%, 40-50%, 40-60%, 40-70%, 40-80%, 40-90%, 40-95%, 40-100%, 50-60%, 50-70%, 50-80%, 50-90%, 50-95%, 50-100%, 60-70%, 60-80%, 60-90%, 60-95%, 60-100%, 70-80%, 70-90%, 70-95%, 70-100%, 80-90%, 80-95%, 80-100%, 90-95%, 90-100% or 95-100%.

[0461] In one embodiment, the siRNA molecules comprise a miRNA seed match for the target located in the guide strand. In another embodiment, the siRNA molecules comprise a miRNA seed match for the target located in the passenger strand. In yet another embodiment, the siRNA duplexes or encoded dsRNA targeting the gene of interest do not comprise a seed match for the target located in the guide or passenger strand.

[0462] In one embodiment, the siRNA duplexes or encoded dsRNA targeting the gene of interest may have almost no significant full-length off target effects for the guide strand. In another embodiment, the siRNA duplexes or encoded dsRNA targeting the gene of interest may have almost no significant full-length off target effects for the passenger strand. The siRNA duplexes or encoded dsRNA targeting the gene of interest may have less than 1%, 2%, 3%, 4%, 5%, 6%, 7%, 8%, 9%, 10%, 11%, 12%, 13%, 14%, 15%, 20%, 25%, 30%, 35%, 40%, 45%, 50%, 1-5%, 2-6%, 3-7%, 4-8%, 5-9%, 5-10%, 6-10%, 5-15%, 5-20%, 5-25% 5-30%, 10-20%, 10-30%, 10-40%, 10-50%, 15-30%, 15-40%, 15-45%, 20-40%, 20-50%, 25-50%, 30-40%, 30-50%, 35-50%, 40-50%, 45-50% full-length off target effects for the passenger strand. In yet another embodiment, the siRNA duplexes or encoded dsRNA targeting the gene of interest may have almost no significant full-length off target effects for the guide strand or the passenger strand. The siRNA duplexes or encoded dsRNA targeting the gene of interest may have less than 1%, 2%, 3%, 4%, 5%, 6%, 7%, 8%, 9%, 10%, 11%, 12%, 13%, 14%, 15%, 20%, 25%, 30%, 35%, 40%, 45%, 50%, 1-5%, 2-6%, 3-7%, 4-8%, 5-9%, 5-10%, 6-10%, 5-15%, 5-20%, 5-25% 5-30%, 10-20%, 10-30%, 10-40%, 10-50%, 15-30%, 15-40%, 15-45%, 20-40%, 20-50%, 25-50%, 30-40%, 30-50%, 35-50%, 40-50%, 45-50% full-length off target effects for the guide or passenger strand.

[0463] In one embodiment, the siRNA duplexes or encoded dsRNA targeting the gene of interest may have high activity in vitro. In another embodiment, the siRNA molecules may have low activity in vitro. In yet another embodiment, the siRNA duplexes or dsRNA targeting the gene of interest may have high guide strand activity and low passenger strand activity in vitro.

[0464] In one embodiment, the siRNA molecules have a high guide strand activity and low passenger strand activity in vitro. The target knock-down (KD) by the guide strand may be at least 40%, 50%, 60%, 65%, 70%, 75%, 80%, 85%, 90%, 95%, 99%, 99.5% or 100%. The target knock-down by the guide strand may be 40-50%, 45-50%, 50-55%, 50-60%, 60-65%, 60-70%, 60-75%, 60-80%, 60-85%, 60-90%, 60-95%, 60-99%, 60-99.5%, 60-100%, 65-70%, 65-75%, 65-80%, 65-85%, 65-90%, 65-95%, 65-99%, 65-99.5%, 65-100%, 70-75%, 70-80%, 70-85%, 70-90%, 70-95%, 70-99%, 70-99.5%, 70-100%, 75-80%, 75-85%, 75-90%, 75-95%, 75-99%, 75-99.5%, 75-100%, 80-85%, 80-90%, 80-95%, 80-99%, 80-99.5%, 80-100%, 85-90%, 85-95%, 85-99%, 85-99.5%, 85-100%, 90-95%, 90-99%, 90-99.5%, 90-100%, 95-99%, 95-99.5%, 95-100%, 99-99.5%, 99-100% or 99.5-100%. As a non-limiting example, the target knock-down (KD) by the guide strand is greater than 70%. As a non-limiting example, the target knock-down (KD) by the guide strand is greater than 60%.

[0465] In one embodiment, the siRNA duplex is designed so there is no miRNA seed match for the sense or antisense sequence to the non-gene of interest sequence.

[0466] In one embodiment, the IC₅₀ of the guide strand for the nearest off target is greater than 100 multiplied by the IC₅₀ of the guide strand for the on-target gene. As a non-limiting example, if the IC₅₀ of the guide strand for the nearest off target is greater than 100 multiplied by the IC₅₀ of the guide strand for the target then the siRNA molecule is said to have high guide strand selectivity for inhibiting the gene of interest in vitro.

[0467] In one embodiment, the 5′ processing of the guide strand has a correct start (n) at the 5′ end at least 75%, 80%, 85%, 90%, 95%, 99% or 100% of the time in vitro or in vivo. As a non-limiting example, the 5′ processing of the guide strand is precise and has a correct start (n) at the 5′ end at least 99% of the time in vitro. As a non-limiting example, the 5′ processing of the guide strand is precise and has a correct start (n) at the 5′ end at least 99% of the time in vivo. As a non-limiting example, the 5′ processing of the guide strand is precise and has a correct start (n) at the 5′ end at least 90% of the time in vitro. As a non-limiting example, the 5′ processing of the guide strand is precise and has a correct start (n) at the 5′ end at least 90% of the time in vivo. As a non-limiting example, the 5′ processing of the guide strand is precise and has a correct start (n) at the 5′ end at least 85% of the time in vitro. As a non-limiting example, the 5′ processing of the guide strand is precise and has a correct start (n) at the 5′ end at least 85% of the time in vivo.

[0468] In one embodiment, the guide to passenger (G:P) (also referred to as the antisense to sense) strand ratio expressed is 1:10, 1:9, 1:8, 1:7, 1:6, 1:5, 1:4, 1:3, 1:2, 1;1, 2:10, 2:9, 2:8, 2:7, 2:6, 2:5, 2:4, 2:3, 2:2, 2:1, 3:10, 3:9, 3:8, 3:7, 3:6, 3:5, 3:4, 3:3, 3:2, 3:1, 4:10, 4:9, 4:8, 4:7, 4:6, 4:5, 4:4, 4:3, 4:2, 4:1, 5:10, 5:9, 5:8, 5:7, 5:6, 5:5, 5:4, 5:3, 5:2, 5:1, 6:10, 6:9, 6:8, 6:7, 6:6, 6:5, 6:4, 6:3, 6:2, 6:1, 7:10, 7:9, 7:8, 7:7, 7:6, 7:5, 7:4, 7:3, 7:2, 7:1, 8:10, 8:9, 8:8, 8:7, 8:6, 8:5, 8:4, 8:3, 8:2, 8:1, 9:10, 9:9, 9:8, 9:7, 9:6, 9:5, 9:4, 9:3, 9:2, 9:1, 10:10, 10:9, 10:8, 10:7, 10:6, 10:5, 10:4, 10:3, 10:2, 10:1, 1:99, 5:95, 10:90, 15:85, 20:80, 25:75, 30:70, 35:65, 40:60, 45:55, 50:50, 55:45, 60:40, 65:35, 70:30, 75:25, 80:20, 85:15, 90:10, 95:5, or 99:1 in vitro or in vivo. The guide to passenger ratio refers to the ratio of the guide strands to the passenger strands after intracellular processing of the pri-microRNA. For example, a 80:20 of guide-to-passenger ratio would have 8 guide strands to every 2 passenger strands processed from the precursor. As a non-limiting example, the guide-to-passenger strand ratio is 8:2 in vitro. As a non-limiting example, the guide-to-passenger strand ratio is 8:2 in vivo. As a non-limiting example, the guide-to-passenger strand ratio is 9:1 in vitro. As a non-limiting example, the guide-to-passenger strand ratio is 9:1 in vivo.

[0469] In one embodiment, the guide to passenger (G:P) (also referred to as the antisense to sense) strand ratio expressed is greater than 1.

[0470] In one embodiment, the guide to passenger (G:P) (also referred to as the antisense to sense) strand ratio expressed is greater than 2.

[0471] In one embodiment, the guide to passenger (G:P) (also referred to as the antisense to sense) strand ratio expressed is greater than 5.

[0472] In one embodiment, the guide to passenger (G:P) (also referred to as the antisense to sense) strand ratio expressed is greater than 10.

[0473] In one embodiment, the guide to passenger (G:P) (also referred to as the antisense to sense) strand ratio expressed is greater than 20.

[0474] In one embodiment, the guide to passenger (G:P) (also referred to as the antisense to sense) strand ratio expressed is greater than 50.

[0475] In one embodiment, the guide to passenger (G:P) (also referred to as the antisense to sense) strand ratio expressed is at least 3:1.

[0476] In one embodiment, the guide to passenger (G:P) (also referred to as the antisense to sense) strand ratio expressed is at least 5:1.

[0477] In one embodiment, the guide to passenger (G:P) (also referred to as the antisense to sense) strand ratio expressed is at least 10:1.

[0478] In one embodiment, the guide to passenger (G:P) (also referred to as the antisense to sense) strand ratio expressed is at least 20:1.

[0479] In one embodiment, the guide to passenger (G:P) (also referred to as the antisense to sense) strand ratio expressed is at least 50:1.

[0480] In one embodiment, the passenger to guide (P:G) (also referred to as the sense to antisense) strand ratio expressed is 1:10, 1:9, 1:8, 1:7, 1:6, 1:5, 1:4, 1:3, 1:2, 1;1, 2:10, 2:9, 2:8, 2:7, 2:6, 2:5, 2:4, 2:3, 2:2, 2:1, 3:10, 3:9, 3:8, 3:7, 3:6, 3:5, 3:4, 3:3, 3:2, 3:1, 4:10, 4:9, 4:8, 4:7, 4:6, 4:5, 4:4, 4:3, 4:2, 4:1, 5:10, 5:9, 5:8, 5:7, 5:6, 5:5, 5:4, 5:3, 5:2, 5:1, 6:10, 6:9, 6:8, 6:7, 6:6, 6:5, 6:4, 6:3, 6:2, 6:1, 7:10, 7:9, 7:8, 7:7, 7:6, 7:5, 7:4, 7:3, 7:2, 7:1, 8:10, 8:9, 8:8, 8:7, 8:6, 8:5, 8:4, 8:3, 8:2, 8:1, 9:10, 9:9, 9:8, 9:7, 9:6, 9:5, 9:4, 9:3, 9:2, 9:1, 10:10, 10:9, 10:8, 10:7, 10:6, 10:5, 10:4, 10:3, 10:2, 10:1, 1:99, 5:95, 10:90, 15:85, 20:80, 25:75, 30:70, 35:65, 40:60, 45:55, 50:50, 55:45, 60:40, 65:35, 70:30, 75:25, 80:20, 85:15, 90:10, 95:5, or 99:1 in vitro or in vivo. The passenger to guide ratio refers to the ratio of the passenger strands to the guide strands after the intracellular processing of the pri-microRNA. For example, a 80:20 passenger-to-guide ratio would have 8 passenger strands to every 2 guide strands processed from the precursor. As a non-limiting example, the passenger-to-guide strand ratio is 80:20 in vitro. As a non-limiting example, the passenger-to-guide strand ratio is 80:20 in vivo. As a non-limiting example, the passenger-to-guide strand ratio is 8:2 in vitro. As a non-limiting example, the passenger-to-guide strand ratio is 8:2 in vivo. As a non-limiting example, the passenger-to-guide strand ratio is 9:1 in vitro. As a non-limiting example, the passenger-to-guide strand ratio is 9:1 in vivo.

[0481] In one embodiment, the passenger to guide (P:G) (also referred to as the sense to antisense) strand ratio expressed is greater than 1.

[0482] In one embodiment, the passenger to guide (P:G) (also referred to as the sense to antisense) strand ratio expressed is greater than 2.

[0483] In one embodiment, the passenger to guide (P:G) (also referred to as the sense to antisense) strand ratio expressed is greater than 5.

[0484] In one embodiment, the passenger to guide (P:G) (also referred to as the sense to antisense) strand ratio expressed is greater than 10.

[0485] In one embodiment, the passenger to guide (P:G) (also referred to as the sense to antisense) strand ratio expressed is greater than 20.

[0486] In one embodiment, the passenger to guide (P:G) (also referred to as the sense to antisense) strand ratio expressed is greater than 50.

[0487] In one embodiment, the passenger to guide (P:G) (also referred to as the sense to antisense) strand ratio expressed is at least 3:1.

[0488] In one embodiment, the passenger to guide (P:G) (also referred to as the sense to antisense) strand ratio expressed is at least 5:1.

[0489] In one embodiment, the passenger to guide (P:G) (also referred to as the sense to antisense) strand ratio expressed is at least 10:1.

[0490] In one embodiment, the passenger to guide (P:G) (also referred to as the sense to antisense) strand ratio expressed is at least 20:1.

[0491] In one embodiment, the passenger to guide (P:G) (also referred to as the sense to antisense) strand ratio expressed is at least 50:1.

[0492] In one embodiment, a passenger-guide strand duplex is considered effective when the pri- or pre-microRNAs demonstrate, but methods known in the art and described herein, greater than 2-fold guide to passenger strand ratio when processing is measured. As a non-limiting examples, the pri- or pre-microRNAs demonstrate great than 2-fold, 3-fold, 4-fold, 5-fold, 6-fold, 7-fold, 8-fold, 9-fold, 10-fold, 11-fold, 12-fold, 13-fold, 14-fold, 15-fold, or 2 to 5-fold, 2 to 10-fold, 2 to 15-fold, 3 to 5-fold, 3 to 10-fold, 3 to 15-fold, 4 to 5-fold, 4 to 10-fold, 4 to 15-fold, 5 to 10-fold, 5 to 15-fold, 6 to 10-fold, 6 to 15-fold, 7 to 10-fold, 7 to 15-fold, 8 to 10-fold, 8 to 15-fold, 9 to 10-fold, 9 to 15-fold, 10 to 15-fold, 11 to 15-fold, 12 to 15-fold, 13 to 15-fold, or 14 to 15-fold guide to passenger strand ratio when processing is measured.

[0493] In one embodiment, the vector genome encoding the dsRNA comprises a sequence which is at least 60%, 65%, 70%, 75%, 80%, 85%, 90%, 95%, 99% or more than 99% of the full length of the construct. As a non-limiting example, the vector genome comprises a sequence which is at least 80% of the full length sequence of the construct.

[0494] In one embodiment, the siRNA molecules may be used to silence wild type or mutant version of the gene of interest by targeting at least one exon on the gene of interest sequence. The exon may be exon 1, exon 2, exon 3, exon 4, exon 5, exon 6, exon 7, exon 8, exon 9, exon 10, exon 11, exon 12, exon 13, exon 14, exon 15, exon 16, exon 17, exon 18, exon 19, exon 20, exon 21, exon 22, exon 23, exon 24, exon 25, exon 26, exon 27, exon 28, exon 29, exon 30, exon 31, exon 32, exon 33, exon 34, exon 35, exon 36, exon 37, exon 38, exon 39, exon 40, exon 41, exon 42, exon 43, exon 44, exon 45, exon 46, exon 47, exon 48, exon 49, exon 50, exon 51, exon 52, exon 53, exon 54, exon 55, exon 56, exon 57, exon 58, exon 59, exon 60, exon 61, exon 62, exon 63, exon 64, exon 65, exon 66, and/or exon 67.

Design and Sequences of siRNA Duplexes Targeting HTT Gene

[0495] The present invention provides small interfering RNA (siRNA) duplexes (and modulatory polynucleotides encoding them) that target HTT mRNA to interfere with HTT gene expression and/or HTT protein production.

[0496] The encoded siRNA duplex of the present invention contains an antisense strand and a sense strand hybridized together forming a duplex structure, wherein the antisense strand is complementary to the nucleic acid sequence of the targeted HTT gene, and wherein the sense strand is homologous to the nucleic acid sequence of the targeted HTT gene. In some aspects, the 5′end of the antisense strand has a 5′ phosphate group and the 3′end of the sense strand contains a 3′hydroxyl group. In other aspects, there are none, one or 2 nucleotide overhangs at the 3′end of each strand.

[0497] Some guidelines for designing siRNAs have been proposed in the art. These guidelines generally recommend generating a 19-nucleotide duplexed region, symmetric 2-3 nucleotide 3′ overhangs, 5′-phosphate and 3′-hydroxyl groups targeting a region in the gene to be silenced. Other rules that may govern siRNA sequence preference include, but are not limited to, (i) A/U at the 5′ end of the antisense strand; (ii) G/C at the 5′ end of the sense strand; (iii) at least five A/U residues in the 5′ terminal one-third of the antisense strand; and (iv) the absence of any GC stretch of more than 9 nucleotides in length. In accordance with such consideration, together with the specific sequence of a target gene, highly effective siRNA molecules essential for suppressing the Htt gene expression may be readily designed.

[0498] According to the present invention, siRNA molecules (e.g., siRNA duplexes or encoded dsRNA) that target the HTT gene are designed. Such siRNA molecules can specifically, suppress HTT gene expression and protein production. In some aspects, the siRNA molecules are designed and used to selectively “knock out” HTT gene variants in cells, i.e., mutated HTT transcripts that are identified in patients with HD disease. In some aspects, the siRNA molecules are designed and used to selectively “knock down” HTT gene variants in cells. In other aspects, the siRNA molecules are able to inhibit or suppress both the wild type and mutated HTT gene.

[0499] In one embodiment, an siRNA molecule of the present invention comprises a sense strand and a complementary antisense strand in which both strands are hybridized together to form a duplex structure. The antisense strand has sufficient complementarity to the HTT mRNA sequence to direct target-specific RNAi, i.e., the siRNA molecule has a sequence sufficient to trigger the destruction of the target mRNA by the RNAi machinery or process.

[0500] In one embodiment, an siRNA molecule of the present invention comprises a sense strand and a complementary antisense strand in which both strands are hybridized together to form a duplex structure and where the start site of the hybridization to the HTT mRNA is between nucleotide 100 and 7000 on the HTT mRNA sequence. As a non-limiting example, the start site may be between nucleotide 100-150, 150-200, 200-250, 250-300, 300-350, 350-400, 400-450, 450-500, 500-550, 550-600, 600-650, 650-700, 700-70, 750-800, 800-850, 850-900, 900-950, 950-1000, 1000-1050, 1050-1100, 1100-1150, 1150-1200, 1200-1250, 1250-1300, 1300-1350, 1350-1400, 1400-1450, 1450-1500, 1500-1550, 1550-1600, 1600-1650, 1650-1700, 1700-1750, 1750-1800, 1800-1850, 1850-1900, 1900-1950, 1950-2000, 2000-2050, 2050-2100, 2100-2150, 2150-2200, 2200-2250, 2250-2300, 2300-2350, 2350-2400, 2400-2450, 2450-2500, 2500-2550, 2550-2600, 2600-2650, 2650-2700, 2700-2750, 2750-2800, 2800-2850, 2850-2900, 2900-2950, 2950-3000, 3000-3050, 3050-3100, 3100-3150, 3150-3200, 3200-3250, 3250-3300, 3300-3350, 3350-3400, 3400-3450, 3450-3500, 3500-3550, 3550-3600, 3600-3650, 3650-3700, 3700-3750, 3750-3800, 3800-3850, 3850-3900, 3900-3950, 3950-4000, 4000-4050, 4050-4100, 4100-4150, 4150-4200, 4200-4250, 4250-4300, 4300-4350, 4350-4400, 4400-4450, 4450-4500, 4500-4550, 4550-4600, 4600-4650, 4650-4700, 4700-4750, 4750-4800, 4800-4850, 4850-4900, 4900-4950, 4950-5000, 5000-5050, 5050-5100, 5100-5150, 5150-5200, 5200-5250, 5250-5300, 5300-5350, 5350-5400, 5400-5450, 5450-5500, 5500-5550, 5550-5600, 5600-5650, 5650-5700, 5700-5750, 5750-5800, 5800-5850, 5850-5900, 5900-5950, 5950-6000, 6000-6050, 6050-6100, 6100-6150, 6150-6200, 6200-6250, 6250-6300, 6300-6350, 6350-6400, 6400-6450, 6450-6500, 6500-6550, 6550-6600, 6600-6650, 6650-6700, 6700-6750, 6750-6800, 6800-6850, 6850-6900, 6900-6950, 6950-7000, 7000-7050, 7050-7100, 7100-7150, 7150-7200, 7200-7250, 7250-7300, 7300-7350, 7350-7400, 7400-7450, 7450-7500, 7500-7550, 7550-7600, 7600-7650, 7650-7700, 7700-7750, 7750-7800, 7800-7850, 7850-7900, 7900-7950, 7950-8000, 8000-8050, 8050-8100, 8100-8150, 8150-8200, 8200-8250, 8250-8300, 8300-8350, 8350-8400, 8400-8450, 8450-8500, 8500-8550, 8550-8600, 8600-8650, 8650-8700, 8700-8750, 8750-8800, 8800-8850, 8850-8900, 8900-8950, 8950-9000, 9000-9050, 9050-9100, 9100-9150, 9150-9200, 9200-9250, 9250-9300, 9300-9350, 9350-9400, 9400-9450, 9450-9500, 9500-9550, 9550-9600, 9600-9650, 9650-9700, 9700-9750, 9750-9800, 9800-9850, 9850-9900, 9900-9950, 9950-10000, 10000-10050, 10050-10100, 10100-10150, 10150-10200, 10200-10250, 10250-10300, 10300-10350, 10350-10400, 10400-10450, 10450-10500, 10500-10550, 10550-10600, 10600-10650, 10650-10700, 10700-10750, 10750-10800, 10800-10850, 10850-10900, 10900-10950, 10950-11000, 11050-11100, 11100-11150, 11150-11200, 11200-11250, 11250-11300, 11300-11350, 11350-11400, 11400-11450, 11450-11500, 11500-11550, 11550-11600, 11600-11650, 11650-11700, 11700-11750, 11750-11800, 11800-11850, 11850-11900, 11900-11950, 11950-12000, 12000-12050, 12050-12100, 12100-12150, 12150-12200, 12200-12250, 12250-12300, 12300-12350, 12350-12400, 12400-12450, 12450-12500, 12500-12550, 12550-12600, 12600-12650, 12650-12700, 12700-12750, 12750-12800, 12800-12850, 12850-12900, 12900-12950, 12950-13000, 13050-13100, 13100-13150, 13150-13200, 13200-13250, 13250-13300, 13300-13350, 13350-13400, 13400-13450, and 13450-13500 on the HTT mRNA sequence. As yet another non-limiting example, the start site may be nucleotide 315, 316, 317, 318, 319, 320, 321, 322, 323, 324, 325, 326, 327, 328, 329, 330, 331, 332, 333, 334, 335, 336, 337, 338, 339, 340, 341, 342, 343, 344, 345, 346, 347, 348, 349, 350, 595, 596, 597, 598, 599, 600, 601, 602, 603, 604, 605, 606, 607, 608, 609, 610, 611, 612, 613, 614, 615, 616, 617, 618, 619, 620, 621, 622, 623, 624, 625, 715, 716, 717, 718, 719, 720, 721, 722, 723, 724, 725, 875, 876, 877, 878, 879, 880, 881, 882, 883, 884, 885, 886, 887, 888, 889, 890, 891, 892, 893, 894, 895, 896, 897, 898, 899, 900, 1375, 1376, 1377, 1378, 1379, 1380, 1381, 1382, 1383, 1384, 1385, 1386, 1387, 1388, 1389, 1390, 1391, 1392, 1393, 1394, 1395, 1396, 1397, 1398, 1399, 1400, 1401, 1402, 1403, 1404, 1405, 1406, 1407, 1408, 1409, 1410, 1411, 1412, 1413, 1414, 1415, 1416, 1417, 1418, 1419, 1420, 1421, 1422, 1423, 1424, 1425, 1426, 1427, 1428, 1429, 1430, 1431, 1432, 1433, 1434, 1435, 1436, 1437, 1438, 1439, 1440, 1441, 1442, 1443, 1444, 1445, 1446, 1447, 1448, 1449, 1450, 1660, 1661, 1662, 1663, 1664, 1665, 1666, 1667, 1668, 1669, 1670, 1671, 1672, 1673, 1674, 1675, 2050, 2051, 2052, 2053, 2054, 2055, 2056, 2057, 2058, 2059, 2060, 2061, 2062, 2063, 2064, 2065, 2066, 2067, 2068, 2069, 2070, 2071, 2072, 2073, 2074, 2075, 2076, 2077, 2078, 2079, 2080, 2081, 2082, 2083, 2084, 2085, 2086, 2087, 2088, 2089, 2090, 2091, 2092, 2093, 2094, 2095, 2096, 2097, 2098, 2099, 2100, 2580, 2581, 2582, 2583, 2584, 2585, 2586, 2587, 2588, 2589, 2590, 2591, 2592, 2593, 2594, 2595, 2596, 2597, 2598, 2599, 2600, 2601, 2602, 2603, 2604, 2605, 4525, 4526, 4527, 4528, 4529, 4530, 4531, 4532, 4533, 4534, 4535, 4536, 4537, 4538, 4539, 4540, 4541, 4542, 4543, 4544, 4545, 4546, 4547, 4548, 4549, 4550, 4575, 4576, 4577, 4578, 4579, 4580, 4581, 4582, 4583, 4584, 4585, 4586, 4587, 4588, 4589, 4590, 4591, 4592, 4593, 4594, 4595, 4596, 4597, 4598, 4599, 4600, 4850, 4851, 4852, 4853, 4854, 4855, 4856, 4857, 4858, 4859, 4860, 4861, 4862, 4863, 4864, 4865, 4866, 4867, 4868, 4869, 4870, 4871, 4872, 4873, 4874, 4875, 4876, 4877, 4878, 4879, 4880, 4881, 4882, 4883, 4884, 4885, 4886, 4887, 4888, 4889, 4890, 4891, 4892, 4893, 4894, 4895, 4896, 4897, 4898, 4899, 4900, 5460, 5461, 5462, 5463, 5464, 5465, 5466, 5467, 5468, 5469, 5470, 5471, 5472, 5473, 5474, 5475, 5476, 5477, 5478, 5479, 5480, 6175, 6176, 6177, 6178, 6179, 6180, 6181, 6182, 6183, 6184, 6185, 6186, 6187, 6188, 6189, 6190, 6191, 6192, 6193, 6194, 6195, 6196, 6197, 6198, 6199, 6200, 6315, 6316, 6317, 6318, 6319, 6320, 6321, 6322, 6323, 6324, 6325, 6326, 6327, 6328, 6329, 6330, 6331, 6332, 6333, 6334, 6335, 6336, 6337, 6338, 6339, 6340, 6341, 6342, 6343, 6344, 6345, 6600, 6601, 6602, 6603, 6604, 6605, 6606, 6607, 6608, 6609, 6610, 6611, 6612, 6613, 6614, 6615, 6725, 6726, 6727, 6728, 6729, 6730, 6731, 6732, 6733, 6734, 6735, 6736, 6737, 6738, 6739, 6740, 6741, 6742, 6743, 6744, 6745, 6746, 6747, 6748, 6749, 6750, 6751, 6752, 6753, 6754, 6755, 6756, 6757, 6758, 6759, 6760, 6761, 6762, 6763, 6764, 6765, 6766, 6767, 6768, 6769, 6770, 6771, 6772, 6773, 6774, 6775, 7655, 7656, 7657, 7658, 7659, 7660, 7661, 7662, 7663, 7664, 7665, 7666, 7667, 7668, 7669, 7670, 7671, 7672, 8510, 8511, 8512, 8513, 8514, 8515, 8516, 8715, 8716, 8717, 8718, 8719, 8720, 8721, 8722, 8723, 8724, 8725, 8726, 8727, 8728, 8729, 8730, 8731, 8732, 8733, 8734, 8735, 8736, 8737, 8738, 8739, 8740, 8741, 8742, 8743, 8744, 8745, 9250, 9251, 9252, 9253, 9254, 9255, 9256, 9257, 9258, 9259, 9260, 9261, 9262, 9263, 9264, 9265, 9266, 9267, 9268, 9269, 9270, 9480, 9481, 9482, 9483, 9484, 9485, 9486, 9487, 9488, 9489, 9490, 9491, 9492, 9493, 9494, 9495, 9496, 9497, 9498, 9499, 9500, 9575, 9576, 9577, 9578, 9579, 9580, 9581, 9582, 9583, 9584, 9585, 9586, 9587, 9588, 9589, 9590, 10525, 10526, 10527, 10528, 10529, 10530, 10531, 10532, 10533, 10534, 10535, 10536, 10537, 10538, 10539, 10540, 11545, 11546, 11547, 11548, 11549, 11550, 11551, 11552, 11553, 11554, 11555, 11556, 11557, 11558, 11559, 11560, 11875, 11876, 11877, 11878, 11879, 11880, 11881, 11882, 11883, 11884, 11885, 11886, 11887, 11888, 11889, 11890, 11891, 11892, 11893, 11894, 11895, 11896, 11897, 11898, 11899, 11900, 11915, 11916, 11917, 11918, 11919, 11920, 11921, 11922, 11923, 11924, 11925, 11926, 11927, 11928, 11929, 11930, 11931, 11932, 11933, 11934, 11935, 11936, 11937, 11938, 11939, 11940, 13375, 13376, 13377, 13378, 13379, 13380, 13381, 13382, 13383, 13384, 13385, 13386, 13387, 13388, 13389 and 13390 on the HTT mRNA sequence.

[0501] In some embodiments, the antisense strand and target Htt mRNA sequences have 100% complementarity. The antisense strand may be complementary to any part of the target Htt mRNA sequence.

[0502] In other embodiments, the antisense strand and target Htt mRNA sequences comprise at least one mismatch. As a non-limiting example, the antisense strand and the target Htt mRNA sequence have at least 30%, 40%, 50%, 60%, 70%, 80%, 81%, 82%, 83%, 84%, 85%, 86%, 87%, 88%, 89%, 90%, 91%, 92%, 93%, 94%, 95%, 96%, 97%, 98% or 99% or at least 20-30%, 20-40%, 20-50%, 20-60%, 20-70%, 20-80%, 20-90%, 20-95%, 20-99%, 30-40%, 30-50%, 30-60%, 30-70%, 30-80%, 30-90%, 30-95%, 30-99%, 40-50%, 40-60%, 40-70%, 40-80%, 40-90%, 40-95%, 40-99%, 50-60%, 50-70%, 50-80%, 50-90%, 50-95%, 50-99%, 60-70%, 60-80%, 60-90%, 60-95%, 60-99%, 70-80%, 70-90%, 70-95%, 70-99%, 80-90%, 80-95%, 80-99%, 90-95%, 90-99% or 95-99% complementarity.

[0503] In one embodiment, an siRNA or dsRNA targeting Htt includes at least two sequences that are complementary to each other.

[0504] According to the present invention, the siRNA molecule targeting Htt has a length from about 10-50 or more nucleotides, i.e., each strand comprising 10-50 nucleotides (or nucleotide analogs). Preferably, the siRNA molecule has a length from about 15-30, e.g., 15, 16, 17, 18, 19, 20, 21, 22, 23, 24, 25, 26, 27, 28, 29, or 30 nucleotides in each strand, wherein one of the strands is sufficiently complementarity to a target region. In one embodiment, each strand of the siRNA molecule has a length from about 19 to 25, 19 to 24 or 19 to 21 nucleotides. In one embodiment, at least one strand of the siRNA molecule is 19 nucleotides in length. In one embodiment, at least one strand of the siRNA molecule is 20 nucleotides in length. In one embodiment, at least one strand of the siRNA molecule is 21 nucleotides in length. In one embodiment, at least one strand of the siRNA molecule is 22 nucleotides in length. In one embodiment, at least one strand of the siRNA molecule is 23 nucleotides in length. In one embodiment, at least one strand of the siRNA molecule is 24 nucleotides in length. In one embodiment, at least one strand of the siRNA molecule is 25 nucleotides in length.

[0505] In some embodiments, the siRNA molecules of the present invention targeting Htt can be synthetic RNA duplexes comprising about 19 nucleotides to about 25 nucleotides, and two overhanging nucleotides at the 3′-end. In some aspects, the siRNA molecules may be unmodified RNA molecules. In other aspects, the siRNA molecules may contain at least one modified nucleotide, such as base, sugar or backbone modifications.

[0506] In one embodiment, the siRNA molecules of the present invention targeting Htt may comprise a nucleotide sequence such as, but not limited to, the antisense (guide) sequences in Table 2 or a fragment or variant thereof. As a non-limiting example, the antisense sequence used in the siRNA molecule of the present invention is at least 30%, 40%, 50%, 60%, 70%, 80%, 81%, 82%, 83%, 84%, 85%, 86%, 87%, 88%, 89%, 90%, 91%, 92%, 93%, 94%, 95%, 96%, 97%, 98% or 99% or at least 20-30%, 20-40%, 20-50%, 20-60%, 20-70%, 20-80%, 20-90%, 20-95%, 20-99%, 30-40%, 30-50%, 30-60%, 30-70%, 30-80%, 30-90%, 30-95%, 30-99%, 40-50%, 40-60%, 40-70%, 40-80%, 40-90%, 40-95%, 40-99%, 50-60%, 50-70%, 50-80%, 50-90%, 50-95%, 50-99%, 60-70%, 60-80%, 60-90%, 60-95%, 60-99%, 70-80%, 70-90%, 70-95%, 70-99%, 80-90%, 80-95%, 80-99%, 90-95%, 90-99% or 95-99% of a nucleotide sequence in Table 2. As another non-limiting example, the antisense sequence used in the siRNA molecule of the present invention comprises at least 3, 4, 5, 6, 7, 8, 9, 10, 11, 12, 13, 14, 15, 16, 17, 18, 19, 20, 21 or more than 21 consecutive nucleotides of a nucleotide sequence in Table 2. As yet another non-limiting example, the antisense sequence used in the siRNA molecule of the present invention comprises nucleotides 1 to 22, 1 to 21, 1 to 20, 1 to 19, 1 to 18, 1 to 17, 1 to 16, 1 to 15, 1 to 14, 1 to 13, 1 to 12, 1 to 11, 1 to 10, 1 to 9, 1 to 8, 2 to 22, 2 to 21, 2 to 20, 2 to 19, 2 to 18, 2 to 17, 2 to 16, 2 to 15, 2 to 14, 2 to 13, 2 to 12, 2 to 11, 2 to 10, 2 to 9, 2 to 8, 3 to 22, 3 to 21, 3 to 20, 3 to 19, 3 to 18, 3 to 17, 3 to 16, 3 to 15, 3 to 14, 3 to 13, 3 to 12, 3 to 11, 3 to 10, 3 to 9, 3 to 8, 4 to 22, 4 to 21, 4 to 20, 4 to 19, 4 to 18, 4 to 17, 4 to 16, 4 to 15, 4 to 14, 4 to 13, 4 to 12, 4 to 11, 4 to 10, 4 to 9, 4 to 8, 5 to 22, 5 to 21, 5 to 20, 5 to 19, 5 to 18, 5 to 17, 5 to 16, 5 to 15, 5 to 14, 5 to 13, 5 to 12, 5 to 11, 5 to 10, 5 to 9, 5 to 8, 6 to 22, 6 to 21, 6 to 20, 6 to 19, 6 to 18, 6 to 17, 6 to 16, 6 to 15, 6 to 14, 6 to 13, 6 to 12, 6 to 11, 6 to 10, 7 to 22, 7 to 21, 7 to 20, 7 to 19, 7 to 18, 7 to 17, 7 to 16, 7 to 15, 7 to 14, 7 to 13, 7 to 12, 8 to 22, 8 to 21, 8 to 20, 8 to 19, 8 to 18, 8 to 17, 8 to 16, 8 to 15, 8 to 14, 8 to 13, 8 to 12, 9 to 22, 9 to 21, 9 to 20, 9 to 19, 9 to 18, 9 to 17, 9 to 16, 9 to 15, 9 to 14, 10 to 22, 10 to 21, 10 to 20, 10 to 19, 10 to 18, 10 to 17, 10 to 16, 10 to 15, 10 to 14, 11 to 22, 11 to 21, 11 to 20, 11 to 19, 11 to 18, 11 to 17, 11 to 16, 11 to 15, 11 to 14, 12 to 22, 12 to 21, 12 to 20, 12 to 19, 12 to 18, 12 to 17, 12 to 16, 13 to 22, 13 to 21, 13 to 20, 13 to 19, 13 to 18, 13 to 17, 13 to 16, 14 to 22, 14 to 21, 14 to 20, 14 to 19, 14 to 18, 14 to 17, 15 to 22, 15 to 21, 15 to 20, 15 to 19, 15 to 18, 16 to 22, 16 to 21, 16 to 20, 17 to 22, 17 to 21, or 18 to 22 of the sequences in Table 2.

TABLE 2
Antisense Sequences

| Antisense | | SEQ |
|---|---|---|
| ID | Sequence | ID NO |
| A-2000 | UUAACGUCAGUUCAUAAACUU | 916 |
| A-2000dt | UUAACGUCAGUUCAUAAACdTdT | 917 |
| A-2001 | UGUCGGUACCGUCUAACACUU | 918 |
| A-2001dt | UGUCGGUACCGUCUAACACdTdT | 919 |
| A-2002 | UAAGCAUGGAGCUAGCAGGUU | 920 |
| A-2002dt | UAAGCAUGGAGCUAGCAGGdTdT | 921 |
| A-2003 | UACAACGAGACUGAAUUGCUU | 922 |
| A-2003dt | UACAACGAGACUGAAUUGCdTdT | 923 |
| A-2004 | UUCAGUUCAUAAACCUGGAUU | 924 |
| A-2004dt | UUCAGUUCAUAAACCUGGAdTdT | 925 |
| A-2005 | UAACGUCAGUUCAUAAACCUU | 926 |
| A-2005dt | UAACGUCAGUUCAUAAACCdTdT | 927 |
| A-2006 | UCCGGUCACAACAUUGUGGUU | 928 |
| A-2006dt | UCCGGUCACAACAUUGUGGdTdT | 929 |
| A-2007 | UUGCACGGUUCUUUGUGACUU | 930 |
| A-2007dt | UUGCACGGUUCUUUGUGACdTdT | 931 |
| A-2008 | UUUUAUAACAAGAGGUUCAUU | 932 |
| A-2008dt | UUUUAUAACAAGAGGUUCAdTdT | 933 |
| A-2009 | UCCAAAUACUGGUUGUCGGUU | 934 |
| A-2009dt | UCCAAAUACUGGUUGUCGGdTdT | 935 |
| A-2010 | UAUUUUAGGAAUUCCAAUGUU | 936 |
| A-2010dt | UAUUUUAGGAAUUCCAAUGdTdT | 937 |
| A-2011 | UUUAGGAAUUCCAAUGAUCUU | 938 |
| A-2011dt | UUUAGGAAUUCCAAUGAUCdTdT | 939 |
| A-2012dt | UUAAUCUCUUUACUGAUAUdTdT | 940 |
| A-2013dt | GAUUUUAGGAAUUCCAAUGdTdT | 941 |
| A-2014 | UAAGCAUGGAGCUAGCAGGCUU | 942 |
| A-2015 | UAAGCAUGGAGCUAGCAGGGU | 943 |
| A-2016 | AAGGACUUGAGGGACUCGAAGU | 944 |
| A-2017 | AAGGACUUGAGGGACUCGAAG | 945 |
| A-2018 | AAGGACUUGAGGGACUCGA | 946 |
| A-2019 | AGGACUUGAGGGACUCGAAGU | 947 |
| A-2020 | GAGGACUUGAGGGACUCGAAGU | 948 |
| A-2021 | AAGGACUUGAGGGACUCGAAGU | 949 |
| A-2022 | AAGGACUUGAGGGACUCGAAGUU | 950 |
| A-2023 | AAGGACUUGAGGGACUCGAAG | 951 |
| A-2024 | AAGGACUUGAGGGACUCGA | 952 |
| A-2025 | AAGGACUUGAGGGACUCGAAGG | 953 |
| A-2026 | AAGGACUUGAGGGACUCGAAU | 954 |
| A-2027 | AAGGACUUGAGGGACUCGAAGA | 955 |
| A-2028 | AAGGACUUGAGGGACUCGAAGG | 956 |
| A-2029 | AAGGACUUGAGGGACUCGAAGGU | 957 |
| A-2030 | AAGGACUUGAGGGACUCGAAGGA | 958 |
| A-2031 | AAGGACUUGAGGGACUCGAAG | 959 |
| A-2032 | AAGGACUUGAGGGACUCGAAGU | 960 |
| A-2033 | AAGGACUUGAGGGACUCGA | 961 |
| A-2034 | AAGGACUUGAGGGACUCGAAGGA | 962 |
| A-2035 | AAGGACUUGAGGGACUCGAAGG | 963 |
| A-2036 | AAGGACUUGAGGGACUCGAAGGAU | 964 |
| A-2037 | AAGGACUUGAGGGACUCGAAGGAUU | 965 |
| A-2038 | AAGGACUUGAGGGACUCGAAG | 966 |
| A-2039 | AAGGACUUGAGGGACUCGAAGGAA | 967 |
| A-2040 | GAUGAAGUGCACACAUUGGAUGA | 968 |
| A-2041 | GAUGAACUGCACACAUUGGAUG | 969 |
| A-2042 | GAUGAAUUGCACACAGUAGAUGA | 970 |
| A-2043 | AAGGACUUGAGGGACUCGAAGGUU | 971 |
| A-2044 | AAGGACUUGAGGGACUCGAAGGUUU | 972 |
| A-2045 | AAGGACUUGAGGGACUCGAAGGU | 973 |
| A-2046 | AAGGACUUGAGGGACUCGAAGGUUUU | 974 |
| A-2047 | AAGGACUUGAGGGACUCGAAGGUUUUU | 975 |
| A-2048 | AAGGACUUGAGGGACUCGAAGG | 976 |
| A-2049 | UAAGGACUUGAGGGACUCGAAG | 977 |
| A-2050 | AAGGACUUGAGGGACUCGAAG | 978 |
| A-2051 | AAGGACUUGAGGGACUCGAAGU | 979 |
| A-2052 | AAGGACUUGAGGGACUCGAAGACGA | 980 |
| | GUCCC | |
| A-2053 | AAGGACUUGAGGGACUCGAAGACGA | 981 |
| | GUCCCA | |
| A-2054 | AAGGACUUGAGGGACUCGAAGACG | 982 |
| | AGUCCCU | |
| A-2055 | GAUGAAGUGCACACAUUGGAUAC | 983 |
| A-2056 | GAUGAAGUGCACACAUUGGAUACA | 984 |
| A-2057 | GAUGAAGUGCACACAUUGGAUACA | 985 |
| | AUGUGU | |
| A-2058 | GAUGAAGUGCACACAUUGGAU | 986 |
| A-2059 | GAUGAAGUGCACACAUUGGAUA | 987 |
| A-2060 | GAUGAAUUGCACACAGUAGAUAU | 988 |
| A-2061 | GAUGAAUUGCACACAGUAGAUAUAC | 989 |
| A-2062 | GAUGAAUUGCACACAGUAGAUAUA | 990 |
| | CUGUGU | |
| A-2063 | GAUGAAUUGCACACAGUAGAUAUA | 991 |
| A-2064 | AUGAAUUGCACACAGUAGAUAUAC | 992 |
| A-2065 | GAUGAAUUGCACACAGUAGAUA | 993 |
| A-2066 | GAUGAAUUGCACACAGUAGAUAU | 994 |
| | ACUGUGU | |
| A-2067 | UACAACGAGACUGAAUUGCU | 995 |
| A-2068 | ACAACGAGACUGAAUUGCUU | 996 |
| A-2069 | UCCGGUCACAACAUUGUGGUUC | 997 |
| A-2070 | UCCGGUCACAACAUUGUGGU | 998 |
| A-2071 | UCCGGUCACAACAUUGUG | 999 |
| A-2072 | CCGGUCACAACAUUGUGGUU | 1000 |
| A-2073 | UUUUAUAACAAGAGGUUCAU | 1001 |
| A-2074 | UUUAUAACAAGAGGUUCAUU | 1002 |
| A-2075 | UAAGCAUGGAGCUAGCAGGU | 1003 |
| A-2076 | AAGCAUGGAGCUAGCAGGUU | 1004 |
| A-2077 | CCAAAUACUGGUUGUCGGUU | 1005 |
| A-2078 | UACAACGAGACUGAAUUGCUUU | 1006 |
| A-2079 | UAACGUCAGUUCAUAAACCUUU | 1007 |
| A-2080 | GUCCGGUCACAACAUUGUGGUU | 1008 |
| A-2081 | UCCGGUCACAACAUUGUGGUUUG | 1009 |
| A-2082 | UCCGGUCACAACAUUGUGGUUU | 1010 |
| A-2083 | UCCGGUCACAACAUUGUGG | 1011 |
| A-2084 | UAAGCAUGGAGCUAGCAGGUUU | 1012 |
| A-2085 | AAGCAUGGAGCUAGCAGGUUU | 1013 |
| A-2086 | UCCAAAUACUGGUUGUCGGUUU | 1014 |
| A-2087 | CCAAAUACUGGUUGUCGGUUU | 1015 |

[0507] In one embodiment, the siRNA molecules of the present invention targeting Htt may comprise a nucleotide sequence such as, but not limited to, the sense (passenger) sequences in Table 3 or a fragment or variant thereof. As a non-limiting example, the sense sequence used in the siRNA molecule of the present invention is at least 30%, 40%, 50%, 60%, 70%, 80%, 81%, 82%, 83%, 84%, 85%, 86%, 87%, 88%, 89%, 90%, 91%, 92%, 93%, 94%, 95%, 96%, 97%, 98% or 99% or at least 20-30%, 20-40%, 20-50%, 20-60%, 20-70%, 20-80%, 20-90%, 20-95%, 20-99%, 30-40%, 30-50%, 30-60%, 30-70%, 30-80%, 30-90%, 30-95%, 30-99%, 40-50%, 40-60%, 40-70%, 40-80%, 40-90%, 40-95%, 40-99%, 50-60%, 50-70%, 50-80%, 50-90%, 50-95%, 50-99%, 60-70%, 60-80%, 60-90%, 60-95%, 60-99%, 70-80%, 70-90%, 70-95%, 70-99%, 80-90%, 80-95%, 80-99%, 90-95%, 90-99% or 95-99% of a nucleotide sequence in Table 3. As another non-limiting example, the sense sequence used in the siRNA molecule of the present invention comprises at least 3, 4, 5, 6, 7, 8, 9, 10, 11, 12, 13, 14, 15, 16, 17, 18, 19, 20, 21 or more than 21 consecutive nucleotides of a nucleotide sequence in Table 3. As yet another non-limiting example, the sense sequence used in the siRNA molecule of the present invention comprises nucleotides 1 to 22, 1 to 21, 1 to 20, 1 to 19, 1 to 18, 1 to 17, 1 to 16, 1 to 15, 1 to 14, 1 to 13, 1 to 12, 1 to 11, 1 to 10, 1 to 9, 1 to 8, 2 to 22, 2 to 21, 2 to 20, 2 to 19, 2 to 18, 2 to 17, 2 to 16, 2 to 15, 2 to 14, 2 to 13, 2 to 12, 2 to 11, 2 to 10, 2 to 9, 2 to 8, 3 to 22, 3 to 21, 3 to 20, 3 to 19, 3 to 18, 3 to 17, 3 to 16, 3 to 15, 3 to 14, 3 to 13, 3 to 12, 3 to 11, 3 to 10, 3 to 9, 3 to 8, 4 to 22, 4 to 21, 4 to 20, 4 to 19, 4 to 18, 4 to 17, 4 to 16, 4 to 15, 4 to 14, 4 to 13, 4 to 12, 4 to 11, 4 to 10, 4 to 9, 4 to 8, 5 to 22, 5 to 21, 5 to 20, 5 to 19, 5 to 18, 5 to 17, 5 to 16, 5 to 15, 5 to 14, 5 to 13, 5 to 12, 5 to 11, 5 to 10, 5 to 9, 5 to 8, 6 to 22, 6 to 21, 6 to 20, 6 to 19, 6 to 18, 6 to 17, 6 to 16, 6 to 15, 6 to 14, 6 to 13, 6 to 12, 6 to 11, 6 to 10, 7 to 22, 7 to 21, 7 to 20, 7 to 19, 7 to 18, 7 to 17, 7 to 16, 7 to 15, 7 to 14, 7 to 13, 7 to 12, 8 to 22, 8 to 21, 8 to 20, 8 to 19, 8 to 18, 8 to 17, 8 to 16, 8 to 15, 8 to 14, 8 to 13, 8 to 12, 9 to 22, 9 to 21, 9 to 20, 9 to 19, 9 to 18, 9 to 17, 9 to 16, 9 to 15, 9 to 14, 10 to 22, 10 to 21, 10 to 20, 10 to 19, 10 to 18, 10 to 17, 10 to 16, 10 to 15, 10 to 14, 11 to 22, 11 to 21, 11 to 20, 11 to 19, 11 to 18, 11 to 17, 11 to 16, 11 to 15, 11 to 14, 12 to 22, 12 to 21, 12 to 20, 12 to 19, 12 to 18, 12 to 17, 12 to 16, 13 to 22, 13 to 21, 13 to 20, 13 to 19, 13 to 18, 13 to 17, 13 to 16, 14 to 22, 14 to 21, 14 to 20, 14 to 19, 14 to 18, 14 to 17, 15 to 22, 15 to 21, 15 to 20, 15 to 19, 15 to 18, 16 to 22, 16 to 21, 16 to 20, 17 to 22, 17 to 21, or 18 to 22 of the sequences in Table 3.

TABLE 3
Sense Sequences

| | | SEQ |
|---|---|---|
| | | ID |
| Sense ID | Sequence | NO |
| S-1000 | GUUUAUGAACUGAUCUUACCC | 1016 |
| S-1001 | GUGUUAGACGGUACUGAUCCC | 1017 |
| S-1002 | CCUGCUAGCUCCAUGCUUCCC | 1018 |
| S-1003 | GUUUAUGAACUGAUCUUAGCC | 1019 |
| S-1004 | GUGUUAGACGGUACUGAUGCC | 1020 |
| S-1005 | CCUGCUAGCUCCAUGCUUGCC | 1021 |
| S-1006 | GUUUAUGAAGUGAUCUUAACC | 1022 |
| S-1007 | GUGUUAGACCGUACUGAUACC | 1023 |
| S-1008 | CCUGCUAGCACCAUGCUUACC | 1024 |
| S-1009 | GUUUAUGAAGUGAUCUUAACC | 1025 |
| S-1010 | GUGUUAGACGGUACUGAUACC | 1026 |
| S-1011 | CCUGCUAGCUCCAUGCUUACC | 1027 |
| S-lOlldt | CCUGCUAGCUCCAUGCUUAdTdT | 1028 |
| S-1012 | GUUUAUGAACUGAUCUUGCCC | 1029 |
| S-1013 | GUUUAUGAACUGAUCUUGGCC | 1030 |
| S-1014 | GUUUAUGAACUGAUCUUGACC | 1031 |
| S-1015 | GCAAUUCAGUCUCGUUGUCCC | 1032 |
| S-1016 | UCCAGGUUUAUGAACUGACCC | 1033 |
| S-1017 | GGUUUAUGAACUGACGUUCCC | 1034 |
| S-1018 | CCACAAUGUUGUGACUGGCCC | 1035 |
| S-1019 | GUCACAAAGAACCGUGUACCC | 1036 |
| S-1020 | UGAACCUCUUGUUAUAAACCC | 1037 |
| S-1021 | CCGACAACCAGUAUUUGGCCC | 1038 |
| S-1022 | GCAAUUCAGUCUCGUUGUGCC | 1039 |
| S-1023 | UCCAGGUUUAUGAACUGAGCC | 1040 |
| S-1024 | GGUUUAUGAACUGACGUUGCC | 1041 |
| S-1025 | CCACAAUGUUGUGACUGGGCC | 1042 |
| S-1026 | GUCACAAAGAACCGUGUAGCC | 1043 |
| S-1027 | UGAACCUCUUGUUAUAAAGCC | 1044 |
| S-1028 | CCGACAACCAGUAUUUGGGCC | 1045 |
| S-1029 | GCAAUUCAGUCUCGUUGUACC | 1046 |
| S-1029dt | GCAAUUCAGUCUCGUUGUAdTdT | 1047 |
| S-1030 | UCCAGGUUUAUGAACUGAACC | 1048 |
| S-lO3Odt | UCCAGGUUUAUGAACUGAAdTdT | 1049 |
| S-1031 | GGUUUAUGAACUGACGUUACC | 1050 |
| S-1032 | CCACAAUGUUGUGACUGGACC | 1051 |
| S-1033 | GUCACAAAGAACCGUGUAACC | 1052 |
| S-1034 | UGAACCUCUUGUUAUAAAACC | 1053 |
| S-1034dt | UGAACCUCUUGUUAUAAAAdTdT | 1054 |
| S-1035 | CCGACAACCAGUAUUUGGACC | 1055 |
| S-1035dt | CCGACAACCAGUAUUUGGAdTdT | 1056 |
| S-1036 | GCAAUUCAGACUCGUUGUACC | 1057 |
| S-1037 | UCCAGGUUUUUGAACUGAACC | 1058 |
| S-1038 | GGUUUAUGAUCUGACGUUACC | 1059 |
| S-1039 | CCACAAUGUAGUGACUGGACC | 1060 |
| S-1040 | GUCACAAAGUACCGUGUAACC | 1061 |
| S-1041 | UGAACCUCUAGUUAUAAAACC | 1062 |
| S-1042 | CCGACAACCUGUAUUUGGACC | 1063 |
| S-1043 | CAUUGGAAUUCCUAAAAUUCC | 1064 |
| S-1044 | GAUCAUUGGAAUUCCUAAUCC | 1065 |
| S-1045 | CAUUGGAAUUCCUAAAAUGCC | 1066 |
| S-1046 | GAUCAUUGGAAUUCCUAAGCC | 1067 |
| S-1047 | CAUUGGAAUUCCUAAAAUACC | 1068 |
| S-1047dt | CAUUGGAAUUCCUAAAAUAdTdT | 1069 |
| S-1048 | GAUCAUUGGAAUUCCUAAACC | 1070 |
| S-1048dt | GAUCAUUGGAAUUCCUAAAdTdT | 1071 |
| S-1049 | CAUUGGAAUACCUAAAAUACC | 1072 |
| S-1050 | GAUCAUUGGUAUUCCUAAACC | 1073 |
| S-1051dt | GUUUAUGAACUGACGUUAAdTdT | 1074 |
| S-1052dt | GUGUUAGACGGUACCGACAdTdT | 1075 |
| S-1053dt | AUAUCAGUAAAGAGAUUAAdTdT | 1076 |
| S-1054dt | GGUUUAUGAACUGACGUUAdTdT | 1077 |
| S-1055dt | CCACAAUGUUGUGACCGGAdTdT | 1078 |
| S-1056dt | GUCACAAAGAACCGUGCAAdTdT | 1079 |
| S-1057dt | CAUUGGAAUUCCUAAAAUCdTdT | 1080 |
| S-1058 | CCUGCUAGCUCCAUGCUUGCU | 1081 |
| S-1059 | CCUGCUAGCUCCAUGCUUGAU | 1082 |
| S-1060 | CCUGCUAGCUCCAUGCUUAUU | 1083 |
| S-1061 | CCUGCUAGCUCCAUGCUUGUU | 1084 |
| S-1062 | UUCGAGUCCCUCAAGUAGCU | 1085 |
| S-1063 | UUCGAGUCCCUCAAGUAGCUUU | 1086 |
| S-1064 | UCGAGUCCCUCAAGUCCAUUCU | 1087 |
| S-1065 | UUCCAGUCCAUCAAGUCAAUU | 1088 |
| S-1066 | UUCCGAGUCUAAAAGUCCUUGG | 1089 |
| S-1067 | UUCCGAGUCUAAAAGUCCUUGGC | 1090 |
| S-1068 | CUUCCGAGUCUAAAAGUCCUUGG | 1091 |
| S-1069 | UUCCGAGUCUAAAAGUCCUUGGU | 1092 |
| S-1070 | UUCCGAGUCUAAAAGUCCUU | 1093 |
| | GGCU | |
| S-1071 | UCCAAUGUGAAACUUCAUCGGCU | 1094 |
| S-1072 | UCCAAUGUGAAACUUCAUCGGC | 1095 |
| S-1073 | AUCCAAUGUGAAACUUCAUCGU | 1096 |
| S-1074 | AUCCAAUGUGAAACUUCAUCGGU | 1097 |
| S-1075 | UCCAAUGUGAAACUUCAUCGGU | 1098 |
| S-1076 | UCCAAUGUGAAACUUCAUCGG | 1099 |
| | CUU | |
| S-1077 | AUCUACUGUGAAAAUUCAUCGG | 1100 |
| S-1078 | UCUACUGUGAAAAUUCAUCGG | 1101 |
| S-1079 | UCUACUGUGAAAAUUCAUCGGC | 1102 |
| S-1080 | AUCUACUGUGAAAAUUCAUCGGU | 1103 |
| S-1081 | UCUACUGUGAAAAUUCAUCGGU | 1104 |
| S-1082 | UCUACUGUGAAAAUUCAUCGGCU | 1105 |
| S-1083 | CCUUCGGUCCUCAAGUCCUUCA | 1106 |
| S-1084 | UUCGAGUCCAUCAAAUCCUAUAGU | 1107 |
| S-1085 | UACAAUGUGUGCACUUCAUAU | 1108 |
| S-1086 | UAUACUGUGUGCAAUUCAUUUCU | 1109 |
| S-1087 | GCAAUUCAGUCUCGUUGUCC | 1110 |
| S-1088 | GCAAUUCAGUCUCGUUGUC | 1111 |
| S-1089 | CAAUUCAGUCUCGUUGUCCC | 1112 |
| S-1090 | CAAUUCAGUCUCGUUGUCC | 1113 |
| S-1091 | GCAAUUCAGUCUCGUUGUGC | 1114 |
| S-1092 | CAAUUCAGUCUCGUUGUGCC | 1115 |
| S-1093 | CCACAAUGUUGUGACUGGGCCU | 1116 |
| S-1094 | CCACAAUGUUGUGACUGGGC | 1117 |
| S-1095 | CACAAUGUUGUGACUGGGCC | 1118 |
| S-1096 | UGAACCUCUUGUUAUAAAGCCU | 1119 |
| S-1097 | UGAACCUCUUGUUAUAAAGC | 1120 |
| S-1098 | GAACCUCUUGUUAUAAAGCC | 1121 |
| S-1099 | CCUGCUAGCUCCAUGCUUGCCU | 1122 |
| S-1100 | CCUGCUAGCUCCAUGCUUGC | 1123 |
| S-1101 | CCUGCUAGCUCCAUGCUUG | 1124 |
| S-1102 | CUGCUAGCUCCAUGCUUGCC | 1125 |
| S-1103 | CCGACAACCAGUAUUUGGGCCU | 1126 |
| S-1104 | CCGACAACCAGUAUUUGGGC | 1127 |
| S-1105 | CCGACAACCAGUAUUUGGG | 1128 |
| S-1106 | CGACAACCAGUAUUUGGGCC | 1129 |
| S-1107 | CGACAACCAGUAUUUGGGC | 1130 |
| S-1108 | GCAAUUCAGUCUCGUUGUACCU | 1131 |
| S-1109 | GCAAUUCAGUCUCGUUGUAC | 1132 |
| S-1110 | GCAAUUCAGUCUCGUUGUA | 1133 |
| S-1111 | CAAUUCAGUCUCGUUGUACC | 1134 |
| S-1112 | GCAAUUCAGACUCGUUGUACCU | 1135 |
| S-1113 | GCAAUUCAGACUCGUUGUAC | 1136 |
| S-1114 | GCAAUUCAGACUCGUUGUA | 1137 |
| S-1115 | CAAUUCAGACUCGUUGUACC | 1138 |
| S-1116 | AGCAAUUCAGUCUCGUUGUACC | 1139 |
| S-1117 | AGCAAUUCAGUCUCGUUGUAC | 1140 |
| S-1118 | AGGUUUAUGAACUGACGUUAC | 1141 |
| S-1119 | AGGUUUAUGAACUGACGUUACC | 1142 |
| S-1120 | ACCACAAUGUUGUGACUGGAC | 1143 |
| S-1121 | ACCACAAUGUUGUGACUGGACC | 1144 |
| S-1122 | CCACAAUGUUGUGACUGGACCGU | 1145 |
| S-1123 | CCACAAUGUUGUGACUGGACCG | 1146 |
| S-1124 | CCACAAUGUUGUGACUGGAC | 1147 |
| S-1125 | CACAAUGUUGUGACUGGACC | 1148 |
| S-1126 | ACCUGCUAGCUCCAUGCUUCCC | 1149 |
| S-1127 | ACCUGCUAGCUCCAUGCUUCC | 1150 |
| S-1128 | ACCUGCUAGCUCCAUGCUUC | 1151 |
| S-1129 | CCUGCUAGCUCCAUGCUUCC | 1152 |
| S-1130 | CCUGCUAGCUCCAUGCUUC | 1153 |
| S-1131 | CUGCUAGCUCCAUGCUUCCC | 1154 |
| S-1132 | CUGCUAGCUCCAUGCUUCC | 1155 |
| S-1133 | ACCGACAACCAGUAUUUGGACC | 1156 |
| S-1134 | ACCGACAACCAGUAUUUGGAC | 1157 |
| S-1135 | CCGACAACCAGUAUUUGGACCGU | 1158 |
| S-1136 | CCGACAACCAGUAUUUGGACCGU | 1159 |
| S-1137 | CCGACAACCAGUAUUUGGAC | 1160 |
| S-1138 | CGACAACCAGUAUUUGGACC | 1161 |
| S-1139 | CCUGCUAGCACCGUGCUUACC | 1162 |

[0508] In one embodiment, the siRNA molecules of the present invention targeting Htt may comprise an antisense sequence from Table 2 and a sense sequence from Table 3, or a fragment or variant thereof. As a non-limiting example, the antisense sequence and the sense sequence have at least 30%, 40%, 50%, 60%, 70%, 80%, 81%, 82%, 83%, 84%, 85%, 86%, 87%, 88%, 89%, 90%, 91%, 92%, 93%, 94%, 95%, 96%, 97%, 98% or 99% or at least 20-30%, 20-40%, 20-50%, 20-60%, 20-70%, 20-80%, 20-90%, 20-95%, 20-99%, 30-40%, 30-50%, 30-60%, 30-70%, 30-80%, 30-90%, 30-95%, 30-99%, 40-50%, 40-60%, 40-70%, 40-80%, 40-90%, 40-95%, 40-99%, 50-60%, 50-70%, 50-80%, 50-90%, 50-95%, 50-99%, 60-70%, 60-80%, 60-90%, 60-95%, 60-99%, 70-80%, 70-90%, 70-95%, 70-99%, 80-90%, 80-95%, 80-99%, 90-95%, 90-99% or 95-99% complementarity.

[0509] In one embodiment, the siRNA molecules of the present invention targeting Htt may comprise the sense and antisense siRNA duplex as described in Tables 4-6. As a non-limiting example, these siRNA duplexes may be tested for in vitro inhibitory activity on endogenous HTT gene expression. The start site for the sense and antisense sequence is compared to HTT gene sequence known as NM_002111.7 (SEQ ID NO: 1163) from NCBI.

TABLE 4
Sense and antisense strand sequences of HTT dsRNA

| | | | Sense | | | | Antisense | |
|---|---|---|---|---|---|---|---|---|
| siRNA | | | Strand | SS | | | Strand | AS |
| Duplex | SS | Start | Sequence | SEQ | | Start | Sequence | SEQ |
| ID | ID | SS | (5′-3′) | ID | AS ID | AS | (5′-3′) | ID |
| D-3566 | S- | 6751 | CCUGCUAGCUCCA | 1081 | A-2002 | 6751 | UAAGCAUGGAGCU | 920 |
| | 1058 | | UGCUUGCU | | | | AGCAGGUU | |
| D-3567 | S- | 6751 | CCUGCUAGCUCCA | 1081 | A-2014 | 6748 | UAAGCAUGGAGCU | 942 |
| | 1058 | | UGCUUGCU | | | | AGCAGGCUU | |
| D-3568 | S- | 6751 | CCUGCUAGCUCCA | 1082 | A-2002 | 6751 | UAAGCAUGGAGCU | 920 |
| | 1059 | | UGCUUGAU | | | | AGCAGGUU | |
| D-3569 | S- | 6751 | CCUGCUAGCUCCA | 1083 | A-2015 | 6751 | UAAGCAUGGAGCU | 943 |
| | 1060 | | UGCUUAUU | | | | AGCAGGGU | |
| D-3570 | S- | 6751 | CCUGCUAGCUCCA | 1084 | A-2002 | 6751 | UAAGCAUGGAGCU | 920 |
| | 1061 | | UGCUUGUU | | | | AGCAGGUU | |
| D-3500 | S- | 1386 | UCCAGGUUUAUGA | 1033 | A-2004 | 1386 | UUCAGUUCAUAAA | 924 |
| | 1016 | | ACUGACCC | | | | CCUGGAUU | |
| D-3501 | S- | 1386 | UCCAGGUUUAUGA | 1040 | A-2004 | 1386 | UUCAGUUCAUAAA | 924 |
| | 1023 | | ACUGAGCC | | | | CCUGGAUU | |
| D-3502 | S- | 1386 | UCCAGGUUUAUGA | 1048 | A-2004 | 1386 | UUCAGUUCAUAAA | 924 |
| | 1030 | | ACUGAACC | | | | CCUGGAUU | |
| D-3503 | S- | 1386 | UCCAGGUUUUUG | 1058 | A-2004 | 1386 | UUCAGUUCAUAAA | 924 |
| | 1037 | | AACUGAACC | | | | CCUGGAUU | |
| D-3504 | S- | 1386 | UCCAGGUUUAUGA | 1048 | A-2001 | 2066 | UGUCGGUACCGUC | 918 |
| | 1030 | | ACUGAACC | | | | UAACACUU | |
| D-3505 | S- | 1390 | GGUUUAUGAACU | 1034 | A-2005 | 1389 | UAACGUCAGUUCA | 926 |
| | 1017 | | GACGUUCCC | | | | UAAACCUU | |
| D-3506 | S- | 1390 | GGUUUAUGAACU | 1041 | A-2005 | 1389 | UAACGUCAGUUCA | 926 |
| | 1024 | | GACGUUGCC | | | | UAAACCUU | |
| D-3507 | S- | 1390 | GGUUUAUGAACU | 1050 | A-2005 | 1389 | UAACGUCAGUUCA | 926 |
| | 1031 | | GACGUUACC | | | | UAAACCUU | |
| D-3508 | S- | 1390 | GGUUUAUGAUCU | 1059 | A-2005 | 1389 | UAACGUCAGUUCA | 926 |
| | 1038 | | GACGUUACC | | | | UAAACCUU | |
| D-3509 | S- | 1391 | GUUUAUGAACUG | 1016 | A-2000 | 1391 | UUAACGUCAGUUC | 916 |
| | 1000 | | AUCUUACCC | | | | AUAAACUU | |
| D-3510 | S- | 1391 | GUUUAUGAACUG | 1019 | A-2000 | 1391 | UUAACGUCAGUUC | 916 |
| | 1003 | | AUCUUAGCC | | | | AUAAACUU | |
| D-3511 | S- | 1391 | GUUUAUGAACUG | 1022 | A-2000 | 1391 | UUAACGUCAGUUC | 916 |
| | 1006 | | AUCUUAACC | | | | AUAAACUU | |
| D-3512 | S- | 1391 | GUUUAUGAACUG | 1025 | A-2000 | 1391 | UUAACGUCAGUUC | 916 |
| | 1009 | | AUCUUAACC | | | | AUAAACUU | |
| D-3513 | S- | 1391 | GUUUAUGAACUG | 1029 | A-2000 | 1391 | UUAACGUCAGUUC | 916 |
| | 1012 | | AUCUUGCCC | | | | AUAAACUU | |
| D-3514 | S- | 1391 | GUUUAUGAACUG | 1030 | A-2000 | 1391 | UUAACGUCAGUUC | 916 |
| | 1013 | | AUCUUGGCC | | | | AUAAACUU | |
| D-3515 | S- | 1391 | GUUUAUGAACUG | 1031 | A-2000 | 1391 | UUAACGUCAGUUC | 916 |
| | 1014 | | AUCUUGACC | | | | AUAAACUU | |
| D-3516 | S- | 1429 | CCACAAUGUUGUG | 1035 | A-2006 | 1428 | UCCGGUCACAACA | 928 |
| | 1018 | | ACUGGCCC | | | | UUGUGGUU | |
| D-3517 | S- | 1429 | CCACAAUGUUGUG | 1042 | A-2006 | 1428 | UCCGGUCACAACA | 928 |
| | 1025 | | ACUGGGCC | | | | UUGUGGUU | |
| D-3518 | S- | 1429 | CCACAAUGUUGUG | 1051 | A-2006 | 1428 | UCCGGUCACAACA | 928 |
| | 1032 | | ACUGGACC | | | | UUGUGGUU | |
| D-3519 | S- | 1429 | CCACAAUGUAGUG | 1060 | A-2006 | 1428 | UCCGGUCACAACA | 928 |
| | 1039 | | ACUGGACC | | | | UUGUGGUU | |
| D-3520 | S- | 2066 | GUGUUAGACGGU | 1017 | A-2001 | 2066 | UGUCGGUACCGUC | 918 |
| | 1001 | | ACUGAUCCC | | | | UAACACUU | |
| D-3521 | S- | 2066 | GUGUUAGACGGU | 1020 | A-2001 | 2066 | UGUCGGUACCGUC | 918 |
| | 1004 | | ACUGAUGCC | | | | UAACACUU | |
| D-3522 | S- | 2066 | GUGUUAGACCGUA | 1023 | A-2001 | 2066 | UGUCGGUACCGUC | 918 |
| | 1007 | | CUGAUACC | | | | UAACACUU | |
| D-3523 | S- | 2066 | GUGUUAGACGGU | 1026 | A-2001 | 2066 | UGUCGGUACCGUC | 918 |
| | 1010 | | ACUGAUACC | | | | UAACACUU | |
| D-3524 | S- | 2079 | CCGACAACCAGUA | 1038 | A-2009 | 2078 | UCCAAAUACUGGU | 934 |
| | 1021 | | UUUGGCCC | | | | UGUCGGUU | |
| D-3525 | S- | 2079 | CCGACAACCAGUA | 1045 | A-2009 | 2078 | UCCAAAUACUGGU | 934 |
| | 1028 | | UUUGGGCC | | | | UGUCGGUU | |
| D-3526 | S- | 2079 | CCGACAACCAGUA | 1055 | A-2009 | 2078 | UCCAAAUACUGGU | 934 |
| | 1035 | | UUUGGACC | | | | UGUCGGUU | |
| D-3527 | S- | 2079 | CCGACAACCUGUA | 1063 | A-2009 | 2078 | UCCAAAUACUGGU | 934 |
| | 1042 | | UUUGGACC | | | | UGUCGGUU | |
| D-3528 | S- | 4544 | GUCACAAAGAACC | 1036 | A-2007 | 4544 | UUGCACGGUUCU | 930 |
| | 1019 | | GUGUACCC | | | | UUGUGACUU | |
| D-3529 | S- | 4544 | GUCACAAAGAACC | 1043 | A-2007 | 4544 | UUGCACGGUUCU | 930 |
| | 1026 | | GUGUAGCC | | | | UUGUGACUU | |
| D-3530 | S- | 4544 | GUCACAAAGAACC | 1052 | A-2007 | 4544 | UUGCACGGUUCU | 930 |
| | 1033 | | GUGUAACC | | | | UUGUGACUU | |
| D-3531 | S- | 4544 | GUCACAAAGUACC | 1061 | A-2007 | 4544 | UUGCACGGUUCU | 930 |
| | 1040 | | GUGUAACC | | | | UUGUGACUU | |
| D-3532 | S- | 4597 | UGAACCUCUUGUU | 1037 | A-2008 | 4597 | UUUUAUAACAAGA | 932 |
| | 1020 | | AUAAACCC | | | | GGUUCAUU | |
| D-3533 | S- | 4597 | UGAACCUCUUGUU | 1044 | A-2008 | 4597 | UUUUAUAACAAGA | 932 |
| | 1027 | | AUAAAGCC | | | | GGUUCAUU | |
| D-3534 | S- | 4597 | UGAACCUCUUGUU | 1053 | A-2008 | 4597 | UUUUAUAACAAGA | 932 |
| | 1034 | | AUAAAACC | | | | GGUUCAUU | |
| D-3535 | S- | 4597 | UGAACCUCUAGUU | 1062 | A-2008 | 4597 | UUUUAUAACAAGA | 932 |
| | 1041 | | AUAAAACC | | | | GGUUCAUU | |
| D-3536 | S- | 4861 | GAUCAUUGGAAU | 1065 | A-2011 | 4860 | UUUAGGAAUUCCA | 938 |
| | 1044 | | UCCUAAUCC | | | | AUGAUCUU | |
| D-3537 | S- | 4861 | GAUCAUUGGAAU | 1067 | A-2011 | 4860 | UUUAGGAAUUCCA | 938 |
| | 1046 | | UCCUAAGCC | | | | AUGAUCUU | |
| D-3538 | S- | 4861 | GAUCAUUGGAAU | 1070 | A-2011 | 4860 | UUUAGGAAUUCCA | 938 |
| | 1048 | | UCCUAAACC | | | | AUGAUCUU | |
| D-3539 | S- | 4861 | GAUCAUUGGUAU | 1073 | A-2011 | 4860 | UUUAGGAAUUCCA | 938 |
| | 1050 | | UCCUAAACC | | | | AUGAUCUU | |
| D-3540 | S- | 4864 | CAUUGGAAUUCCU | 1064 | A-2010 | 4864 | UAUUUUAGGAAU | 936 |
| | 1043 | | AAAAUUCC | | | | UCCAAUGUU | |
| D-3541 | S- | 4864 | CAUUGGAAUUCCU | 1066 | A-2010 | 4864 | UAUUUUAGGAAU | 936 |
| | 1045 | | AAAAUGCC | | | | UCCAAUGUU | |
| D-3542 | S- | 4864 | CAUUGGAAUUCCU | 1068 | A-2010 | 4864 | UAUUUUAGGAAU | 936 |
| | 1047 | | AAAAUACC | | | | UCCAAUGUU | |
| D-3543 | S- | 4864 | CAUUGGAAUACCU | 1072 | A-2010 | 4864 | UAUUUUAGGAAU | 936 |
| | 1049 | | AAAAUACC | | | | UCCAAUGUU | |
| D-3544 | S- | 6188 | GCAAUUCAGUCUC | 1032 | A-2003 | 6188 | UACAACGAGACUG | 922 |
| | 1015 | | GUUGUCCC | | | | AAUUGCUU | |
| D-3545 | S- | 6188 | GCAAUUCAGUCUC | 1039 | A-2003 | 6188 | UACAACGAGACUG | 922 |
| | 1022 | | GUUGUGCC | | | | AAUUGCUU | |
| D-3546 | S- | 6188 | GCAAUUCAGUCUC | 1046 | A-2003 | 6188 | UACAACGAGACUG | 922 |
| | 1029 | | GUUGUACC | | | | AAUUGCUU | |
| D-3547 | S- | 6188 | GCAAUUCAGACUC | 1057 | A-2003 | 6188 | UACAACGAGACUG | 922 |
| | 1036 | | GUUGUACC | | | | AAUUGCUU | |
| D-3548 | S- | 6751 | CCUGCUAGCUCCA | 1018 | A-2002 | 6751 | UAAGCAUGGAGCU | 920 |
| | 1002 | | UGCUUCCC | | | | AGCAGGUU | |
| D-3549 | S- | 6751 | CCUGCUAGCUCCA | 1021 | A-2002 | 6751 | UAAGCAUGGAGCU | 920 |
| | 1005 | | UGCUUGCC | | | | AGCAGGUU | |
| D-3550 | S- | 6751 | CCUGCUAGCACCA | 1024 | A-2002 | 6751 | UAAGCAUGGAGCU | 920 |
| | 1008 | | UGCUUACC | | | | AGCAGGUU | |
| D-3551 | S- | 6751 | CCUGCUAGCUCCA | 1027 | A-2002 | 6751 | UAAGCAUGGAGCU | 920 |
| | 1011 | | UGCUUACC | | | | AGCAGGUU | |

TABLE 5
Sense and antisense strand sequences of HTT dsRNA

| | | | | | | | Anti- | |
|---|---|---|---|---|---|---|---|---|
| | | | Sense | | | | sense | |
| | | | Strand | | | | Strand | |
| siRNA | | | Se- | SS | | | Se- | AS |
| Duplex | SS | Start | quence | SEQ | | Start | quence | SEQ |
| ID | ID | SS | (5′-3′) | ID | AS ID | AS | (5′-3′) | ID |
| D- | S- | 1391 | GUUUAUG | 1074 | A- | 1391 | UUAACGU | 917 |
| 3552 | 1051dt | | AACUGAC | | 2000dt | | CAGUUC | |
| | | | GUUAAdT | | | | AUAAACd | |
| | | | dT | | | | TdT | |
| D- | S- | 2066 | GUGUUAG | 1075 | A- | 2066 | UGUCGGU | 919 |
| 3553 | 1052dt | | ACGGUAC | | 2001dt | | ACCGUC | |
| | | | CGACAdT | | | | UAACACd | |
| | | | dT | | | | TdT | |
| D- | S- | 6751 | CCUGCUA | 1028 | A- | 6751 | UAAGCAU | 921 |
| 3554 | l011dt | | GCUCCAU | | 2002dt | | GGAGCU | |
| | | | CGUUAdT | | | | AGCAGGd | |
| | | | dT | | | | TdT | |
| D- | S- | 1032 | AUAUCAG | 1076 | A- | 1032 | UUAAUCU | 940 |
| 3555 | 1053dt | | UAAAGAG | | 2012dt | | CUUUAC | |
| | | 2 | AUUAAdT | | | 2 | UGAUAUd | |
| | | | dT | | | | TdT | |
| D- | S- | 1386 | UCCAGGU | 1049 | A- | 1386 | UUCAGUU | 925 |
| 3556 | lO3Odt | | UUAUGAA | | 2004dt | | CAUAAAC | |
| | | | CUGAAdT | | | | CUGGAdT | |
| | | | dT | | | | dT | |
| D- | S- | 1390 | GGUUUAU | 1077 | A- | 1390 | UAACGUC | 927 |
| 3557 | 1054dt | | GAACUGA | | 2005dt | | AGUUCA | |
| | | | CGUUAdT | | | | UAAACCd | |
| | | | dT | | | | TdT | |
| D- | S- | 1429 | CCACAAU | 1078 | A- | 1429 | UCCGGUC | 929 |
| 3558 | 1055dt | | GUUGUGA | | 2006dt | | ACAACAU | |
| | | | CCGGAdT | | | | UGUGGdT | |
| | | | dT | | | | dT | |
| D- | S- | 2079 | CCGACAA | 1056 | A- | 2079 | UCCAAAU | 935 |
| 3559 | 1035dt | | CCAGUAU | | 2009dt | | ACUGGU | |
| | | | UUGGAdT | | | | UGUCGGd | |
| | | | dT | | | | TdT | |
| D- | S- | 4544 | GUCACAA | 1079 | A- | 4544 | UUGCACG | 931 |
| 3560 | 1056dt | | AGAACCG | | 2007dt | | GUUCUU | |
| | | | UGCAAdT | | | | UGUGACd | |
| | | | dT | | | | TdT | |
| D- | S- | 4597 | UGAACCU | 1054 | A- | 4597 | UUUUAUA | 933 |
| 3561 | 1034dt | | CUUGUUA | | 2008dt | | ACAAGA | |
| | | | UAAAAdT | | | | GGUUCAd | |
| | | | dT | | | | TdT | |
| D- | S- | 6188 | GCAAUUC | 1047 | A- | 6188 | UACAACG | 923 |
| 3562 | 1029dt | | AGUCUCG | | 2003dt | | AGACUGA | |
| | | | UUGUAdT | | | | AUUGCdT | |
| | | | dT | | | | dT | |
| D- | S- | 4864 | CAUUGGA | 1069 | A- | 4864 | UAUUUUA | 937 |
| 3563 | 1047dt | | AUUCCUA | | 2010dt | | GGAAUU | |
| | | | AAAUAdT | | | | CCAAUGd | |
| | | | dT | | | | TdT | |
| D- | S- | 4861 | GAUCAUU | 1071 | A- | 4861 | UUUAGGA | 939 |
| 3564 | 1048dt | | GGAAUUC | | 2011dt | | AUUCCA | |
| | | | CUAAAdT | | | | AUGAUCd | |
| | | | dT | | | | TdT | |
| D- | S- | 4864 | CAUUGGA | 1080 | A- | 4864 | GAUUUUA | 941 |
| 3565 | 1057dt | | AUUCCUA | | 2013dt | | GGAAUU | |
| | | | AAAUCdT | | | | CCAAUGd | |
| | | | dT | | | | TdT | |

TABLE 6
Antisense and Sense strand
sequences of HTT dsRNA

| | | | Anti- | | | | | |
|---|---|---|---|---|---|---|---|---|
| | | | sense | | | | Sense | |
| | | | Strand | | | | Strand | |
| siRNA | | | Se- | AS | | | Se- | SS |
| Duplex | AS | Start | quence | SEQ | SS | Start | quence | SEQ |
| ID | ID | AS | (5′-3′) | ID | ID | SS | (5′-3′) | ID |
| D-3569 | S- | 6751 | CCUGCU | 1083 | A- | 6751 | UAAGCA | 943 |
| | 1060 | | AGCUCC | | 2015 | | UGGAGC | |
| | | | AUGCUU | | | | UAGCAG | |
| | | | AUU | | | | GGU | |
| D-3570 | S- | 6751 | CCUGCU | 1084 | A- | 6751 | UAAGCA | 920 |
| | 1061 | | AGCUCC | | 2002 | | UGGAGC | |
| | | | AUGCUU | | | | UAGCAG | |
| | | | GUU | | | | GUU | |

[0510] In other embodiments, the siRNA molecules of the present invention targeting Htt can be encoded in plasmid vectors, AAV particles, viral genome or other nucleic acid expression vectors for delivery to a cell.

[0511] DNA expression plasmids can be used to stably express the siRNA duplexes or dsRNA of the present invention targeting Htt in cells and achieve long-term inhibition of the target gene expression. In one aspect, the sense and antisense strands of a siRNA duplex are typically linked by a short spacer sequence leading to the expression of a stem-loop structure termed short hairpin RNA (shRNA). The hairpin is recognized and cleaved by Dicer, thus generating mature siRNA molecules.

[0512] According to the present invention, AAV particles comprising the nucleic acids encoding the siRNA molecules targeting HTT mRNA are produced, the AAV serotypes may be any of the serotypes listed in Table 1. Non-limiting examples of the AAV serotypes include, AAV1, AAV2, AAV3, AAV4, AAV5, AAV6, AAV7, AAV8, AAV9, AAV9.47, AAV9(hu14), AAV10, AAV11, AAV12, AAVrh8, AAVrh10, AAV-DJ8, AAV-DJ, AAV-PHP.A, and/or AAV-PHP.B, and variants thereof.

[0513] In some embodiments, the siRNA duplexes or encoded dsRNA of the present invention suppress (or degrade) HTT mRNA. Accordingly, the siRNA duplexes or encoded dsRNA can be used to substantially inhibit HTT gene expression in a cell, for example a neuron. In some aspects, the inhibition of HTT gene expression refers to an inhibition by at least about 20%, preferably by at least about 30%, 40%, 50%, 60%, 70%, 80%, 85%, 90%, 95% and 100%, or at least 20-30%, 20-40%, 20-50%, 20-60%, 20-70%, 20-80%, 20-90%, 20-95%, 20-100%, 30-40%, 30-50%, 30-60%, 30-70%, 30-80%, 30-90%, 30-95%, 30-100%, 40-50%, 40-60%, 40-70%, 40-80%, 40-90%, 40-95%, 40-100%, 50-60%, 50-70%, 50-80%, 50-90%, 50-95%, 50-100%, 60-70%, 60-80%, 60-90%, 60-95%, 60-100%, 70-80%, 70-90%, 70-95%, 70-100%, 80-90%, 80-95%, 80-100%, 90-95%, 90-100% or 95-100%. Accordingly, the protein product of the targeted gene may be inhibited by at least about 20%, preferably by at least about 30%, 40%, 50%, 60%, 70%, 80%, 85%, 90%, 95% and 100%, or at least 20-30%, 20-40%, 20-50%, 20-60%, 20-70%, 20-80%, 20-90%, 20-95%, 20-100%, 30-40%, 30-50%, 30-60%, 30-70%, 30-80%, 30-90%, 30-95%, 30-100%, 40-50%, 40-60%, 40-70%, 40-80%, 40-90%, 40-95%, 40-100%, 50-60%, 50-70%, 50-80%, 50-90%, 50-95%, 50-100%, 60-70%, 60-80%, 60-90%, 60-95%, 60-100%, 70-80%, 70-90%, 70-95%, 70-100%, 80-90%, 80-95%, 80-100%, 90-95%, 90-100% or 95-100%.

[0514] According to the present invention, the siRNA molecules are designed and tested for their ability in reducing HTT mRNA levels in cultured cells. Such siRNA molecules may form a duplex such as, but not limited to, include those listed in Table 4, Table 5 or Table 6. As a non-limiting example, the siRNA duplexes may be siRNA duplex IDs: D-3500 to D-3570.

[0515] In one embodiment, the siRNA molecules comprise a miRNA seed match for HTT located in the guide strand. In another embodiment, the siRNA molecules comprise a miRNA seed match for HTT located in the passenger strand. In yet another embodiment, the siRNA duplexes or encoded dsRNA targeting HTT gene do not comprise a seed match for HTT located in the guide or passenger strand.

[0516] In one embodiment, the siRNA duplexes or encoded dsRNA targeting HTT gene may have almost no significant full-length off target effects for the guide strand. In another embodiment, the siRNA duplexes or encoded dsRNA targeting HTT gene may have almost no significant full-length off target effects for the passenger strand. The siRNA duplexes or encoded dsRNA targeting HTT gene may have less than 1%, 2%, 3%, 4%, 5%, 6%, 7%, 8%, 9%, 10%, 11%, 12%, 13%, 14%, 15%, 20%, 25%, 30%, 35%, 40%, 45%, 50%, 1-5%, 2-6%, 3-7%, 4-8%, 5-9%, 5-10%, 6-10%, 5-15%, 5-20%, 5-25% 5-30%, 10-20%, 10-30%, 10-40%, 10-50%, 15-30%, 15-40%, 15-45%, 20-40%, 20-50%, 25-50%, 30-40%, 30-50%, 35-50%, 40-50%, 45-50% full-length off target effects for the passenger strand. In yet another embodiment, the siRNA duplexes or encoded dsRNA targeting HTT gene may have almost no significant full-length off target effects for the guide strand or the passenger strand. The siRNA duplexes or encoded dsRNA targeting HTT gene may have less than 1%, 2%, 3%, 4%, 5%, 6%, 7%, 8%, 9%, 10%, 11%, 12%, 13%, 14%, 15%, 20%, 25%, 30%, 35%, 40%, 45%, 50%, 1-5%, 2-6%, 3-7%, 4-8%, 5-9%, 5-10%, 6-10%, 5-15%, 5-20%, 5-25% 5-30%, 10-20%, 10-30%, 10-40%, 10-50%, 15-30%, 15-40%, 15-45%, 20-40%, 20-50%, 25-50%, 30-40%, 30-50%, 35-50%, 40-50%, 45-50% full-length off target effects for the guide or passenger strand.

[0517] In one embodiment, the siRNA duplexes or encoded dsRNA targeting HTT gene may have high activity in vitro. In another embodiment, the siRNA molecules may have low activity in vitro. In yet another embodiment, the siRNA duplexes or dsRNA targeting the HTT gene may have high guide strand activity and low passenger strand activity in vitro.

[0518] In one embodiment, the siRNA molecules targeting HTT have a high guide strand activity and low passenger strand activity in vitro. The target knock-down (KD) by the guide strand may be at least 40%, 50%, 60%, 65%, 70%, 75%, 80%, 85%, 90%, 95%, 99%, 99.5% or 100%. The target knock-down by the guide strand may be 40-50%, 45-50%, 50-55%, 50-60%, 60-65%, 60-70%, 60-75%, 60-80%, 60-85%, 60-90%, 60-95%, 60-99%, 60-99.5%, 60-100%, 65-70%, 65-75%, 65-80%, 65-85%, 65-90%, 65-95%, 65-99%, 65-99.5%, 65-100%, 70-75%, 70-80%, 70-85%, 70-90%, 70-95%, 70-99%, 70-99.5%, 70-100%, 75-80%, 75-85%, 75-90%, 75-95%, 75-99%, 75-99.5%, 75-100%, 80-85%, 80-90%, 80-95%, 80-99%, 80-99.5%, 80-100%, 85-90%, 85-95%, 85-99%, 85-99.5%, 85-100%, 90-95%, 90-99%, 90-99.5%, 90-100%, 95-99%, 95-99.5%, 95-100%, 99-99.5%, 99-100% or 99.5-100%. As a non-limiting example, the target knock-down (KD) by the guide strand is greater than 70%. As a non-limiting example, the target knock-down (KD) by the guide strand is greater than 60%.

[0519] In one embodiment, the siRNA duplex target HTT is designed so there is no miRNA seed match for the sense or antisense sequence to the non-Htt sequence.

[0520] In one embodiment, the IC₅₀ of the guide strand in the siRNA duplex targeting HTT for the nearest off target is greater than 100 multiplied by the IC₅₀ of the guide strand for the on-target gene, Htt. As a non-limiting example, if the IC₅₀ of the guide strand for the nearest off target is greater than 100 multiplied by the IC₅₀ of the guide strand for the target then the siRNA molecule is said to have high guide strand selectivity for inhibiting Htt in vitro.

[0521] In one embodiment, the 5′ processing of the guide strand of the siRNA duplex targeting HTT has a correct start (n) at the 5′ end at least 75%, 80%, 85%, 90%, 95%, 99% or 100% of the time in vitro or in vivo. As a non-limiting example, the 5′ processing of the guide strand is precise and has a correct start (n) at the 5′ end at least 99% of the time in vitro. As a non-limiting example, the 5′ processing of the guide strand is precise and has a correct start (n) at the 5′ end at least 99% of the time in vivo. As a non-limiting example, the 5′ processing of the guide strand is precise and has a correct start (n) at the 5′ end at least 90% of the time in vitro. As a non-limiting example, the 5′ processing of the guide strand is precise and has a correct start (n) at the 5′ end at least 90% of the time in vivo. As a non-limiting example, the 5′ processing of the guide strand is precise and has a correct start (n) at the 5′ end at least 85% of the time in vitro. As a non-limiting example, the 5′ processing of the guide strand is precise and has a correct start (n) at the 5′ end at least 85% of the time in vivo.

[0522] In one embodiment, a passenger-guide strand duplex for HTT is considered effective when the pri- or pre-microRNAs demonstrate, by methods known in the art and described herein, greater than 2-fold guide to passenger strand ratio when processing is measured. As a non-limiting examples, the pri- or pre-microRNAs demonstrate great than 2-fold, 3-fold, 4-fold, 5-fold, 6-fold, 7-fold, 8-fold, 9-fold, 10-fold, 11-fold, 12-fold, 13-fold, 14-fold, 15-fold, or 2 to 5-fold, 2 to 10-fold, 2 to 15-fold, 3 to 5-fold, 3 to 10-fold, 3 to 15-fold, 4 to 5-fold, 4 to 10-fold, 4 to 15-fold, 5 to 10-fold, 5 to 15-fold, 6 to 10-fold, 6 to 15-fold, 7 to 10-fold, 7 to 15-fold, 8 to 10-fold, 8 to 15-fold, 9 to 10-fold, 9 to 15-fold, 10 to 15-fold, 11 to 15-fold, 12 to 15-fold, 13 to 15-fold, or 14 to 15-fold guide to passenger strand ratio when processing is measured.

[0523] In one embodiment, the siRNA molecules may be used to silence wild type or mutant HTT by targeting at least one exon on the htt sequence. The exon may be exon 1, exon 2, exon 3, exon 4, exon 5, exon 6, exon 7, exon 8, exon 9, exon 10, exon 11, exon 12, exon 13, exon 14, exon 15, exon 16, exon 17, exon 18, exon 19, exon 20, exon 21, exon 22, exon 23, exon 24, exon 25, exon 26, exon 27, exon 28, exon 29, exon 30, exon 31, exon 32, exon 33, exon 34, exon 35, exon 36, exon 37, exon 38, exon 39, exon 40, exon 41, exon 42, exon 43, exon 44, exon 45, exon 46, exon 47, exon 48, exon 49, exon 50, exon 51, exon 52, exon 53, exon 54, exon 55, exon 56, exon 57, exon 58, exon 59, exon 60, exon 61, exon 62, exon 63, exon 64, exon 65, exon 66, and/or exon 67. As a non-limiting example, the siRNA molecules may be used to silence wild type or mutant HTT by targeting exon 1. As another non-limiting example, the siRNA molecules may be used to silence wild type or mutant HTT by targeting an exon other than exon 1. As another non-limiting example, the siRNA molecules may be used to silence wild type or mutant HTT by targeting exon 50. As another non-limiting example, the siRNA molecules may be used to silence wild type or mutant HTT by targeting exon 67.

[0524] In one embodiment, the siRNA molecules may be used to silence wild type and/or mutant HTT by targeting at least one exon on the htt sequence. The exon may be exon 1, exon 2, exon 3, exon 4, exon 5, exon 6, exon 7, exon 8, exon 9, exon 10, exon 11, exon 12, exon 13, exon 14, exon 15, exon 16, exon 17, exon 18, exon 19, exon 20, exon 21, exon 22, exon 23, exon 24, exon 25, exon 26, exon 27, exon 28, exon 29, exon 30, exon 31, exon 32, exon 33, exon 34, exon 35, exon 36, exon 37, exon 38, exon 39, exon 40, exon 41, exon 42, exon 43, exon 44, exon 45, exon 46, exon 47, exon 48, exon 49, exon 50, exon 51, exon 52, exon 53, exon 54, exon 55, exon 56, exon 57, exon 58, exon 59, exon 60, exon 61, exon 62, exon 63, exon 64, exon 65, exon 66, and/or exon 67. As a non-limiting example, the siRNA molecules may be used to silence wild type and/or mutant HTT by targeting exon 1. As another non-limiting example, the siRNA molecules may be used to silence wild type and/or mutant HTT by targeting an exon other than exon 1. As another non-limiting example, the siRNA molecules may be used to silence wild type and/or mutant HTT by targeting exon 50. As another non-limiting example, the siRNA molecules may be used to silence wild type and/or mutant HTT by targeting exon 67.

Design and Sequences of siRNA Duplexes Targeting SOD1 Gene

[0525] The present invention provides small interfering RNA (siRNA) duplexes (and modulatory polynucleotides encoding them) that target SOD1 mRNA to interfere with SOD1 gene expression and/or SOD1 protein production.

[0526] The encoded siRNA duplex of the present invention contains an antisense strand and a sense strand hybridized together forming a duplex structure, wherein the antisense strand is complementary to the nucleic acid sequence of the targeted SOD1 gene, and wherein the sense strand is homologous to the nucleic acid sequence of the targeted SOD1 gene. In some aspects, the 5′end of the antisense strand has a 5′ phosphate group and the 3′end of the sense strand contains a 3′hydroxyl group. In other aspects, there are none, one or 2 nucleotide overhangs at the 3′end of each strand.

[0527] Some guidelines for designing siRNAs have been proposed in the art. These guidelines generally recommend generating a 19-nucleotide duplexed region, symmetric 2-3 nucleotide 3′ overhangs, 5′-phosphate and 3′-hydroxyl groups targeting a region in the gene to be silenced. Other rules that may govern siRNA sequence preference include, but are not limited to, (i) A/U at the 5′ end of the antisense strand; (ii) G/C at the 5′ end of the sense strand; (iii) at least five A/U residues in the 5′ terminal one-third of the antisense strand; and (iv) the absence of any GC stretch of more than 9 nucleotides in length. In accordance with such consideration, together with the specific sequence of a target gene, highly effective siRNA molecules essential for suppressing the SOD1 gene expression may be readily designed.

[0528] According to the present invention, siRNA molecules (e.g., siRNA duplexes or encoded dsRNA) that target the SOD1 gene are designed. Such siRNA molecules can specifically, suppress SOD1 gene expression and protein production. In some aspects, the siRNA molecules are designed and used to selectively “knock out” SOD1 gene variants in cells, i.e., mutated SOD1 transcripts that are identified in patients with ALS disease. In some aspects, the siRNA molecules are designed and used to selectively “knock down” SOD1 gene variants in cells. In other aspects, the siRNA molecules are able to inhibit or suppress both the wild type and mutated SOD1 gene.

[0529] In one embodiment, an siRNA molecule of the present invention comprises a sense strand and a complementary antisense strand in which both strands are hybridized together to form a duplex structure. The antisense strand has sufficient complementarity to the SOD1 mRNA sequence to direct target-specific RNAi, i.e., the siRNA molecule has a sequence sufficient to trigger the destruction of the target mRNA by the RNAi machinery or process.

[0530] In one embodiment, an siRNA molecule of the present invention comprises a sense strand and a complementary antisense strand in which both strands are hybridized together to form a duplex structure and where the start site of the hybridization to the SOD1 mRNA is between nucleotide 15 and 1000 on the SOD1 mRNA sequence. As a non-limiting example, the start site may be between nucleotide 15-25, 15-50, 15-75, 15-100, 100-150, 150-200, 200-250, 250-300, 300-350, 350-400, 400-450, 450-500, 500-550, 550-600, 600-650, 650-700, 700-70, 750-800, 800-850, 850-900, 900-950, and 950-1000 on the SOD1 mRNA sequence. As yet another non-limiting example, the start site may be nucleotide 26, 27, 28, 29, 30, 32, 33, 34, 35, 36, 37, 74, 76, 77, 78, 149, 153, 157, 160, 177, 192, 193, 195, 196, 197, 198, 199, 206, 209, 210, 239, 241, 261, 263, 264, 268, 269, 276, 278, 281, 284, 290, 291, 295, 296, 316, 317, 329, 330, 337, 350, 351, 352, 354, 357, 358, 364, 375, 378, 383, 384, 390, 392, 395, 404, 406, 417, 418, 469, 470, 475, 476, 480, 487, 494, 496, 497, 501, 504, 515, 518, 522, 523, 524, 552, 554, 555, 562, 576, 577, 578, 579, 581, 583, 584, 585, 587, 588, 589, 593, 594, 595, 596, 597, 598, 599, 602, 607, 608, 609, 610, 611, 612, 613, 616, 621, 633, 635, 636, 639, 640, 641, 642, 643, 644, 645, 654, 660, 661, 666, 667, 668, 669, 673, 677, 692, 698, 699, 700, 701, 706, 749, 770, 772, 775, 781, 800, 804, 819, 829, 832, 833, 851, 854, 855, 857, 858, 859, 861, 869, 891, 892, 906, 907, 912, 913, 934, 944, and 947 on the SOD1 mRNA sequence.

[0531] In some embodiments, the antisense strand and target SOD1 mRNA sequences have 100% complementarity. The antisense strand may be complementary to any part of the target SOD1 mRNA sequence.

[0532] In other embodiments, the antisense strand and target SOD1 mRNA sequences comprise at least one mismatch. As a non-limiting example, the antisense strand and the target SOD1 mRNA sequence have at least 30%, 40%, 50%, 60%, 70%, 80%, 81%, 82%, 83%, 84%, 85%, 86%, 87%, 88%, 89%, 90%, 91%, 92%, 93%, 94%, 95%, 96%, 97%, 98% or 99% or at least 20-30%, 20-40%, 20-50%, 20-60%, 20-70%, 20-80%, 20-90%, 20-95%, 20-99%, 30-40%, 30-50%, 30-60%, 30-70%, 30-80%, 30-90%, 30-95%, 30-99%, 40-50%, 40-60%, 40-70%, 40-80%, 40-90%, 40-95%, 40-99%, 50-60%, 50-70%, 50-80%, 50-90%, 50-95%, 50-99%, 60-70%, 60-80%, 60-90%, 60-95%, 60-99%, 70-80%, 70-90%, 70-95%, 70-99%, 80-90%, 80-95%, 80-99%, 90-95%, 90-99% or 95-99% complementarity.

[0533] In one embodiment, an siRNA or dsRNA targeting SOD1 includes at least two sequences that are complementary to each other.

[0534] According to the present invention, the siRNA molecule targeting SOD1 has a length from about 10-50 or more nucleotides, i.e., each strand comprising 10-50 nucleotides (or nucleotide analogs). Preferably, the siRNA molecule has a length from about 15-30, e.g., 15, 16, 17, 18, 19, 20, 21, 22, 23, 24, 25, 26, 27, 28, 29, or 30 nucleotides in each strand, wherein one of the strands is sufficiently complementarity to a target region. In one embodiment, each strand of the siRNA molecule has a length from about 19 to 25, 19 to 24 or 19 to 21 nucleotides. In one embodiment, at least one strand of the siRNA molecule is 19 nucleotides in length. In one embodiment, at least one strand of the siRNA molecule is 20 nucleotides in length. In one embodiment, at least one strand of the siRNA molecule is 21 nucleotides in length. In one embodiment, at least one strand of the siRNA molecule is 22 nucleotides in length. In one embodiment, at least one strand of the siRNA molecule is 23 nucleotides in length. In one embodiment, at least one strand of the siRNA molecule is 24 nucleotides in length. In one embodiment, at least one strand of the siRNA molecule is 25 nucleotides in length.

[0535] In some embodiments, the siRNA molecules of the present invention targeting SOD1 can be synthetic RNA duplexes comprising about 19 nucleotides to about 25 nucleotides, and two overhanging nucleotides at the 3′-end. In some aspects, the siRNA molecules may be unmodified RNA molecules. In other aspects, the siRNA molecules may contain at least one modified nucleotide, such as base, sugar or backbone modifications.

[0536] In one embodiment, the siRNA molecules of the present invention targeting SOD1 may comprise a nucleotide sequence such as, but not limited to, the antisense (guide) sequences in Table 7 or a fragment or variant thereof. As a non-limiting example, the antisense sequence used in the siRNA molecule of the present invention is at least 30%, 40%, 50%, 60%, 70%, 80%, 81%, 82%, 83%, 84%, 85%, 86%, 87%, 88%, 89%, 90%, 91%, 92%, 93%, 94%, 95%, 96%, 97%, 98% or 99% or at least 20-30%, 20-40%, 20-50%, 20-60%, 20-70%, 20-80%, 20-90%, 20-95%, 20-99%, 30-40%, 30-50%, 30-60%, 30-70%, 30-80%, 30-90%, 30-95%, 30-99%, 40-50%, 40-60%, 40-70%, 40-80%, 40-90%, 40-95%, 40-99%, 50-60%, 50-70%, 50-80%, 50-90%, 50-95%, 50-99%, 60-70%, 60-80%, 60-90%, 60-95%, 60-99%, 70-80%, 70-90%, 70-95%, 70-99%, 80-90%, 80-95%, 80-99%, 90-95%, 90-99% or 95-99% of a nucleotide sequence in Table 7. As another non-limiting example, the antisense sequence used in the siRNA molecule of the present invention comprises at least 3, 4, 5, 6, 7, 8, 9, 10, 11, 12, 13, 14, 15, 16, 17, 18, 19, 20, 21 or more than 21 consecutive nucleotides of a nucleotide sequence in Table 7. As yet another non-limiting example, the antisense sequence used in the siRNA molecule of the present invention comprises nucleotides 1 to 22, 1 to 21, 1 to 20, 1 to 19, 1 to 18, 1 to 17, 1 to 16, 1 to 15, 1 to 14, 1 to 13, 1 to 12, 1 to 11, 1 to 10, 1 to 9, 1 to 8, 2 to 22, 2 to 21, 2 to 20, 2 to 19, 2 to 18, 2 to 17, 2 to 16, 2 to 15, 2 to 14, 2 to 13, 2 to 12, 2 to 11, 2 to 10, 2 to 9, 2 to 8, 3 to 22, 3 to 21, 3 to 20, 3 to 19, 3 to 18, 3 to 17, 3 to 16, 3 to 15, 3 to 14, 3 to 13, 3 to 12, 3 to 11, 3 to 10, 3 to 9, 3 to 8, 4 to 22, 4 to 21, 4 to 20, 4 to 19, 4 to 18, 4 to 17, 4 to 16, 4 to 15, 4 to 14, 4 to 13, 4 to 12, 4 to 11, 4 to 10, 4 to 9, 4 to 8, 5 to 22, 5 to 21, 5 to 20, 5 to 19, 5 to 18, 5 to 17, 5 to 16, 5 to 15, 5 to 14, 5 to 13, 5 to 12, 5 to 11, 5 to 10, 5 to 9, 5 to 8, 6 to 22, 6 to 21, 6 to 20, 6 to 19, 6 to 18, 6 to 17, 6 to 16, 6 to 15, 6 to 14, 6 to 13, 6 to 12, 6 to 11, 6 to 10, 7 to 22, 7 to 21, 7 to 20, 7 to 19, 7 to 18, 7 to 17, 7 to 16, 7 to 15, 7 to 14, 7 to 13, 7 to 12, 8 to 22, 8 to 21, 8 to 20, 8 to 19, 8 to 18, 8 to 17, 8 to 16, 8 to 15, 8 to 14, 8 to 13, 8 to 12, 9 to 22, 9 to 21, 9 to 20, 9 to 19, 9 to 18, 9 to 17, 9 to 16, 9 to 15, 9 to 14, 10 to 22, 10 to 21, 10 to 20, 10 to 19, 10 to 18, 10 to 17, 10 to 16, 10 to 15, 10 to 14, 11 to 22, 11 to 21, 11 to 20, 11 to 19, 11 to 18, 11 to 17, 11 to 16, 11 to 15, 11 to 14, 12 to 22, 12 to 21, 12 to 20, 12 to 19, 12 to 18, 12 to 17, 12 to 16, 13 to 22, 13 to 21, 13 to 20, 13 to 19, 13 to 18, 13 to 17, 13 to 16, 14 to 22, 14 to 21, 14 to 20, 14 to 19, 14 to 18, 14 to 17, 15 to 22, 15 to 21, 15 to 20, 15 to 19, 15 to 18, 16 to 22, 16 to 21, 16 to 20, 17 to 22, 17 to 21, or 18 to 22 of the sequences in Table 7.

TABLE 7
Antisense Sequences

| Antisense | | SEQ |
|---|---|---|
| ID | Sequence | ID NO |
| A-3000 | UUUAUAGGCCAGACCUCCGdTdT | 1164 |
| A-3001 | UUUUAUAGGCCAGACCUCCdTdT | 1165 |
| A-3002 | UCUUUAUAGGCCAGACCUCdTdT | 1166 |
| A-3003 | UACUUUAUAGGCCAGACCUdTdT | 1167 |
| A-3004 | UUACUUUAUAGGCCAGACCdTdT | 1168 |
| A-3005 | UACUACUUUAUAGGCCAGAdTdT | 1169 |
| A-3006 | UGACUACUUUAUAGGCCAGdTdT | 1170 |
| A-3007 | UCGACUACUUUAUAGGCCAdTdT | 1171 |
| A-3008 | UGCGACUACUUUAUAGGCCdTdT | 1172 |
| A-3009 | UCGCGACUACUUUAUAGGCdTdT | 1173 |
| A-3010 | UCCGCGACUACUUUAUAGGdTdT | 1174 |
| A-3011 | UGCUGCAGGAGACUACGACdTdT | 1175 |
| A-3012 | UACGCUGCAGGAGACUACGdTdT | 1176 |
| A-3013 | UGACGCUGCAGGAGACUACdTdT | 1177 |
| A-3014 | UAGACGCUGCAGGAGACUAdTdT | 1178 |
| A-3015 | UCACGGCCUUCGUCGCCAUdTdT | 1179 |
| A-3016 | UCGCACACGGCCUUCGUCGdTdT | 1180 |
| A-3017 | UAGCACGCACACGGCCUUCdTdT | 1181 |
| A-3018 | UUUCAGCACGCACACGGCCdTdT | 1182 |
| A-3019 | UGCACUGGGCCGUCGCCCUdTdT | 1183 |
| A-3020 | UAAUUGAUGAUGCCCUGCAdTdT | 1184 |
| A-3021 | UAAAUUGAUGAUGCCCUGCdTdT | 1185 |
| A-3022 | UCGAAAUUGAUGAUGCCCUdTdT | 1186 |
| A-3023 | UUCGAAAUUGAUGAUGCCCdTdT | 1187 |
| A-3024 | UCUCGAAAUUGAUGAUGCCdTdT | 1188 |
| A-3025 | UGCUCGAAAUUGAUGAUGCdTdT | 1189 |
| A-3026 | UUGCUCGAAAUUGAUGAUGdTdT | 1190 |
| A-3027 | UUUCCUUCUGCUCGAAAUUdTdT | 1191 |
| A-3028 | UACUUUCCUUCUGCUCGAAdTdT | 1192 |
| A-3029 | UUACUUUCCUUCUGCUCGAdTdT | 1193 |
| A-3030 | UAAUGCUUCCCCACACCUUdTdT | 1194 |
| A-3031 | UUUAAUGCUUCCCCACACCdTdT | 1195 |
| A-3032 | UGCAGGCCUUCAGUCAGUCdTdT | 1196 |
| A-3033 | UAUGCAGGCCUUCAGUCAGdTdT | 1197 |
| A-3034 | UCAUGCAGGCCUUCAGUCAdTdT | 1198 |
| A-3035 | UAAUCCAUGCAGGCCUUCAdTdT | 1199 |
| A-3036 | UGAAUCCAUGCAGGCCUUCdTdT | 1200 |
| A-3037 | UGAACAUGGAAUCCAUGCAdTdT | 1201 |
| A-3038 | UAUGAACAUGGAAUCCAUGdTdT | 1202 |
| A-3039 | UCUCAUGAACAUGGAAUCCdTdT | 1203 |
| A-3040 | UAAACUCAUGAACAUGGAAdTdT | 1204 |
| A-3041 | UAUCUCCAAACUCAUGAACdTdT | 1205 |
| A-3042 | UUAUCUCCAAACUCAUGAAdTdT | 1206 |
| A-3043 | UGUAUUAUCUCCAAACUCAdTdT | 1207 |
| A-3044 | UUGUAUUAUCUCCAAACUCdTdT | 1208 |
| A-3045 | UCCUGCACUGGUACAGCCUdTdT | 1209 |
| A-3046 | UACCUGCACUGGUACAGCCdTdT | 1210 |
| A-3047 | UAUUAAAGUGAGGACCUGCdTdT | 1211 |
| A-3048 | UGAUUAAAGUGAGGACCUGdTdT | 1212 |
| A-3049 | UGAUAGAGGAUUAAAGUGAdTdT | 1213 |
| A-3050 | UACCGUGUUUUCUGGAUAGdTdT | 1214 |
| A-3051 | UCACCGUGUUUUCUGGAUAdTdT | 1215 |
| A-3052 | UCCACCGUGUUUUCUGGAUdTdT | 1216 |
| A-3053 | UGCCCACCGUGUUUUCUGGdTdT | 1217 |
| A-3054 | UUUGGCCCACCGUGUUUUCdTdT | 1218 |
| A-3055 | UUUUGGCCCACCGUGUUUUdTdT | 1219 |
| A-3056 | UUCAUCCUUUGGCCCACCGdTdT | 1220 |
| A-3057 | UCAUGCCUCUCUUCAUCCUdTdT | 1221 |
| A-3058 | UCAACAUGCCUCUCUUCAUdTdT | 1222 |
| A-3059 | UGUCUCCAACAUGCCUCUCdTdT | 1223 |
| A-3060 | UAGUCUCCAACAUGCCUCUdTdT | 1224 |
| A-3061 | UUGCCCAAGUCUCCAACAUdTdT | 1225 |
| A-3062 | UAUUGCCCAAGUCUCCAACdTdT | 1226 |
| A-3063 | UCACAUUGCCCAAGUCUCCdTdT | 1227 |
| A-3064 | UGUCAGCAGUCACAUUGCCdTdT | 1228 |
| A-3065 | UUUGUCAGCAGUCACAUUGdTdT | 1229 |
| A-3066 | UCCACACCAUCUUUGUCAGdTdT | 1230 |
| A-3067 | UGCCACACCAUCUUUGUCAdTdT | 1231 |
| A-3068 | UAUGCAAUGGUCUCCUGAGdTdT | 1232 |
| A-3069 | UGAUGCAAUGGUCUCCUGAdTdT | 1233 |
| A-3070 | UCCAAUGAUGCAAUGGUCUdTdT | 1234 |
| A-3071 | UGCCAAUGAUGCAAUGGUCdTdT | 1235 |
| A-3072 | UUGCGGCCAAUGAUGCAAUdTdT | 1236 |
| A-3073 | UACCAGUGUGCGGCCAAUGdTdT | 1237 |
| A-3074 | UAUGGACCACCAGUGUGCGdTdT | 1238 |
| A-3075 | UUCAUGGACCACCAGUGUGdTdT | 1239 |
| A-3076 | UUUCAUGGACCACCAGUGUdTdT | 1240 |
| A-3077 | UCUUUUUCAUGGACCACCAdTdT | 1241 |
| A-3078 | UCUGCUUUUUCAUGGACCAdTdT | 1242 |
| A-3079 | UGCCCAAGUCAUCUGCUUUdTdT | 1243 |
| A-3080 | UUUUGCCCAAGUCAUCUGCdTdT | 1244 |
| A-3081 | UCACCUUUGCCCAAGUCAUdTdT | 1245 |
| A-3082 | UCCACCUUUGCCCAAGUCAdTdT | 1246 |
| A-3083 | UUCCACCUUUGCCCAAGUCdTdT | 1247 |
| A-3084 | UCGUUUCCUGUCUUUGUACdTdT | 1248 |
| A-3085 | UAGCGUUUCCUGUCUUUGUdTdT | 1249 |
| A-3086 | UCAGCGUUUCCUGUCUUUGdTdT | 1250 |
| A-3087 | UCGACUUCCAGCGUUUCCUdTdT | 1251 |
| A-3088 | UCACCACAAGCCAAACGACdTdT | 1252 |
| A-3089 | UACACCACAAGCCAAACGAdTdT | 1253 |
| A-3090 | UUACACCACAAGCCAAACGdTdT | 1254 |
| A-3091 | UUUACACCACAAGCCAAACdTdT | 1255 |
| A-3092 | UAAUUACACCACAAGCCAAdTdT | 1256 |
| A-3093 | UCCAAUUACACCACAAGCCdTdT | 1257 |
| A-3094 | UCCCAAUUACACCACAAGCdTdT | 1258 |
| A-3095 | UUCCCAAUUACACCACAAGdTdT | 1259 |
| A-3096 | UGAUCCCAAUUACACCACAdTdT | 1260 |
| A-3097 | UCGAUCCCAAUUACACCACdTdT | 1261 |
| A-3098 | UGCGAUCCCAAUUACACCAdTdT | 1262 |
| A-3099 | UUUGGGCGAUCCCAAUUACdTdT | 1263 |
| A-3100 | UAUUGGGCGAUCCCAAUUAdTdT | 1264 |
| A-3101 | UUAUUGGGCGAUCCCAAUUdTdT | 1265 |
| A-3102 | UUUAUUGGGCGAUCCCAAUdTdT | 1266 |
| A-3103 | UUUUAUUGGGCGAUCCCAAdTdT | 1267 |
| A-3104 | UGUUUAUUGGGCGAUCCCAdTdT | 1268 |
| A-3105 | UUGUUUAUUGGGCGAUCCCdTdT | 1269 |
| A-3106 | UGAAUGUUUAUUGGGCGAUdTdT | 1270 |
| A-3107 | UCAAGGGAAUGUUUAUUGGdTdT | 1271 |
| A-3108 | UCCAAGGGAAUGUUUAUUGdTdT | 1272 |
| A-3109 | UUCCAAGGGAAUGUUUAUUdTdT | 1273 |
| A-3110 | UAUCCAAGGGAAUGUUUAUdTdT | 1274 |
| A-3111 | UCAUCCAAGGGAAUGUUUAdTdT | 1275 |
| A-3112 | UACAUCCAAGGGAAUGUUUdTdT | 1276 |
| A-3113 | UUACAUCCAAGGGAAUGUUdTdT | 1277 |
| A-3114 | UGACUACAUCCAAGGGAAUdTdT | 1278 |
| A-3115 | UCCUCAGACUACAUCCAAGdTdT | 1279 |
| A-3116 | UUGAGUUAAGGGGCCUCAGdTdT | 1280 |
| A-3117 | UGAUGAGUUAAGGGGCCUCdTdT | 1281 |
| A-3118 | UAGAUGAGUUAAGGGGCCUdTdT | 1282 |
| A-3119 | UAACAGAUGAGUUAAGGGGdTdT | 1283 |
| A-3120 | UUAACAGAUGAGUUAAGGGdTdT | 1284 |
| A-3121 | UAUAACAGAUGAGUUAAGGdTdT | 1285 |
| A-3122 | UGAUAACAGAUGAGUUAAGdTdT | 1286 |
| A-3123 | UGGAUAACAGAUGAGUUAAdTdT | 1287 |
| A-3124 | UAGGAUAACAGAUGAGUUAdTdT | 1288 |
| A-3125 | UCAGGAUAACAGAUGAGUUdTdT | 1289 |
| A-3126 | UUACAGCUAGCAGGAUAACdTdT | 1290 |
| A-3127 | UCAUUUCUACAGCUAGCAGdTdT | 1291 |
| A-3128 | UACAUUUCUACAGCUAGCAdTdT | 1292 |
| A-3129 | UAGGAUACAUUUCUACAGCdTdT | 1293 |
| A-3130 | UCAGGAUACAUUUCUACAGdTdT | 1294 |
| A-3131 | UUCAGGAUACAUUUCUACAdTdT | 1295 |
| A-3132 | UAUCAGGAUACAUUUCUACdTdT | 1296 |
| A-3133 | UGUUUAUCAGGAUACAUUUdTdT | 1297 |
| A-3134 | UUAAUGUUUAUCAGGAUACdTdT | 1298 |
| A-3135 | UUAAGAUUACAGUGUUUAAdTdT | 1299 |
| A-3136 | UCACUUUUAAGAUUACAGUdTdT | 1300 |
| A-3137 | UACACUUUUAAGAUUACAGdTdT | 1301 |
| A-3138 | UUACACUUUUAAGAUUACAdTdT | 1302 |
| A-3139 | UUUACACUUUUAAGAUUACdTdT | 1303 |
| A-3140 | UCACAAUUACACUUUUAAGdTdT | 1304 |
| A-3141 | UAGUUUCUCACUACAGGUAdTdT | 1305 |
| A-3142 | UUCUUCCAAGUGAUCAUAAdTdT | 1306 |
| A-3143 | UAAUCUUCCAAGUGAUCAUdTdT | 1307 |
| A-3144 | UACAAAUCUUCCAAGUGAUdTdT | 1308 |
| A-3145 | UAACUAUACAAAUCUUCCAdTdT | 1309 |
| A-3146 | UUUUUAACUGAGUUUUAUAdTdT | 1310 |
| A-3147 | UGACAUUUUAACUGAGUUUdTdT | 1311 |
| A-3148 | UCAGGUCAUUGAAACAGACdTdT | 1312 |
| A-3149 | UUGGCAAAAUACAGGUCAUdTdT | 1313 |
| A-3150 | UGUCUGGCAAAAUACAGGUdTdT | 1314 |
| A-3151 | UAGUCUGGCAAAAUACAGGdTdT | 1315 |
| A-3152 | UAUACCCAUCUGUGAUUUAdTdT | 1316 |
| A-3153 | UUUAAUACCCAUCUGUGAUdTdT | 1317 |
| A-3154 | UUUUAAUACCCAUCUGUGAdTdT | 1318 |
| A-3155 | UAGUUUAAUACCCAUCUGUdTdT | 1319 |
| A-3156 | UAAGUUUAAUACCCAUCUGdTdT | 1320 |
| A-3157 | UCAAGUUUAAUACCCAUCUdTdT | 1321 |
| A-3158 | UGACAAGUUUAAUACCCAUdTdT | 1322 |
| A-3159 | UGAAAUUCUGACAAGUUUAdTdT | 1323 |
| A-3160 | UAUUCACAGGCUUGAAUGAdTdT | 1324 |
| A-3161 | UUAUUCACAGGCUUGAAUGdTdT | 1325 |
| A-3162 | UCCAUACAGGGUUUUUAUUdTdT | 1326 |
| A-3163 | UGCCAUACAGGGUUUUUAUdTdT | 1327 |
| A-3164 | UUAAGUGCCAUACAGGGUUdTdT | 1328 |
| A-3165 | UAUAAGUGCCAUACAGGGUdTdT | 1329 |
| A-3166 | UGAUUCUUUUAAUAGCCUCdTdT | 1330 |
| A-3167 | UUUUGAAUUUGGAUUCUUUdTdT | 1331 |
| A-3168 | UUAGUUUGAAUUUGGAUUCdTdT | 1332 |

[0537] In one embodiment, the siRNA molecules of the present invention targeting SOD1 may comprise a nucleotide sequence such as, but not limited to, the sense (passenger) sequences in Table 8 or a fragment or variant thereof. As a non-limiting example, the sense sequence used in the siRNA molecule of the present invention is at least 30%, 40%, 50%, 60%, 70%, 80%, 81%, 82%, 83%, 84%, 85%, 86%, 87%, 88%, 89%, 90%, 91%, 92%, 93%, 94%, 95%, 96%, 97%, 98% or 99% or at least 20-30%, 20-40%, 20-50%, 20-60%, 20-70%, 20-80%, 20-90%, 20-95%, 20-99%, 30-40%, 30-50%, 30-60%, 30-70%, 30-80%, 30-90%, 30-95%, 30-99%, 40-50%, 40-60%, 40-70%, 40-80%, 40-90%, 40-95%, 40-99%, 50-60%, 50-70%, 50-80%, 50-90%, 50-95%, 50-99%, 60-70%, 60-80%, 60-90%, 60-95%, 60-99%, 70-80%, 70-90%, 70-95%, 70-99%, 80-90%, 80-95%, 80-99%, 90-95%, 90-99% or 95-99% of a nucleotide sequence in Table 8. As another non-limiting example, the sense sequence used in the siRNA molecule of the present invention comprises at least 3, 4, 5, 6, 7, 8, 9, 10, 11, 12, 13, 14, 15, 16, 17, 18, 19, 20, 21 or more than 21 consecutive nucleotides of a nucleotide sequence in Table 8. As yet another non-limiting example, the sense sequence used in the siRNA molecule of the present invention comprises nucleotides 1 to 22, 1 to 21, 1 to 20, 1 to 19, 1 to 18, 1 to 17, 1 to 16, 1 to 15, 1 to 14, 1 to 13, 1 to 12, 1 to 11, 1 to 10, 1 to 9, 1 to 8, 2 to 22, 2 to 21, 2 to 20, 2 to 19, 2 to 18, 2 to 17, 2 to 16, 2 to 15, 2 to 14, 2 to 13, 2 to 12, 2 to 11, 2 to 10, 2 to 9, 2 to 8, 3 to 22, 3 to 21, 3 to 20, 3 to 19, 3 to 18, 3 to 17, 3 to 16, 3 to 15, 3 to 14, 3 to 13, 3 to 12, 3 to 11, 3 to 10, 3 to 9, 3 to 8, 4 to 22, 4 to 21, 4 to 20, 4 to 19, 4 to 18, 4 to 17, 4 to 16, 4 to 15, 4 to 14, 4 to 13, 4 to 12, 4 to 11, 4 to 10, 4 to 9, 4 to 8, 5 to 22, 5 to 21, 5 to 20, 5 to 19, 5 to 18, 5 to 17, 5 to 16, 5 to 15, 5 to 14, 5 to 13, 5 to 12, 5 to 11, 5 to 10, 5 to 9, 5 to 8, 6 to 22, 6 to 21, 6 to 20, 6 to 19, 6 to 18, 6 to 17, 6 to 16, 6 to 15, 6 to 14, 6 to 13, 6 to 12, 6 to 11, 6 to 10, 7 to 22, 7 to 21, 7 to 20, 7 to 19, 7 to 18, 7 to 17, 7 to 16, 7 to 15, 7 to 14, 7 to 13, 7 to 12, 8 to 22, 8 to 21, 8 to 20, 8 to 19, 8 to 18, 8 to 17, 8 to 16, 8 to 15, 8 to 14, 8 to 13, 8 to 12, 9 to 22, 9 to 21, 9 to 20, 9 to 19, 9 to 18, 9 to 17, 9 to 16, 9 to 15, 9 to 14, 10 to 22, 10 to 21, 10 to 20, 10 to 19, 10 to 18, 10 to 17, 10 to 16, 10 to 15, 10 to 14, 11 to 22, 11 to 21, 11 to 20, 11 to 19, 11 to 18, 11 to 17, 11 to 16, 11 to 15, 11 to 14, 12 to 22, 12 to 21, 12 to 20, 12 to 19, 12 to 18, 12 to 17, 12 to 16, 13 to 22, 13 to 21, 13 to 20, 13 to 19, 13 to 18, 13 to 17, 13 to 16, 14 to 22, 14 to 21, 14 to 20, 14 to 19, 14 to 18, 14 to 17, 15 to 22, 15 to 21, 15 to 20, 15 to 19, 15 to 18, 16 to 22, 16 to 21, 16 to 20, 17 to 22, 17 to 21, or 18 to 22 of the sequences in Table 8.

TABLE 8
Sense Sequences

| | | SEQ |
|---|---|---|
| Sense | | ID |
| ID | Sequence | NO |
| S-3000 | CGGAGGUCUGGCCUAUAACdTdT | 1333 |
| S-3001 | GGAGGUCUGGCCUAUAAACdTdT | 1334 |
| S-3002 | GAGGUCUGGCCUAUAAAGCdTdT | 1335 |
| S-3003 | AGGUCUGGCCUAUAAAGUCdTdT | 1336 |
| S-3004 | GGUCUGGCCUAUAAAGUACdTdT | 1337 |
| S-3005 | UCUGGCCUAUAAAGUAGUCdTdT | 1338 |
| S-3006 | CUGGCCUAUAAAGUAGUCCdTdT | 1339 |
| S-3007 | UGGCCUAUAAAGUAGUCGCdTdT | 1340 |
| S-3008 | GGCCUAUAAAGUAGUCGCCdTdT | 1341 |
| S-3009 | GCCUAUAAAGUAGUCGCGCdTdT | 1342 |
| S-3010 | CCUAUAAAGUAGUCGCGGCdTdT | 1343 |
| S-3011 | GUCGUAGUCUCCUGCAGCCdTdT | 1344 |
| S-3012 | CGUAGUCUCCUGCAGCGUCdTdT | 1345 |
| S-3013 | GUAGUCUCCUGCAGCGUCCdTdT | 1346 |
| S-3014 | UAGUCUCCUGCAGCGUCUCdTdT | 1347 |
| S-3015 | AUGGCGACGAAGGCCGUGCdTdT | 1348 |
| S-3016 | CGACGAAGGCCGUGUGCGCdTdT | 1349 |
| S-3017 | GAAGGCCGUGUGCGUGCUCdTdT | 1350 |
| S-3018 | GGCCGUGUGCGUGCUGAACdTdT | 1351 |
| S-3019 | AGGGCGACGGCCCAGUGCCdTdT | 1352 |
| S-3020 | UGCAGGGCAUCAUCAAUUCdTdT | 1353 |
| S-3021 | GCAGGGCAUCAUCAAUUUCdTdT | 1354 |
| S-3022 | AGGGCAUCAUCAAUUUCGCdTdT | 1355 |
| S-3023 | GGGCAUCAUCAAUUUCGACdTdT | 1356 |
| S-3024 | GGCAUCAUCAAUUUCGAGCdTdT | 1357 |
| S-3025 | GCAUCAUCAAUUUCGAGCCdTdT | 1358 |
| S-3026 | CAUCAUCAAUUUCGAGCACdTdT | 1359 |
| S-3027 | AAUUUCGAGCAGAAGGAACdTdT | 1360 |
| S-3028 | UUCGAGCAGAAGGAAAGUCdTdT | 1361 |
| S-3029 | UCGAGCAGAAGGAAAGUACdTdT | 1362 |
| S-3030 | AAGGUGUGGGGAAGCAUUCdTdT | 1363 |
| S-3031 | GGUGUGGGGAAGCAUUAACdTdT | 1364 |
| S-3032 | GACUGACUGAAGGCCUGCCdTdT | 1365 |
| S-3033 | CUGACUGAAGGCCUGCAUCdTdT | 1366 |
| S-3034 | UGACUGAAGGCCUGCAUGCdTdT | 1367 |
| S-3035 | UGAAGGCCUGCAUGGAUUCdTdT | 1368 |
| S-3036 | GAAGGCCUGCAUGGAUUCCdTdT | 1369 |
| S-3037 | UGCAUGGAUUCCAUGUUCCdTdT | 1370 |
| S-3038 | CAUGGAUUCCAUGUUCAUCdTdT | 1371 |
| S-3039 | GGAUUCCAUGUUCAUGAGCdTdT | 1372 |
| S-3040 | UUCCAUGUUCAUGAGUUUCdTdT | 1373 |
| S-3041 | GUUCAUGAGUUUGGAGAUCdTdT | 1374 |
| S-3042 | UUCAUGAGUUUGGAGAUACdTdT | 1375 |
| S-3043 | UGAGUUUGGAGAUAAUACCdTdT | 1376 |
| S-3044 | GAGUUUGGAGAUAAUACACdTdT | 1377 |
| S-3045 | AGGCUGUACCAGUGCAGGCdTdT | 1378 |
| S-3046 | GGCUGUACCAGUGCAGGUCdTdT | 1379 |
| S-3047 | GCAGGUCCUCACUUUAAUCdTdT | 1380 |
| S-3048 | CAGGUCCUCACUUUAAUCCdTdT | 1381 |
| S-3049 | UCACUUUAAUCCUCUAUCCdTdT | 1382 |
| S-3050 | CUAUCCAGAAAACACGGUCdTdT | 1383 |
| S-3051 | UAUCCAGAAAACACGGUGCdTdT | 1384 |
| S-3052 | AUCCAGAAAACACGGUGGCdTdT | 1385 |
| S-3053 | CCAGAAAACACGGUGGGCCdTdT | 1386 |
| S-3054 | GAAAACACGGUGGGCCAACdTdT | 1387 |
| S-3055 | AAAACACGGUGGGCCAAACdTdT | 1388 |
| S-3056 | CGGUGGGCCAAAGGAUGACdTdT | 1389 |
| S-3057 | AGGAUGAAGAGAGGCAUGCdTdT | 1390 |
| S-3058 | AUGAAGAGAGGCAUGUUGCdTdT | 1391 |
| S-3059 | GAGAGGCAUGUUGGAGACCdTdT | 1392 |
| S-3060 | AGAGGCAUGUUGGAGACUCdTdT | 1393 |
| S-3061 | AUGUUGGAGACUUGGGCACdTdT | 1394 |
| S-3062 | GUUGGAGACUUGGGCAAUCdTdT | 1395 |
| S-3063 | GGAGACUUGGGCAAUGUGCdTdT | 1396 |
| S-3064 | GGCAAUGUGACUGCUGACCdTdT | 1397 |
| S-3065 | CAAUGUGACUGCUGACAACdTdT | 1398 |
| S-3066 | CUGACAAAGAUGGUGUGGCdTdT | 1399 |
| S-3067 | UGACAAAGAUGGUGUGGCCdTdT | 1400 |
| S-3068 | CUCAGGAGACCAUUGCAUCdTdT | 1401 |
| S-3069 | UCAGGAGACCAUUGCAUCCdTdT | 1402 |
| S-3070 | AGACCAUUGCAUCAUUGGCdTdT | 1403 |
| S-3071 | GACCAUUGCAUCAUUGGCCdTdT | 1404 |
| S-3072 | AUUGCAUCAUUGGCCGCACdTdT | 1405 |
| S-3073 | CAUUGGCCGCACACUGGUCdTdT | 1406 |
| S-3074 | CGCACACUGGUGGUCCAUCdTdT | 1407 |
| S-3075 | CACACUGGUGGUCCAUGACdTdT | 1408 |
| S-3076 | ACACUGGUGGUCCAUGAACdTdT | 1409 |
| S-3077 | UGGUGGUCCAUGAAAAAGCdTdT | 1410 |
| S-3078 | UGGUCCAUGAAAAAGCAGCdTdT | 1411 |
| S-3079 | AAAGCAGAUGACUUGGGCCdTdT | 1412 |
| S-3080 | GCAGAUGACUUGGGCAAACdTdT | 1413 |
| S-3081 | AUGACUUGGGCAAAGGUGCdTdT | 1414 |
| S-3082 | UGACUUGGGCAAAGGUGGCdTdT | 1415 |
| S-3083 | GACUUGGGCAAAGGUGGACdTdT | 1416 |
| S-3084 | GUACAAAGACAGGAAACGCdTdT | 1417 |
| S-3085 | ACAAAGACAGGAAACGCUCdTdT | 1418 |
| S-3086 | CAAAGACAGGAAACGCUGCdTdT | 1419 |
| S-3087 | AGGAAACGCUGGAAGUCGCdTdT | 1420 |
| S-3088 | GUCGUUUGGCUUGUGGUGCdTdT | 1421 |
| S-3089 | UCGUUUGGCUUGUGGUGUCdTdT | 1422 |
| S-3090 | CGUUUGGCUUGUGGUGUACdTdT | 1423 |
| S-3091 | GUUUGGCUUGUGGUGUAACdTdT | 1424 |
| S-3092 | UUGGCUUGUGGUGUAAUUCdTdT | 1425 |
| S-3093 | GGCUUGUGGUGUAAUUGGCdTdT | 1426 |
| S-3094 | GCUUGUGGUGUAAUUGGGCdTdT | 1427 |
| S-3095 | CUUGUGGUGUAAUUGGGACdTdT | 1428 |
| S-3096 | UGUGGUGUAAUUGGGAUCCdTdT | 1429 |
| S-3097 | GUGGUGUAAUUGGGAUCGCdTdT | 1430 |
| S-3098 | UGGUGUAAUUGGGAUCGCCdTdT | 1431 |
| S-3099 | GUAAUUGGGAUCGCCCAACdTdT | 1432 |
| S-3100 | UAAUUGGGAUCGCCCAAUCdTdT | 1433 |
| S-3101 | AAUUGGGAUCGCCCAAUACdTdT | 1434 |
| S-3102 | AUUGGGAUCGCCCAAUAACdTdT | 1435 |
| S-3103 | UUGGGAUCGCCCAAUAAACdTdT | 1436 |
| S-3104 | UGGGAUCGCCCAAUAAACCdTdT | 1437 |
| S-3105 | GGGAUCGCCCAAUAAACACdTdT | 1438 |
| S-3106 | AUCGCCCAAUAAACAUUCCdTdT | 1439 |
| S-3107 | CCAAUAAACAUUCCCUUGCdTdT | 1440 |
| S-3108 | CAAUAAACAUUCCCUUGGCdTdT | 1441 |
| S-3109 | AAUAAACAUUCCCUUGGACdTdT | 1442 |
| S-3110 | AUAAACAUUCCCUUGGAUCdTdT | 1443 |
| S-3111 | UAAACAUUCCCUUGGAUGCdTdT | 1444 |
| S-3112 | AAACAUUCCCUUGGAUGUCdTdT | 1445 |
| S-3113 | AACAUUCCCUUGGAUGUACdTdT | 1446 |
| S-3114 | AUUCCCUUGGAUGUAGUCCdTdT | 1447 |
| S-3115 | CUUGGAUGUAGUCUGAGGCdTdT | 1448 |
| S-3116 | CUGAGGCCCCUUAACUCACdTdT | 1449 |
| S-3117 | GAGGCCCCUUAACUCAUCCdTdT | 1450 |
| S-3118 | AGGCCCCUUAACUCAUCUCdTdT | 1451 |
| S-3119 | CCCCUUAACUCAUCUGUUCdTdT | 1452 |
| S-3120 | CCCUUAACUCAUCUGUUACdTdT | 1453 |
| S-3121 | CCUUAACUCAUCUGUUAUCdTdT | 1454 |
| S-3122 | CUUAACUCAUCUGUUAUCCdTdT | 1455 |
| S-3123 | UUAACUCAUCUGUUAUCCCdTdT | 1456 |
| S-3124 | UAACUCAUCUGUUAUCCUCdTdT | 1457 |
| S-3125 | AACUCAUCUGUUAUCCUGCdTdT | 1458 |
| S-3126 | GUUAUCCUGCUAGCUGUACdTdT | 1459 |
| S-3127 | CUGCUAGCUGUAGAAAUGCdTdT | 1460 |
| S-3128 | UGCUAGCUGUAGAAAUGUCdTdT | 1461 |
| S-3129 | GCUGUAGAAAUGUAUCCUCdTdT | 1462 |
| S-3130 | CUGUAGAAAUGUAUCCUGCdTdT | 1463 |
| S-3131 | UGUAGAAAUGUAUCCUGACdTdT | 1464 |
| S-3132 | GUAGAAAUGUAUCCUGAUCdTdT | 1465 |
| S-3133 | AAAUGUAUCCUGAUAAACCdTdT | 1466 |
| S-3134 | GUAUCCUGAUAAACAUUACdTdT | 1467 |
| S-3135 | UUAAACACUGUAAUCUUACdTdT | 1468 |
| S-3136 | ACUGUAAUCUUAAAAGUGCdTdT | 1469 |
| S-3137 | CUGUAAUCUUAAAAGUGUCdTdT | 1470 |
| S-3138 | UGUAAUCUUAAAAGUGUACdTdT | 1471 |
| S-3139 | GUAAUCUUAAAAGUGUAACdTdT | 1472 |
| S-3140 | CUUAAAAGUGUAAUUGUGCdTdT | 1473 |
| S-3141 | UACCUGUAGUGAGAAACUCdTdT | 1474 |
| S-3142 | UUAUGAUCACUUGGAAGACdTdT | 1475 |
| S-3143 | AUGAUCACUUGGAAGAUUCdTdT | 1476 |
| S-3144 | AUCACUUGGAAGAUUUGUCdTdT | 1477 |
| S-3145 | UGGAAGAUUUGUAUAGUUCdTdT | 1478 |
| S-3146 | UAUAAAACUCAGUUAAAACdTdT | 1479 |
| S-3147 | AAACUCAGUUAAAAUGUCCdTdT | 1480 |
| S-3148 | GUCUGUUUCAAUGACCUGCdTdT | 1481 |
| S-3149 | AUGACCUGUAUUUUGCCACdTdT | 1482 |
| S-3150 | ACCUGUAUUUUGCCAGACCdTdT | 1483 |
| S-3151 | CCUGUAUUUUGCCAGACUCdTdT | 1484 |
| S-3152 | UAAAUCACAGAUGGGUAUCdTdT | 1485 |
| S-3153 | AUCACAGAUGGGUAUUAACdTdT | 1486 |
| S-3154 | UCACAGAUGGGUAUUAAACdTdT | 1487 |
| S-3155 | ACAGAUGGGUAUUAAACUCdTdT | 1488 |
| S-3156 | CAGAUGGGUAUUAAACUUCdTdT | 1489 |
| S-3157 | AGAUGGGUAUUAAACUUGCdTdT | 1490 |
| S-3158 | AUGGGUAUUAAACUUGUCCdTdT | 1491 |
| S-3159 | UAAACUUGUCAGAAUUUCCdTdT | 1492 |
| S-3160 | UCAUUCAAGCCUGUGAAUCdTdT | 1493 |
| S-3161 | CAUUCAAGCCUGUGAAUACdTdT | 1494 |
| S-3162 | AAUAAAAACCCUGUAUGGCdTdT | 1495 |
| S-3163 | AUAAAAACCCUGUAUGGCCdTdT | 1496 |
| S-3164 | AACCCUGUAUGGCACUUACdTdT | 1497 |
| S-3165 | ACCCUGUAUGGCACUUAUCdTdT | 1498 |
| S-3166 | GAGGCUAUUAAAAGAAUCCdTdT | 1499 |
| S-3167 | AAAGAAUCCAAAUUCAAACdTdT | 1500 |
| S-3168 | GAAUCCAAAUUCAAACUACdTdT | 1501 |

[0538] In one embodiment, the siRNA molecules of the present invention targeting SOD1 may comprise an antisense sequence from Table 7 and a sense sequence from Table 8, or a fragment or variant thereof. As a non-limiting example, the antisense sequence and the sense sequence have at least 30%, 40%, 50%, 60%, 70%, 80%, 81%, 82%, 83%, 84%, 85%, 86%, 87%, 88%, 89%, 90%, 91%, 92%, 93%, 94%, 95%, 96%, 97%, 98% or 99% or at least 20-30%, 20-40%, 20-50%, 20-60%, 20-70%, 20-80%, 20-90%, 20-95%, 20-99%, 30-40%, 30-50%, 30-60%, 30-70%, 30-80%, 30-90%, 30-95%, 30-99%, 40-50%, 40-60%, 40-70%, 40-80%, 40-90%, 40-95%, 40-99%, 50-60%, 50-70%, 50-80%, 50-90%, 50-95%, 50-99%, 60-70%, 60-80%, 60-90%, 60-95%, 60-99%, 70-80%, 70-90%, 70-95%, 70-99%, 80-90%, 80-95%, 80-99%, 90-95%, 90-99% or 95-99% complementarity.

[0539] In one embodiment, the siRNA molecules of the present invention targeting SOD1 may comprise the sense and antisense siRNA duplex as described in Table 9. As a non-limiting example, these siRNA duplexes may be tested for in vitro inhibitory activity on endogenous SOD1 gene expression. The start site for the sense and antisense sequence is compared to SOD1 gene sequence known as NM_000454.4 (SEQ ID NO: 1502) from NCBI.

TABLE 9
Sense and antisense strand sequences of SOD1 dsRNA

| | | Sense | | | Antisense | |
|---|---|---|---|---|---|---|
| siRNA | | Strand | | | Strand | |
| Duplex | | Sequence | SS | | Sequence | AS |
| ID | SS ID | (5′-3′) | SEQ ID | AS ID | (5′-3′) | SEQ ID |
| D-2741 | S-3000 | CGGAGGUCUGGCCU | 1333 | A-3000 | UUUAUAGGCCAGA | 1164 |
| | | AUAACdTdT | | | CCUCCGdTdT | |
| D-2742 | S-3001 | GGAGGUCUGGCCUA | 1334 | A-3001 | UUUUAUAGGCCAG | 1165 |
| | | UAAACdTdT | | | ACCUCCdTdT | |
| D-2743 | S-3002 | GAGGUCUGGCCUAU | 1335 | A-3002 | UCUUUAUAGGCCA | 1166 |
| | | AAAGCdTdT | | | GACCUCdTdT | |
| D-2744 | S-3003 | AGGUCUGGCCUAUA | 1336 | A-3003 | UACUUUAUAGGCC | 1167 |
| | | AAGUCdTdT | | | AGACCUdTdT | |
| D-2745 | S-3004 | GGUCUGGCCUAUAA | 1337 | A-3004 | UUACUUUAUAGGC | 1168 |
| | | AGUACdTdT | | | CAGACCdTdT | |
| D-2746 | S-3005 | UCUGGCCUAUAAAG | 1338 | A-3005 | UACUACUUUAUAG | 1169 |
| | | UAGUCdTdT | | | GCCAGAdTdT | |
| D-2747 | S-3006 | CUGGCCUAUAAAGU | 1339 | A-3006 | UGACUACUUUAUA | 1170 |
| | | AGUCCdTdT | | | GGCCAGdTdT | |
| D-2748 | S-3007 | UGGCCUAUAAAGUA | 1340 | A-3007 | UCGACUACUUUAU | 1171 |
| | | GUCGCdTdT | | | AGGCCAdTdT | |
| D-2749 | S-3008 | GGCCUAUAAAGUAG | 1341 | A-3008 | UGCGACUACUUUA | 1172 |
| | | UCGCCdTdT | | | UAGGCCdTdT | |
| D-2750 | S-3009 | GCCUAUAAAGUAGU | 1342 | A-3009 | UCGCGACUACUUU | 1173 |
| | | CGCGCdTdT | | | AUAGGCdTdT | |
| D-2751 | S-3010 | CCUAUAAAGUAGUC | 1343 | A-3010 | UCCGCGACUACUU | 1174 |
| | | GCGGCdTdT | | | UAUAGGdTdT | |
| D-2752 | S-3011 | GUCGUAGUCUCCUG | 1344 | A-3011 | UGCUGCAGGAGAC | 1175 |
| | | CAGCCdTdT | | | UACGACdTdT | |
| D-2753 | S-3012 | CGUAGUCUCCUGCA | 1345 | A-3012 | UACGCUGCAGGAG | 1176 |
| | | GCGUCdTdT | | | ACUACGdTdT | |
| D-2754 | S-3013 | GUAGUCUCCUGCAG | 1346 | A-3013 | UGACGCUGCAGGA | 1177 |
| | | CGUCCdTdT | | | GACUACdTdT | |
| D-2755 | S-3014 | UAGUCUCCUGCAGC | 1347 | A-3014 | UAGACGCUGCAGG | 1178 |
| | | GUCUCdTdT | | | AGACUAdTdT | |
| D-2756 | S-3015 | AUGGCGACGAAGGC | 1348 | A-3015 | UCACGGCCUUCGU | 1179 |
| | | CGUGCdTdT | | | CGCCAUdTdT | |
| D-2757 | S-3016 | CGACGAAGGCCGUG | 1349 | A-3016 | UCGCACACGGCCU | 1180 |
| | | UGCGCdTdT | | | UCGUCGdTdT | |
| D-2758 | S-3017 | GAAGGCCGUGUGCG | 1350 | A-3017 | UAGCACGCACACG | 1181 |
| | | UGCUCdTdT | | | GCCUUCdTdT | |
| D-2759 | S-3018 | GGCCGUGUGCGUGC | 1351 | A-3018 | UUUCAGCACGCAC | 1182 |
| | | UGAACdTdT | | | ACGGCCdTdT | |
| D-2760 | S-3019 | AGGGCGACGGCCCA | 1352 | A-3019 | UGCACUGGGCCGU | 1183 |
| | | GUGCCdTdT | | | CGCCCUdTdT | |
| D-2761 | S-3020 | UGCAGGGCAUCAUC | 1353 | A-3020 | UAAUUGAUGAUGC | 1184 |
| | | AAUUCdTdT | | | CCUGCAdTdT | |
| D-2762 | S-3021 | GCAGGGCAUCAUCA | 1354 | A-3021 | UAAAUUGAUGAUG | 1185 |
| | | AUUUCdTdT | | | CCCUGCdTdT | |
| D-2763 | S-3022 | AGGGCAUCAUCAAU | 1355 | A-3022 | UCGAAAUUGAUGA | 1186 |
| | | UUCGCdTdT | | | UGCCCUdTdT | |
| D-2764 | S-3023 | GGGCAUCAUCAAUU | 1356 | A-3023 | UUCGAAAUUGAUG | 1187 |
| | | UCGACdTdT | | | AUGCCCdTdT | |
| D-2765 | S-3024 | GGCAUCAUCAAUUU | 1357 | A-3024 | UCUCGAAAUUGAU | 1188 |
| | | CGAGCdTdT | | | GAUGCCdTdT | |
| D-2766 | S-3025 | GCAUCAUCAAUUUC | 1358 | A-3025 | UGCUCGAAAUUGA | 1189 |
| | | GAGCCdTdT | | | UGAUGCdTdT | |
| D-2767 | S-3026 | CAUCAUCAAUUUCG | 1359 | A-3026 | UUGCUCGAAAUUG | 1190 |
| | | AGCACdTdT | | | AUGAUGdTdT | |
| D-2768 | S-3027 | AAUUUCGAGCAGAA | 1360 | A-3027 | UUUCCUUCUGCUC | 1191 |
| | | GGAACdTdT | | | GAAAUUdTdT | |
| D-2769 | S-3028 | UUCGAGCAGAAGGA | 1361 | A-3028 | UACUUUCCUUCUG | 1192 |
| | | AAGUCdTdT | | | CUCGAAdTdT | |
| D-2770 | S-3029 | UCGAGCAGAAGGAA | 1362 | A-3029 | UUACUUUCCUUCU | 1193 |
| | | AGUACdTdT | | | GCUCGAdTdT | |
| D-2771 | S-3030 | AAGGUGUGGGGAAG | 1363 | A-3030 | UAAUGCUUCCCCA | 1194 |
| | | CAUUCdTdT | | | CACCUUdTdT | |
| D-2772 | S-3031 | GGUGUGGGGAAGCA | 1364 | A-3031 | UUUAAUGCUUCCC | 1195 |
| | | UUAACdTdT | | | CACACCdTdT | |
| D-2773 | S-3032 | GACUGACUGAAGGC | 1365 | A-3032 | UGCAGGCCUUCAG | 1196 |
| | | CUGCCdTdT | | | UCAGUCdTdT | |
| D-2774 | S-3033 | CUGACUGAAGGCCU | 1366 | A-3033 | UAUGCAGGCCUUC | 1197 |
| | | GCAUCdTdT | | | AGUCAGdTdT | |
| D-2775 | S-3034 | UGACUGAAGGCCUG | 1367 | A-3034 | UCAUGCAGGCCUU | 1198 |
| | | CAUGCdTdT | | | CAGUCAdTdT | |
| D-2776 | S-3035 | UGAAGGCCUGCAUG | 1368 | A-3035 | UAAUCCAUGCAGG | 1199 |
| | | GAUUCdTdT | | | CCUUCAdTdT | |
| D-2777 | S-3036 | GAAGGCCUGCAUGG | 1369 | A-3036 | UGAAUCCAUGCAG | 1200 |
| | | AUUCCdTdT | | | GCCUUCdTdT | |
| D-2778 | S-3037 | UGCAUGGAUUCCAU | 1370 | A-3037 | UGAACAUGGAAUC | 1201 |
| | | GUUCCdTdT | | | CAUGCAdTdT | |
| D-2779 | S-3038 | CAUGGAUUCCAUGU | 1371 | A-3038 | UAUGAACAUGGAA | 1202 |
| | | UCAUCdTdT | | | UCCAUGdTdT | |
| D-2780 | S-3039 | GGAUUCCAUGUUCA | 1372 | A-3039 | UCUCAUGAACAUG | 1203 |
| | | UGAGCdTdT | | | GAAUCCdTdT | |
| D-2781 | S-3040 | UUCCAUGUUCAUGA | 1373 | A-3040 | UAAACUCAUGAAC | 1204 |
| | | GUUUCdTdT | | | AUGGAAdTdT | |
| D-2782 | S-3041 | GUUCAUGAGUUUGG | 1374 | A-3041 | UAUCUCCAAACUC | 1205 |
| | | AGAUCdTdT | | | AUGAACdTdT | |
| D-2783 | S-3042 | UUCAUGAGUUUGGA | 1375 | A-3042 | UUAUCUCCAAACU | 1206 |
| | | GAUACdTdT | | | CAUGAAdTdT | |
| D-2784 | S-3043 | UGAGUUUGGAGAUA | 1376 | A-3043 | UGUAUUAUCUCCA | 1207 |
| | | AUACCdTdT | | | AACUCAdTdT | |
| D-2785 | S-3044 | GAGUUUGGAGAUAA | 1377 | A-3044 | UUGUAUUAUCUCC | 1208 |
| | | UACACdTdT | | | AAACUCdTdT | |
| D-2786 | S-3045 | AGGCUGUACCAGUG | 1378 | A-3045 | UCCUGCACUGGUA | 1209 |
| | | CAGGCdTdT | | | CAGCCUdTdT | |
| D-2787 | S-3046 | GGCUGUACCAGUGC | 1379 | A-3046 | UACCUGCACUGGU | 1210 |
| | | AGGUCdTdT | | | ACAGCCdTdT | |
| D-2788 | S-3047 | GCAGGUCCUCACUU | 1380 | A-3047 | UAUUAAAGUGAGG | 1211 |
| | | UAAUCdTdT | | | ACCUGCdTdT | |
| D-2789 | S-3048 | CAGGUCCUCACUUU | 1381 | A-3048 | UGAUUAAAGUGAG | 1212 |
| | | AAUCCdTdT | | | GACCUGdTdT | |
| D-2790 | S-3049 | UCACUUUAAUCCUC | 1382 | A-3049 | UGAUAGAGGAUUA | 1213 |
| | | UAUCCdTdT | | | AAGUGAdTdT | |
| D-2791 | S-3050 | CUAUCCAGAAAACA | 1383 | A-3050 | UACCGUGUUUUCU | 1214 |
| | | CGGUCdTdT | | | GGAUAGdTdT | |
| D-2792 | S-3051 | UAUCCAGAAAACAC | 1384 | A-3051 | UCACCGUGUUUUC | 1215 |
| | | GGUGCdTdT | | | UGGAUAdTdT | |
| D-2793 | S-3052 | AUCCAGAAAACACG | 1385 | A-3052 | UCCACCGUGUUUU | 1216 |
| | | GUGGCdTdT | | | CUGGAUdTdT | |
| D-2794 | S-3053 | CCAGAAAACACGGU | 1386 | A-3053 | UGCCCACCGUGUU | 1217 |
| | | GGGCCdTdT | | | UUCUGGdTdT | |
| D-2795 | S-3054 | GAAAACACGGUGGG | 1387 | A-3054 | UUUGGCCCACCGU | 1218 |
| | | CCAACdTdT | | | GUUUUCdTdT | |
| D-2796 | S-3055 | AAAACACGGUGGGC | 1388 | A-3055 | UUUUGGCCCACCG | 1219 |
| | | CAAACdTdT | | | UGUUUUdTdT | |
| D-2797 | S-3056 | CGGUGGGCCAAAGG | 1389 | A-3056 | UUCAUCCUUUGGC | 1220 |
| | | AUGACdTdT | | | CCACCGdTdT | |
| D-2798 | S-3057 | AGGAUGAAGAGAGG | 1390 | A-3057 | UCAUGCCUCUCUU | 1221 |
| | | CAUGCdTdT | | | CAUCCUdTdT | |
| D-2799 | S-3058 | AUGAAGAGAGGCAU | 1391 | A-3058 | UCAACAUGCCUCU | 1222 |
| | | GUUGCdTdT | | | CUUCAUdTdT | |
| D-2800 | S-3059 | GAGAGGCAUGUUGG | 1392 | A-3059 | UGUCUCCAACAUG | 1223 |
| | | AGACCdTdT | | | CCUCUCdTdT | |
| D-2801 | S-3060 | AGAGGCAUGUUGGA | 1393 | A-3060 | UAGUCUCCAACAU | 1224 |
| | | GACUCdTdT | | | GCCUCUdTdT | |
| D-2802 | S-3061 | AUGUUGGAGACUUG | 1394 | A-3061 | UUGCCCAAGUCUC | 1225 |
| | | GGCACdTdT | | | CAACAUdTdT | |
| D-2803 | S-3062 | GUUGGAGACUUGGG | 1395 | A-3062 | UAUUGCCCAAGUC | 1226 |
| | | CAAUCdTdT | | | UCCAACdTdT | |
| D-2804 | S-3063 | GGAGACUUGGGCAA | 1396 | A-3063 | UCACAUUGCCCAA | 1227 |
| | | UGUGCdTdT | | | GUCUCCdTdT | |
| D-2805 | S-3064 | GGCAAUGUGACUGC | 1397 | A-3064 | UGUCAGCAGUCAC | 1228 |
| | | UGACCdTdT | | | AUUGCCdTdT | |
| D-2806 | S-3065 | CAAUGUGACUGCUG | 1398 | A-3065 | UUUGUCAGCAGUC | 1229 |
| | | ACAACdTdT | | | ACAUUGdTdT | |
| D-2807 | S-3066 | CUGACAAAGAUGGU | 1399 | A-3066 | UCCACACCAUCUU | 1230 |
| | | G UGGCdTdT | | | UGUCAGdTdT | |
| D-2808 | S-3067 | UGACAAAGAUGGUG | 1400 | A-3067 | UGCCACACCAUCU | 1231 |
| | | UGGCCdTdT | | | UUGUCAdTdT | |
| D-2809 | S-3068 | CUCAGGAGACCAUU | 1401 | A-3068 | UAUGCAAUGGUCU | 1232 |
| | | GCAUCdTdT | | | CCUGAGdTdT | |
| D-2810 | S-3069 | UCAGGAGACCAUUG | 1402 | A-3069 | UGAUGCAAUGGUC | 1233 |
| | | CAUCCdTdT | | | UCCUGAdTdT | |
| D-2811 | S-3070 | AGACCAUUGCAUCA | 1403 | A-3070 | UCCAAUGAUGCAA | 1234 |
| | | UUGGCdTdT | | | UGGUCUdTdT | |
| D-2812 | S-3071 | GACCAUUGCAUCAU | 1404 | A-3071 | UGCCAAUGAUGCA | 1235 |
| | | UGGCCdTdT | | | AUGGUCdTdT | |
| D-2813 | S-3072 | AUUGCAUCAUUGGC | 1405 | A-3072 | UUGCGGCCAAUGA | 1236 |
| | | CGCACdTdT | | | UGCAAUdTdT | |
| D-2814 | S-3073 | CAUUGGCCGCACAC | 1406 | A-3073 | UACCAGUGUGCGG | 1237 |
| | | UGGUCdTdT | | | CCAAUGdTdT | |
| D-2815 | S-3074 | CGCACACUGGUGGU | 1407 | A-3074 | UAUGGACCACCAG | 1238 |
| | | CCAUCdTdT | | | UGUGCGdTdT | |
| D-2816 | S-3075 | CACACUGGUGGUCC | 1408 | A-3075 | UUCAUGGACCACC | 1239 |
| | | AUGACdTdT | | | AGUGUGdTdT | |
| D-2817 | S-3076 | ACACUGGUGGUCCA | 1409 | A-3076 | UUUCAUGGACCAC | 1240 |
| | | UGAACdTdT | | | CAGUGUdTdT | |
| D-2818 | S-3077 | UGGUGGUCCAUGAA | 1410 | A-3077 | UCUUUUUCAUGGA | 1241 |
| | | AAAGCdTdT | | | CCACCAdTdT | |
| D-2819 | S-3078 | UGGUCCAUGAAAAA | 1411 | A-3078 | UCUGCUUUUUCAU | 1242 |
| | | GCAGCdTdT | | | GGACCAdTdT | |
| D-2820 | S-3079 | AAAGCAGAUGACUU | 1412 | A-3079 | UGCCCAAGUCAUC | 1243 |
| | | GGGCCdTdT | | | UGCUUUdTdT | |
| D-2821 | S-3080 | GCAGAUGACUUGGG | 1413 | A-3080 | UUUUGCCCAAGUC | 1244 |
| | | CAAACdTdT | | | AUCUGCdTdT | |
| D-2822 | S-3081 | AUGACUUGGGCAAA | 1414 | A-3081 | UCACCUUUGCCCA | 1245 |
| | | GGUGCdTdT | | | AGUCAUdTdT | |
| D-2823 | S-3082 | UGACUUGGGCAAAG | 1415 | A-3082 | UCCACCUUUGCCC | 1246 |
| | | GUGGCdTdT | | | AAGUCAdTdT | |
| D-2824 | S-3083 | GACUUGGGCAAAGG | 1416 | A-3083 | UUCCACCUUUGCC | 1247 |
| | | UGGACdTdT | | | CAAGUCdTdT | |
| D-2825 | S-3084 | GUACAAAGACAGGA | 1417 | A-3084 | UCGUUUCCUGUCU | 1248 |
| | | AACGCdTdT | | | UUGUACdTdT | |
| D-2826 | S-3085 | ACAAAGACAGGAAA | 1418 | A-3085 | UAGCGUUUCCUGU | 1249 |
| | | CGCUCdTdT | | | CUUUGUdTdT | |
| D-2827 | S-3086 | CAAAGACAGGAAAC | 1419 | A-3086 | UCAGCGUUUCCUG | 1250 |
| | | GCUGCdTdT | | | UCUUUGdTdT | |
| D-2828 | S-3087 | AGGAAACGCUGGAA | 1420 | A-3087 | UCGACUUCCAGCG | 1251 |
| | | GUCGCdTdT | | | UUUCCUdTdT | |
| D-2829 | S-3088 | GUCGUUUGGCUUGU | 1421 | A-3088 | UCACCACAAGCCA | 1252 |
| | | GGUGCdTdT | | | AACGACdTdT | |
| D-2830 | S-3089 | UCGUUUGGCUUGUG | 1422 | A-3089 | UACACCACAAGCC | 1253 |
| | | GUGUCdTdT | | | AAACGAdTdT | |
| D-2831 | S-3090 | CGUUUGGCUUGUGG | 1423 | A-3090 | UUACACCACAAGC | 1254 |
| | | UGUACdTdT | | | CAAACGdTdT | |
| D-2832 | S-3091 | GUUUGGCUUGUGGU | 1424 | A-3091 | UUUACACCACAAG | 1255 |
| | | GUAACdTdT | | | CCAAACdTdT | |
| D-2833 | S-3092 | UUGGCUUGUGGUGU | 1425 | A-3092 | UAAUUACACCACA | 1256 |
| | | AAUUCdTdT | | | AGCCAAdTdT | |
| D-2834 | S-3093 | GGCUUGUGGUGUAA | 1426 | A-3093 | UCCAAUUACACCA | 1257 |
| | | UUGGCdTdT | | | CAAGCCdTdT | |
| D-2835 | S-3094 | GCUUGUGGUGUAAU | 1427 | A-3094 | UCCCAAUUACACC | 1258 |
| | | UGGGCdTdT | | | ACAAGCdTdT | |
| D-2836 | S-3095 | CUUGUGGUGUAAUU | 1428 | A-3095 | UUCCCAAUUACAC | 1259 |
| | | GGGACdTdT | | | CACAAGdTdT | |
| D-2837 | S-3096 | UGUGGUGUAAUUGG | 1429 | A-3096 | UGAUCCCAAUUAC | 1260 |
| | | GAUCCdTdT | | | ACCACAdTdT | |
| D-2838 | S-3097 | GUGGUGUAAUUGGG | 1430 | A-3097 | UCGAUCCCAAUUA | 1261 |
| | | AUCGCdTdT | | | ACCCACdTdT | |
| D-2839 | S-3098 | UGGUGUAAUUGGGA | 1431 | A-3098 | UGCGAUCCCAAUU | 1262 |
| | | UCGCCdTdT | | | ACACCAdTdT | |
| D-2840 | S-3099 | GUAAUUGGGAUCGC | 1432 | A-3099 | UUUGGGCGAUCCC | 1263 |
| | | CCAACdTdT | | | AAUUACdTdT | |
| D-2841 | S-3100 | UAAUUGGGAUCGCC | 1433 | A-3100 | UAUUGGGCGAUCC | 1264 |
| | | CAAUCdTdT | | | CAAUUAdTdT | |
| D-2842 | S-3101 | AAUUGGGAUCGCCC | 1434 | A-3101 | UUAUUGGGCGAUC | 1265 |
| | | AAUACdTdT | | | CCAAUUdTdT | |
| D-2843 | S-3102 | AUUGGGAUCGCCCA | 1435 | A-3102 | UUUAUUGGGCGAU | 1266 |
| | | AUAACdTdT | | | CCCAAUdTdT | |
| D-2844 | S-3103 | UUGGGAUCGCCCAA | 1436 | A-3103 | UUUUAUUGGGCGA | 1267 |
| | | UAAACdTdT | | | UCCCAAdTdT | |
| D-2845 | S-3104 | UGGGAUCGCCCAAU | 1437 | A-3104 | UGUUUAUUGGGCG | 1268 |
| | | AAACCdTdT | | | AUCCCAdTdT | |
| D-2846 | S-3105 | GGGAUCGCCCAAUA | 1438 | A-3105 | UUGUUUAUUGGGC | 1269 |
| | | AACACdTdT | | | GAUCCCdTdT | |
| D-2847 | S-3106 | AUCGCCCAAUAAAC | 1439 | A-3106 | UGAAUGUUUAUUG | 1270 |
| | | AUUCCdTdT | | | GGCGAUdTdT | |
| D-2848 | S-3107 | CCAAUAAACAUUCC | 1440 | A-3107 | UCAAGGGAAUGUU | 1271 |
| | | CUUGCdTdT | | | UAUUGGdTdT | |
| D-2849 | S-3108 | CAAUAAACAUUCCC | 1441 | A-3108 | UCCAAGGGAAUGU | 1272 |
| | | UUGGCdTdT | | | UUAUUGdTdT | |
| D-2850 | S-3109 | AAUAAACAUUCCCU | 1442 | A-3109 | UUCCAAGGGAAUG | 1273 |
| | | UGGACdTdT | | | UUUAUUdTdT | |
| D-2851 | S-3110 | AUAAACAUUCCCUU | 1443 | A-3110 | UAUCCAAGGGAAU | 1274 |
| | | GGAUCdTdT | | | GUUUAUdTdT | |
| D-2852 | S-3111 | UAAACAUUCCCUUG | 1444 | A-3111 | UCAUCCAAGGGAA | 1275 |
| | | GAUGCdTdT | | | UGUUUAdTdT | |
| D-2853 | S-3112 | AAACAUUCCCUUGG | 1445 | A-3112 | UACAUCCAAGGGA | 1276 |
| | | AUGUCdTdT | | | AUGUUUdTdT | |
| D-2854 | S-3113 | AACAUUCCCUUGGA | 1446 | A-3113 | UUACAUCCAAGGG | 1277 |
| | | UGUACdTdT | | | AAUGUUdTdT | |
| D-2855 | S-3114 | AUUCCCUUGGAUGU | 1447 | A-3114 | UGACUACAUCCAA | 1278 |
| | | AGUCCdTdT | | | GGGAAUdTdT | |
| D-2856 | S-3115 | CUUGGAUGUAGUCU | 1448 | A-3115 | UCCUCAGACUACA | 1279 |
| | | GAGGCdTdT | | | UCCAAGdTdT | |
| D-2857 | S-3116 | CUGAGGCCCCUUAA | 1449 | A-3116 | UUGAGUUAAGGGG | 1280 |
| | | CUCACdTdT | | | CCUCAGdTdT | |
| D-2858 | S-3117 | GAGGCCCCUUAACU | 1450 | A-3117 | UGAUGAGUUAAGG | 1281 |
| | | CAUCCdTdT | | | GGCCUCdTdT | |
| D-2859 | S-3118 | AGGCCCCUUAACUC | 1451 | A-3118 | UAGAUGAGUUAAG | 1282 |
| | | AUCUCdTdT | | | GGGCCUdTdT | |
| D-2860 | S-3119 | CCCCUUAACUCAUC | 1452 | A-3119 | UAACAGAUGAGUU | 1283 |
| | | UGUUCdTdT | | | AAGGGGdTdT | |
| D-2861 | S-3120 | CCCUUAACUCAUCU | 1453 | A-3120 | UUAACAGAUGAGU | 1284 |
| | | GUUACdTdT | | | UAAGGGdTdT | |
| D-2862 | S-3121 | CCUUAACUCAUCUG | 1454 | A-3121 | UAUAACAGAUGAG | 1285 |
| | | UUAUCdTdT | | | UUAAGGdTdT | |
| D-2863 | S-3122 | CUUAACUCAUCUGU | 1455 | A-3122 | UGAUAACAGAUGA | 1286 |
| | | UAUCCdTdT | | | GUUAAGdTdT | |
| D-2864 | S-3123 | UUAACUCAUCUGUU | 1456 | A-3123 | UGGAUAACAGAUG | 1287 |
| | | AUCCCdTdT | | | AGUUAAdTdT | |
| D-2865 | S-3124 | UAACUCAUCUGUUA | 1457 | A-3124 | UAGGAUAACAGAU | 1288 |
| | | UCCUCdTdT | | | GAGUUAdTdT | |
| D-2866 | S-3125 | AACUCAUCUGUUAU | 1458 | A-3125 | UCAGGAUAACAGA | 1289 |
| | | CCUGCdTdT | | | UGAGUUdTdT | |
| D-2867 | S-3126 | GUUAUCCUGCUAGC | 1459 | A-3126 | UUACAGCUAGCAG | 1290 |
| | | UGUACdTdT | | | GAUAACdTdT | |
| D-2868 | S-3127 | CUGCUAGCUGUAGA | 1460 | A-3127 | UCAUUUCUACAGC | 1291 |
| | | AAUGCdTdT | | | UAGCAGdTdT | |
| D-2869 | S-3128 | UGCUAGCUGUAGAA | 1461 | A-3128 | UACAUUUCUACAG | 1292 |
| | | AUGUCdTdT | | | CUAGCAdTdT | |
| D-2870 | S-3129 | GCUGUAGAAAUGUA | 1462 | A-3129 | UAGGAUACAUUUC | 1293 |
| | | UCCUCdTdT | | | UACAGCdTdT | |
| D-2871 | S-3130 | CUGUAGAAAUGUAU | 1463 | A-3130 | UCAGGAUACAUUU | 1294 |
| | | CCUGCdTdT | | | CUACAGdTdT | |
| D-2872 | S-3131 | UGUAGAAAUGUAUC | 1464 | A-3131 | UUCAGGAUACAUU | 1295 |
| | | CUGACdTdT | | | UCUACAdTdT | |
| D-2873 | S-3132 | GUAGAAAUGUAUCC | 1465 | A-3132 | UAUCAGGAUACAU | 1296 |
| | | UGAUCdTdT | | | UUCUACdTdT | |
| D-2874 | S-3133 | AAAUGUAUCCUGAU | 1466 | A-3133 | UGUUUAUCAGGAU | 1297 |
| | | AAACCdTdT | | | ACAUUUdTdT | |
| D-2875 | S-3134 | GUAUCCUGAUAAAC | 1467 | A-3134 | UUAAUGUUUAUCA | 1298 |
| | | AUUACdTdT | | | GGAUACdTdT | |
| D-2876 | S-3135 | UUAAACACUGUAAU | 1468 | A-3135 | UUAAGAUUACAGU | 1299 |
| | | CUUACdTdT | | | GUUUAAdTdT | |
| D-2877 | S-3136 | ACUGUAAUCUUAAA | 1469 | A-3136 | UCACUUUUAAGAU | 1300 |
| | | AGUGCdTdT | | | UACAGUdTdT | |
| D-2878 | S-3137 | CUGUAAUCUUAAAA | 1470 | A-3137 | UACACUUUUAAGA | 1301 |
| | | GUGUCdTdT | | | UUACAGdTdT | |
| D-2879 | S-3138 | UGUAAUCUUAAAAG | 1471 | A-3138 | UUACACUUUUAAG | 1302 |
| | | UGUACdTdT | | | AUUACAdTdT | |
| D-2880 | S-3139 | GUAAUCUUAAAAGU | 1472 | A-3139 | UUUACACUUUUAA | 1303 |
| | | GUAACdTdT | | | GAUUACdTdT | |
| D-2881 | S-3140 | CUUAAAAGUGUAAU | 1473 | A-3140 | UCACAAUUACACU | 1304 |
| | | UGUGCdTdT | | | UUUAAGdTdT | |
| D-2882 | S-3141 | UACCUGUAGUGAGA | 1474 | A-3141 | UAGUUUCUCACUA | 1305 |
| | | AACUCdTdT | | | CAGGUAdTdT | |
| D-2883 | S-3142 | UUAUGAUCACUUGG | 1475 | A-3142 | UUCUUCCAAGUGA | 1306 |
| | | AAGACdTdT | | | UCAUAAdTdT | |
| D-2884 | S-3143 | AUGAUCACUUGGAA | 1476 | A-3143 | UAAUCUUCCAAGU | 1307 |
| | | GAUUCdTdT | | | GAUCAUdTdT | |
| D-2885 | S-3144 | AUCACUUGGAAGAU | 1477 | A-3144 | UACAAAUCUUCCA | 1308 |
| | | UUGUCdTdT | | | AGUGAUdTdT | |
| D-2886 | S-3145 | UGGAAGAUUUGUAU | 1478 | A-3145 | UAACUAUACAAAU | 1309 |
| | | AGUUCdTdT | | | CUUCCAdTdT | |
| D-2887 | S-3146 | UAUAAAACUCAGUU | 1479 | A-3146 | UUUUUAACUGAGU | 1310 |
| | | AAAACdTdT | | | UUUAUAdTdT | |
| D-2888 | S-3147 | AAACUCAGUUAAAA | 1480 | A-3147 | UGACAUUUUAACU | 1311 |
| | | UGUCCdTdT | | | GAGUUUdTdT | |
| D-2889 | S-3148 | GUCUGUUUCAAUGA | 1481 | A-3148 | UCAGGUCAUUGAA | 1312 |
| | | CCUGCdTdT | | | ACAGACdTdT | |
| D-2890 | S-3149 | AUGACCUGUAUUUU | 1482 | A-3149 | UUGGCAAAAUACA | 1313 |
| | | GCCACdTdT | | | GGUCAUdTdT | |
| D-2891 | S-3150 | ACCUGUAUUUUGCC | 1483 | A-3150 | UGUCUGGCAAAAU | 1314 |
| | | AGACCdTdT | | | ACAGGUdTdT | |
| D-2892 | S-3151 | CCUGUAUUUUGCCA | 1484 | A-3151 | UAGUCUGGCAAAA | 1315 |
| | | GACUCdTdT | | | UACAGGdTdT | |
| D-2893 | S-3152 | UAAAUCACAGAUGG | 1485 | A-3152 | UAUACCCAUCUGU | 1316 |
| | | GUAUCdTdT | | | GAUUUAdTdT | |
| D-2894 | S-3153 | AUCACAGAUGGGUA | 1486 | A-3153 | UUUAAUACCCAUC | 1317 |
| | | UUAACdTdT | | | UGUGAUdTdT | |
| D-2895 | S-3154 | UCACAGAUGGGUAU | 1487 | A-3154 | UUUUAAUACCCAU | 1318 |
| | | UAAACdTdT | | | CUGUGAdTdT | |
| D-2896 | S-3155 | ACAGAUGGGUAUUA | 1488 | A-3155 | UAGUUUAAUACCC | 1319 |
| | | AACUCdTdT | | | AUCUGUdTdT | |
| D-2897 | S-3156 | CAGAUGGGUAUUAA | 1489 | A-3156 | UAAGUUUAAUACC | 1320 |
| | | ACUUCdTdT | | | CAUCUGdTdT | |
| D-2898 | S-3157 | AGAUGGGUAUUAAA | 1490 | A-3157 | UCAAGUUUAAUAC | 1321 |
| | | CUUGCdTdT | | | CCAUCUdTdT | |
| D-2899 | S-3158 | AUGGGUAUUAAACU | 1491 | A-3158 | UGACAAGUUUAAU | 1322 |
| | | UGUCCdTdT | | | ACCCAUdTdT | |
| D-2900 | S-3159 | UAAACUUGUCAGAA | 1492 | A-3159 | UGAAAUUCUGACA | 1323 |
| | | UUUCCdTdT | | | AGUUUAdTdT | |
| D-2901 | S-3160 | UCAUUCAAGCCUGU | 1493 | A-3160 | UAUUCACAGGCUU | 1324 |
| | | GAAUCdTdT | | | GAAUGAdTdT | |
| D-2902 | S-3161 | CAUUCAAGCCUGUG | 1494 | A-3161 | UUAUUCACAGGCU | 1325 |
| | | AAUACdTdT | | | UGAAUGdTdT | |
| D-2903 | S-3162 | AAUAAAAACCCUGU | 1495 | A-3162 | UCCAUACAGGGUU | 1326 |
| | | AUGGCdTdT | | | UUUAUUdTdT | |
| D-2904 | S-3163 | AUAAAAACCCUGUA | 1496 | A-3163 | UGCCAUACAGGGU | 1327 |
| | | UGGCCdTdT | | | UUUUAUdTdT | |
| D-2905 | S-3164 | AACCCUGUAUGGCA | 1497 | A-3164 | UUAAGUGCCAUAC | 1328 |
| | | CUUACdTdT | | | GAGGUUdTdT | |
| D-2906 | S-3165 | ACCCUGUAUGGCAC | 1498 | A-3165 | UAUAAGUGCCAUA | 1329 |
| | | UUAUCdTdT | | | CAGGGUdTdT | |
| D-2907 | S-3166 | GAGGCUAUUAAAAG | 1499 | A-3166 | UGAUUCUUUUAAU | 1330 |
| | | AAUCCdTdT | | | AGCCUCdTdT | |
| D-2908 | S-3167 | AAAGAAUCCAAAUU | 1500 | A-3167 | UUUUGAAUUUGGA | 1331 |
| | | CAAACdTdT | | | UUCUUUdTdT | |
| D-2909 | S-3168 | GAAUCCAAAUUCAA | 1501 | A-3168 | UUAGUUUGAAUUU | 1332 |
| | | ACUACdTdT | | | GGAUUCdTdT | |

[0540] In other embodiments, the siRNA molecules of the present invention targeting SOD1 can be encoded in plasmid vectors, AAV particles, viral genome or other nucleic acid expression vectors for delivery to a cell.

[0541] DNA expression plasmids can be used to stably express the siRNA duplexes or dsRNA of the present invention targeting SOD1 in cells and achieve long-term inhibition of the target gene expression. In one aspect, the sense and antisense strands of a siRNA duplex are typically linked by a short spacer sequence leading to the expression of a stem-loop structure termed short hairpin RNA (shRNA). The hairpin is recognized and cleaved by Dicer, thus generating mature siRNA molecules.

[0542] According to the present invention, AAV particles comprising the nucleic acids encoding the siRNA molecules targeting SOD1 mRNA are produced, the AAV serotypes may be any of the serotypes listed in Table 1. Non-limiting examples of the AAV serotypes include, AAV1, AAV2, AAV3, AAV4, AAV5, AAV6, AAV7, AAV8, AAV9, AAV9.47, AAV9(hu14), AAV10, AAV11, AAV12, AAVrh8, AAVrh10, AAV-DJ8, AAV-DJ, AAV-PHP.A, AAV-PHP.B, AAVPHP.B2, AAVPHP.B3, AAVPHP.N/PHP.B-DGT, AAVPHP.B-EST, AAVPHP.B-GGT, AAVPHP.B-ATP, AAVPHP.B-ATT-T, AAVPHP.B-DGT-T, AAVPHP.B-GGT-T, AAVPHP.B-SGS, AAVPHP.B-AQP, AAVPHP.B-QQP, AAVPHP.B-SNP(3), AAVPHP.B-SNP, AAVPHP.B-QGT, AAVPHP.B-NQT, AAVPHP.B-EGS, AAVPHP.B-SGN, AAVPHP.B-EGT, AAVPHP.B-DST, AAVPHP.B-DST, AAVPHP.B-STP, AAVPHP.B-PQP, AAVPHP.B-SQP, AAVPHP.B-QLP, AAVPHP.B-TMP, AAVPHP.B-TTP, AAVPHP.S/G2A12, AAVG2A15/G2A3, AAVG2B4, AAVG2B5 and variants thereof.

[0543] In some embodiments, the siRNA duplexes or encoded dsRNA of the present invention suppress (or degrade) SOD1 mRNA. Accordingly, the siRNA duplexes or encoded dsRNA can be used to substantially inhibit SOD1 gene expression in a cell. In some aspects, the inhibition of SOD1 gene expression refers to an inhibition by at least about 20%, preferably by at least about 30%, 40%, 50%, 60%, 70%, 80%, 85%, 90%, 95% and 100%, or at least 20-30%, 20-40%, 20-50%, 20-60%, 20-70%, 20-80%, 20-90%, 20-95%, 20-100%, 30-40%, 30-50%, 30-60%, 30-70%, 30-80%, 30-90%, 30-95%, 30-100%, 40-50%, 40-60%, 40-70%, 40-80%, 40-90%, 40-95%, 40-100%, 50-60%, 50-70%, 50-80%, 50-90%, 50-95%, 50-100%, 60-70%, 60-80%, 60-90%, 60-95%, 60-100%, 70-80%, 70-90%, 70-95%, 70-100%, 80-90%, 80-95%, 80-100%, 90-95%, 90-100% or 95-100%. Accordingly, the protein product of the targeted gene may be inhibited by at least about 20%, preferably by at least about 30%, 40%, 50%, 60%, 70%, 80%, 85%, 90%, 95% and 100%, or at least 20-30%, 20-40%, 20-50%, 20-60%, 20-70%, 20-80%, 20-90%, 20-95%, 20-100%, 30-40%, 30-50%, 30-60%, 30-70%, 30-80%, 30-90%, 30-95%, 30-100%, 40-50%, 40-60%, 40-70%, 40-80%, 40-90%, 40-95%, 40-100%, 50-60%, 50-70%, 50-80%, 50-90%, 50-95%, 50-100%, 60-70%, 60-80%, 60-90%, 60-95%, 60-100%, 70-80%, 70-90%, 70-95%, 70-100%, 80-90%, 80-95%, 80-100%, 90-95%, 90-100% or 95-100%.

[0544] According to the present invention, the siRNA molecules are designed and tested for their ability in reducing SOD1 mRNA levels in cultured cells. Such siRNA molecules may form a duplex such as, but not limited to, include those listed in Table 9. As a non-limiting example, the siRNA duplexes may be siRNA duplex IDs: D-2741 to D-2909.

[0545] In one embodiment, the siRNA molecules comprise a miRNA seed match for SOD1 located in the guide strand. In another embodiment, the siRNA molecules comprise a miRNA seed match for SOD1 located in the passenger strand. In yet another embodiment, the siRNA duplexes or encoded dsRNA targeting SOD1 gene do not comprise a seed match for SOD1 located in the guide or passenger strand.

[0546] In one embodiment, the siRNA duplexes or encoded dsRNA targeting SOD1 gene may have almost no significant full-length off target effects for the guide strand. In another embodiment, the siRNA duplexes or encoded dsRNA targeting SOD1 gene may have almost no significant full-length off target effects for the passenger strand. The siRNA duplexes or encoded dsRNA targeting SOD1 gene may have less than 1%, 2%, 3%, 4%, 5%, 6%, 7%, 8%, 9%, 10%, 11%, 12%, 13%, 14%, 15%, 20%, 25%, 30%, 35%, 40%, 45%, 50%, 1-5%, 2-6%, 3-7%, 4-8%, 5-9%, 5-10%, 6-10%, 5-15%, 5-20%, 5-25% 5-30%, 10-20%, 10-30%, 10-40%, 10-50%, 15-30%, 15-40%, 15-45%, 20-40%, 20-50%, 25-50%, 30-40%, 30-50%, 35-50%, 40-50%, 45-50% full-length off target effects for the passenger strand. In yet another embodiment, the siRNA duplexes or encoded dsRNA targeting SOD1 gene may have almost no significant full-length off target effects for the guide strand or the passenger strand. The siRNA duplexes or encoded dsRNA targeting SOD1 gene may have less than 1%, 2%, 3%, 4%, 5%, 6%, 7%, 8%, 9%, 10%, 11%, 12%, 13%, 14%, 15%, 20%, 25%, 30%, 35%, 40%, 45%, 50%, 1-5%, 2-6%, 3-7%, 4-8%, 5-9%, 5-10%, 6-10%, 5-15%, 5-20%, 5-25% 5-30%, 10-20%, 10-30%, 10-40%, 10-50%, 15-30%, 15-40%, 15-45%, 20-40%, 20-50%, 25-50%, 30-40%, 30-50%, 35-50%, 40-50%, 45-50% full-length off target effects for the guide or passenger strand.

[0547] In one embodiment, the siRNA duplexes or encoded dsRNA targeting SOD1 gene may have high activity in vitro. In another embodiment, the siRNA molecules may have low activity in vitro. In yet another embodiment, the siRNA duplexes or dsRNA targeting the SOD1 gene may have high guide strand activity and low passenger strand activity in vitro.

[0548] In one embodiment, the siRNA molecules targeting SOD1 have a high guide strand activity and low passenger strand activity in vitro. The target knock-down (KD) by the guide strand may be at least 40%, 50%, 60%, 65%, 70%, 75%, 80%, 85%, 90%, 95%, 99%, 99.5% or 100%. The target knock-down by the guide strand may be 40-50%, 45-50%, 50-55%, 50-60%, 60-65%, 60-70%, 60-75%, 60-80%, 60-85%, 60-90%, 60-95%, 60-99%, 60-99.5%, 60-100%, 65-70%, 65-75%, 65-80%, 65-85%, 65-90%, 65-95%, 65-99%, 65-99.5%, 65-100%, 70-75%, 70-80%, 70-85%, 70-90%, 70-95%, 70-99%, 70-99.5%, 70-100%, 75-80%, 75-85%, 75-90%, 75-95%, 75-99%, 75-99.5%, 75-100%, 80-85%, 80-90%, 80-95%, 80-99%, 80-99.5%, 80-100%, 85-90%, 85-95%, 85-99%, 85-99.5%, 85-100%, 90-95%, 90-99%, 90-99.5%, 90-100%, 95-99%, 95-99.5%, 95-100%, 99-99.5%, 99-100% or 99.5-100%. As a non-limiting example, the target knock-down (KD) by the guide strand is greater than 70%. As a non-limiting example, the target knock-down (KD) by the guide strand is greater than 60%.

[0549] In one embodiment, the siRNA duplex target SOD1 is designed so there is no miRNA seed match for the sense or antisense sequence to the non-SOD1 sequence.

[0550] In one embodiment, the IC₅₀ of the guide strand in the siRNA duplex targeting SOD1 for the nearest off target is greater than 100 multiplied by the IC₅₀ of the guide strand for the on-target gene, SOD1. As a non-limiting example, if the IC₅₀ of the guide strand for the nearest off target is greater than 100 multiplied by the IC₅₀ of the guide strand for the target then the siRNA molecule is said to have high guide strand selectivity for inhibiting SOD1 in vitro.

[0551] In one embodiment, the 5′ processing of the guide strand of the siRNA duplex targeting SOD1 has a correct start (n) at the 5′ end at least 75%, 80%, 85%, 90%, 95%, 99% or 100% of the time in vitro or in vivo. As a non-limiting example, the 5′ processing of the guide strand is precise and has a correct start (n) at the 5′ end at least 99% of the time in vitro. As a non-limiting example, the 5′ processing of the guide strand is precise and has a correct start (n) at the 5′ end at least 99% of the time in vivo. As a non-limiting example, the 5′ processing of the guide strand is precise and has a correct start (n) at the 5′ end at least 90% of the time in vitro. As a non-limiting example, the 5′ processing of the guide strand is precise and has a correct start (n) at the 5′ end at least 90% of the time in vivo. As a non-limiting example, the 5′ processing of the guide strand is precise and has a correct start (n) at the 5′ end at least 85% of the time in vitro. As a non-limiting example, the 5′ processing of the guide strand is precise and has a correct start (n) at the 5′ end at least 85% of the time in vivo.

[0552] In one embodiment, a passenger-guide strand duplex for SOD1 is considered effective when the pri- or pre-microRNAs demonstrate, by methods known in the art and described herein, greater than 2-fold guide to passenger strand ratio when processing is measured. As a non-limiting examples, the pri- or pre-microRNAs demonstrate great than 2-fold, 3-fold, 4-fold, 5-fold, 6-fold, 7-fold, 8-fold, 9-fold, 10-fold, 11-fold, 12-fold, 13-fold, 14-fold, 15-fold, or 2 to 5-fold, 2 to 10-fold, 2 to 15-fold, 3 to 5-fold, 3 to 10-fold, 3 to 15-fold, 4 to 5-fold, 4 to 10-fold, 4 to 15-fold, 5 to 10-fold, 5 to 15-fold, 6 to 10-fold, 6 to 15-fold, 7 to 10-fold, 7 to 15-fold, 8 to 10-fold, 8 to 15-fold, 9 to 10-fold, 9 to 15-fold, 10 to 15-fold, 11 to 15-fold, 12 to 15-fold, 13 to 15-fold, or 14 to 15-fold guide to passenger strand ratio when processing is measured.

[0553] In one embodiment, the siRNA molecules may be used to silence wild type or mutant SOD1 by targeting at least one exon on the SOD1 sequence. The exon may be exon 1, exon 2, exon 3, exon 4, exon 5, exon 6, exon 7, exon 8, exon 9, exon 10, exon 11, exon 12, exon 13, exon 14, exon 15, exon 16, exon 17, exon 18, exon 19, exon 20, exon 21, exon 22, exon 23, exon 24, exon 25, exon 26, exon 27, exon 28, exon 29, exon 30, exon 31, exon 32, exon 33, exon 34, exon 35, exon 36, exon 37, exon 38, exon 39, exon 40, exon 41, exon 42, exon 43, exon 44, exon 45, exon 46, exon 47, exon 48, exon 49, exon 50, exon 51, exon 52, exon 53, exon 54, exon 55, exon 56, exon 57, exon 58, exon 59, exon 60, exon 61, exon 62, exon 63, exon 64, exon 65, exon 66, and/or exon 67.

siRNA Modification

[0554] In some embodiments, the siRNA molecules of the present invention, when not delivered as a precursor or DNA, may be chemically modified to modulate some features of RNA molecules, such as, but not limited to, increasing the stability of siRNAs in vivo. The chemically modified siRNA molecules can be used in human therapeutic applications, and are improved without compromising the RNAi activity of the siRNA molecules. As a non-limiting example, the siRNA molecules modified at both the 3′ and the 5′ end of both the sense strand and the antisense strand.

[0555] In some aspects, the siRNA duplexes of the present invention may contain one or more modified nucleotides such as, but not limited to, sugar modified nucleotides, nucleobase modifications and/or backbone modifications. In some aspects, the siRNA molecule may contain combined modifications, for example, combined nucleobase and backbone modifications.

[0556] In one embodiment, the modified nucleotide may be a sugar-modified nucleotide. Sugar modified nucleotides include, but are not limited to 2′-fluoro, 2′-amino and 2′-thio modified ribonucleotides, e.g. 2′-fluoro modified ribonucleotides. Modified nucleotides may be modified on the sugar moiety, as well as nucleotides having sugars or analogs thereof that are not ribosyl. For example, the sugar moieties may be, or be based on, mannoses, arabinoses, glucopyranoses, galactopyranoses, 4′-thioribose, and other sugars, heterocycles, or carbocycles.

[0557] In one embodiment, the modified nucleotide may be a nucleobase-modified nucleotide.

[0558] In one embodiment, the modified nucleotide may be a backbone-modified nucleotide. In some embodiments, the siRNA duplexes of the present invention may further comprise other modifications on the backbone. A normal “backbone”, as used herein, refers to the repeating alternating sugar-phosphate sequences in a DNA or RNA molecule. The deoxyribose/ribose sugars are joined at both the 3′-hydroxyl and 5′-hydroxyl groups to phosphate groups in ester links, also known as “phosphodiester” bonds/linker (PO linkage). The PO backbones may be modified as “phosphorothioate backbone (PS linkage). In some cases, the natural phosphodiester bonds may be replaced by amide bonds but the four atoms between two sugar units are kept. Such amide modifications can facilitate the solid phase synthesis of oligonucleotides and increase the thermodynamic stability of a duplex formed with siRNA complement. See e.g. Mesmaeker et al., Pure & Appl. Chem., 1997, 3, 437-440; the content of which is incorporated herein by reference in its entirety.

[0559] Modified bases refer to nucleotide bases such as, for example, adenine, guanine, cytosine, thymine, uracil, xanthine, inosine, and queuosine that have been modified by the replacement or addition of one or more atoms or groups. Some examples of modifications on the nucleobase moieties include, but are not limited to, alkylated, halogenated, thiolated, aminated, amidated, or acetylated bases, individually or in combination. More specific examples include, for example, 5-propynyluridine, 5-propynylcytidine, 6-methyladenine, 6-methylguanine, N,N,-dimethyladenine, 2-propyladenine, 2-propylguanine, 2-aminoadenine, 1-methylinosine, 3-methyluridine, 5-methylcytidine, 5-methyluridine and other nucleotides having a modification at the 5 position, 5-(2-amino)propyl uridine, 5-halocytidine, 5-halouridine, 4-acetylcytidine, 1-methyladenosine, 2-methyladenosine, 3-methylcytidine, 6-methyluridine, 2-methylguanosine, 7-methylguano sine, 2,2-dimethylguanosine, 5-methylaminoethyluridine, 5-methyloxyuridine, deazanucleotides such as 7-deaza-adenosine, 6-azouridine, 6-azocytidine, 6-azothymidine, 5-methyl-2-thiouridine, other thio bases such as 2-thiouridine and 4-thiouridine and 2-thiocytidine, dihydrouridine, pseudouridine, queuosine, archaeosine, naphthyl and substituted naphthyl groups, any O- and N-alkylated purines and pyrimidines such as N6-methyladenosine, 5-methylcarbonylmethyluridine, uridine 5-oxyacetic acid, pyridine-4-one, pyridine-2-one, phenyl and modified phenyl groups such as aminophenol or 2,4,6-trimethoxy benzene, modified cytosines that act as G-clamp nucleotides, 8-substituted adenines and guanines, 5-substituted uracils and thymines, azapyrimidines, carboxyhydroxyalkyl nucleotides, carboxyalkylaminoalkyl nucleotides, and alkylcarbonylalkylated nucleotides.

[0560] In one embodiment, the modified nucleotides may be on just the sense strand.

[0561] In another embodiment, the modified nucleotides may be on just the antisense strand.

[0562] In some embodiments, the modified nucleotides may be in both the sense and antisense strands.

[0563] In some embodiments, the chemically modified nucleotide does not affect the ability of the antisense strand to pair with the target mRNA sequence.

[0564] In one embodiment, the AAV particle comprising a nucleic acid sequence encoding the siRNA molecules of the present invention may encode siRNA molecules which are polycistronic molecules. The siRNA molecules may additionally comprise one or more linkers between regions of the siRNA molecules.

### Molecular Scaffold

[0565] In one embodiment, the siRNA molecules may be encoded in a modulatory polynucleotide which also comprises a molecular scaffold. As used herein a “molecular scaffold” is a framework or starting molecule that forms the sequence or structural basis against which to design or make a subsequent molecule.

[0566] In one embodiment, the molecular scaffold comprises at least one 5′ flanking region. As a non-limiting example, the 5′ flanking region may comprise a 5′ flanking sequence which may be of any length and may be derived in whole or in part from wild type microRNA sequence or be a completely artificial sequence.

[0567] In one embodiment, the molecular scaffold comprises at least one 3′ flanking region. As a non-limiting example, the 3′ flanking region may comprise a 3′ flanking sequence which may be of any length and may be derived in whole or in part from wild type microRNA sequence or be a completely artificial sequence.

[0568] In one embodiment, the molecular scaffold comprises at least one loop motif region. As a non-limiting example, the loop motif region may comprise a sequence which may be of any length.

[0569] In one embodiment, the molecular scaffold comprises a 5′ flanking region, a loop motif region and/or a 3′ flanking region.

[0570] In one embodiment, at least one siRNA, miRNA or other RNAi agent described herein, may be encoded by a modulatory polynucleotide which may also comprise at least one molecular scaffold. The molecular scaffold may comprise a 5′ flanking sequence which may be of any length and may be derived in whole or in part from wild type microRNA sequence or be completely artificial. The 3′ flanking sequence may mirror the 5′ flanking sequence and/or a 3′ flanking sequence in size and origin. Either flanking sequence may be absent. The 3′ flanking sequence may optionally contain one or more CNNC motifs, where “N” represents any nucleotide.

[0571] Forming the stem of a stem loop structure is a minimum of the modulatory polynucleotide encoding at least one siRNA, miRNA or other RNAi agent described herein. In some embodiments, the siRNA, miRNA or other RNAi agent described herein comprises at least one nucleic acid sequence which is in part complementary or will hybridize to a target sequence. In some embodiments the payload is an siRNA molecule or fragment of an siRNA molecule.

[0572] In some embodiments, the 5′ arm of the stem loop structure of the modulatory polynucleotide comprises a nucleic acid sequence encoding a sense sequence. Non-limiting examples of sense sequences, or fragments or variants thereof, which may be encoded by the modulatory polynucleotide are described in Table 3 and Table 8.

[0573] In some embodiments, the 3′ arm of the stem loop of the modulatory polynucleotide comprises a nucleic acid sequence encoding an antisense sequence. The antisense sequence, in some instances, comprises a “G” nucleotide at the 5′ most end. Non-limiting examples of antisense sequences, or fragments or variants thereof, which may be encoded by the modulatory polynucleotide are described in Table 2 and Table 7.

[0574] In other embodiments, the sense sequence may reside on the 3′ arm while the antisense sequence resides on the 5′ arm of the stem of the stem loop structure of the modulatory polynucleotide. Non-limiting examples of sense and antisense sequences which may be encoded by the modulatory polynucleotide are described in Tables 2, 3, 7, and 8.

[0575] In one embodiment, the sense and antisense sequences may be completely complementary across a substantial portion of their length. In other embodiments the sense sequence and antisense sequence may be at least 70, 80, 90, 95 or 99% complementarity across independently at least 50, 60, 70, 80, 85, 90, 95, or 99% of the length of the strands.

[0576] Neither the identity of the sense sequence nor the homology of the antisense sequence need to be 100% complementarity to the target sequence.

[0577] In one embodiment, separating the sense and antisense sequence of the stem loop structure of the modulatory polynucleotide is a loop sequence (also known as a loop motif, linker or linker motif). The loop sequence may be of any length, between 4-30 nucleotides, between 4-20 nucleotides, between 4-15 nucleotides, between 5-15 nucleotides, between 6-12 nucleotides, 6 nucleotides, 7 nucleotides, 8 nucleotides, 9 nucleotides, 10 nucleotides, 11 nucleotides, 12 nucleotides, 13 nucleotides, 14 nucleotides, and/or 15 nucleotides.

[0578] In some embodiments, the loop sequence comprises a nucleic acid sequence encoding at least one UGUG motif. In some embodiments, the nucleic acid sequence encoding the UGUG motif is located at the 5′ terminus of the loop sequence.

[0579] In one embodiment, spacer regions may be present in the modulatory polynucleotide to separate one or more modules (e.g., 5′ flanking region, loop motif region, 3′ flanking region, sense sequence, antisense sequence) from one another. There may be one or more such spacer regions present.

[0580] In one embodiment, a spacer region of between 8-20, i.e., 8, 9, 10, 11, 12, 13, 14, 15, 16, 17, 18, 19, or 20 nucleotides may be present between the sense sequence and a flanking region sequence.

[0581] In one embodiment, the length of the spacer region is 13 nucleotides and is located between the 5′ terminus of the sense sequence and the 3′ terminus of the flanking sequence. In one embodiment, a spacer is of sufficient length to form approximately one helical turn of the sequence.

[0582] In one embodiment, a spacer region of between 8-20, i.e., 8, 9, 10, 11, 12, 13, 14, 15, 16, 17, 18, 19, or 20 nucleotides may be present between the antisense sequence and a flanking sequence.

[0583] In one embodiment, the spacer sequence is between 10-13, i.e., 10, 11, 12 or 13 nucleotides and is located between the 3′ terminus of the antisense sequence and the 5′ terminus of a flanking sequence. In one embodiment, a spacer is of sufficient length to form approximately one helical turn of the sequence.

[0584] In one embodiment, the molecular scaffold of the modulatory polynucleotide comprises in the 5′ to 3′ direction, a 5′ flanking sequence, a 5′ arm, a loop motif, a 3′ arm and a 3′ flanking sequence. As a non-limiting example, the 5′ arm may comprise a nucleic acid sequence encoding a sense sequence and the 3′ arm comprises a nucleic acid sequence encoding the antisense sequence. In another non-limiting example, the 5′ arm comprises a nucleic acid sequence encoding the antisense sequence and the 3′ arm comprises a nucleic acid sequence encoding the sense sequence.

[0585] In one embodiment, the 5′ arm, sense and/or antisense sequence, loop motif and/or 3′ arm sequence may be altered (e.g., substituting 1 or more nucleotides, adding nucleotides and/or deleting nucleotides). The alteration may cause a beneficial change in the function of the construct (e.g., increase knock-down of the target sequence, reduce degradation of the construct, reduce off target effect, increase efficiency of the payload, and reduce degradation of the payload).

[0586] In one embodiment, the molecular scaffold of the modulatory polynucleotides is aligned in order to have the rate of excision of the guide strand (also referred to herein as the antisense strand) be greater than the rate of excision of the passenger strand (also referred to herein as the sense strand). The rate of excision of the guide or passenger strand may be, independently, 1%, 2%, 3%, 4%, 5%, 10%, 15%, 20%, 25%, 30%, 35%, 40%, 45%, 50%, 55%, 60%, 65%, 70%, 75%, 80%, 85%, 90%, 95%, 99% or more than 99%. As a non-limiting example, the rate of excision of the guide strand is at least 80%. As another non-limiting example, the rate of excision of the guide strand is at least 90%.

[0587] In one embodiment, the rate of excision of the guide strand is greater than the rate of excision of the passenger strand. In one aspect, the rate of excision of the guide strand may be at least 1%, 2%, 3%, 4%, 5%, 10%, 15%, 20%, 25%, 30%, 35%, 40%, 45%, 50%, 55%, 60%, 65%, 70%, 75%, 80%, 85%, 90%, 95%, 99% or more than 99% greater than the passenger strand.

[0588] In one embodiment, the efficiency of excision of the guide strand is at least 60%, 65%, 70%, 75%, 80%, 85%, 90%, 95%, 99% or more than 99%. As a non-limiting example, the efficiency of the excision of the guide strand is greater than 80%.

[0589] In one embodiment, the efficiency of the excision of the guide strand is greater than the excision of the passenger strand from the molecular scaffold. The excision of the guide strand may be 2, 3, 4, 5, 6, 7, 8, 9, 10 or more than 10 times more efficient than the excision of the passenger strand from the molecular scaffold.

[0590] In one embodiment, the molecular scaffold comprises a dual-function targeting modulatory polynucleotide. As used herein, a “dual-function targeting” modulatory polynucleotide is a polynucleotide where both the guide and passenger strands knock down the same target or the guide and passenger strands knock down different targets.

[0591] In one embodiment, the molecular scaffold of the modulatory polynucleotides described herein may comprise a 5′ flanking region, a loop motif region and a 3′ flanking region. Non-limiting examples of the sequences for the 5′ flanking region, loop motif region (may also be referred to as a linker region) and the 3′ flanking region which may be used, or fragments thereof used, in the modulatory polynucleotides described herein are shown in Tables 10-12.

TABLE 10
5′ Flanking Regions for Molecular Scaffold

| 5′ | | 5′ |
|---|---|---|
| Flanking | | Flanking |
| Region | 5′ Flanking | Region |
| Name | Region Sequence | SEQ ID |
| 5F3 | GTGCTGGGCGGGGGGCGGCGGGCCCT | 1503 |
| | CCCGCAGAACACCATGCGCTCCACGG | |
| | AA | |
| 5F1 | GTGCTGGGCGGGGGGCGGCGGGCCCT | 1504 |
| | CCCGCAGAACACCATGCGCTCTTCGG | |
| | AA | |
| 5F2 | GAAGCAAAGAAGGGGCAGAGGGAGCC | 1505 |
| | CGTGAGCTGAGTGGGCCAGGGACTGG | |
| | GAGAAGGAGTGAGGAGGCAGGGCCGG | |
| | CATGCCTCTGCTGCTGGCCAGA | |
| 5F4 | GGGCCCTCCCGCAGAACACCATGCGC | 1506 |
| | TCCACGGAA | |
| 5F5 | CTCCCGCAGAACACCATGCGCTCCAC | 1507 |
| | GGAA | |
| 5F6 | GTGCTGGGCGGGGGGCGGCGGGCCCT | 1508 |
| | CCCGCAGAACACCATGCGCTCCACGG | |
| | AAG | |
| 5F7 | GTGCTGGGCGGGGGGCGGCGGGCCCT | 1509 |
| | CCCGCAGAACACCATGCGCTCCTCGG | |
| | AA | |
| 5F8 | TTTATGCCTCATCCTCTGAGTGCTGA | 1692 |
| | AGGCTTGCTGTAGGCTGTATGCTG | |
| 5F9 | GTGCTGGGCGGGGGGCGGCGGGCCCT | 1782 |
| | CCCGCAGAACACCATGCGCTCTTCGG | |
| | GA | |

TABLE 11
Loop Motif Regions for Molecular Scaffold

| Loop | | Loop |
|---|---|---|
| Motif | | Motif |
| Region | Loop Motif | Region |
| Name | Region Sequence | SEQ ID |
| L5 | GTGGCCACTGAGAAG | 1510 |
| L1 | TGTGACCTGG | 1511 |
| L2 | TGTGATTTGG | 1512 |
| L3 | GTCTGCACCTGTCACTAG | 1513 |
| L4 | GTGACCCAAG | 1514 |
| L6 | GTGACCCAAT | 1515 |
| L7 | GTGACCCAAC | 1516 |
| L8 | GTGGCCACTGAGAAA | 1517 |
| L9 | TATAATTTGG | 1693 |
| L10 | CCTGACCCAGT | 1694 |

TABLE 12
3′ Flanking Regions for Molecular Scaffold

| 3′ | | 3′ |
|---|---|---|
| Flanking | | Flanking |
| Region | 3′ Flanking | Region |
| Name | Region Sequence | SEQ ID |
| 3F1 | CTGAGGAGCGCCTTGACAGCAGCCAT | 1518 |
| | GGGAGGGCCGCCCCCTACCTCAGTGA | |
| 3F2 | CTGTGGAGCGCCTTGACAGCAGCCAT | 1519 |
| | GGGAGGGCCGCCCCCTACCTCAGTGA | |
| 3F3 | TGGCCGTGTAGTGCTACCCAGCGCTG | 1520 |
| | GCTGCCTCCTCAGCATTGCAATTCCT | |
| | CTCCCATCTGGGCACCAGTCAGCTAC | |
| | CCTGGTGGGAATCTGGGTAGCC | |
| 3F4 | CTGAGGAGCGCCTTGACAGCAGCCAT | 1521 |
| | GGGAGGGCC | |
| 3F5 | CTGCGGAGCGCCTTGACAGCAGCCAT | 1522 |
| | GGGAGGGCCGCCCCCTACCTCAGTGA | |
| 3F6 | AGTGTATGATGCCTGTTACTAGCATT | 1695 |
| | CACATGGAACAAATTGCTGCCGTG | |
| 3F7 | TCCTGAGGAGCGCCTTGACAGCAGCC | 1783 |
| | ATGGGAGGGCCGCCCCCTACCTCAGT | |
| | GA | |

[0592] In one embodiment, the molecular scaffold may comprise at least one 5′ flanking region, fragment or variant thereof listed in Table 10. As a non-limiting example, the 5′ flanking region may be 5F1, 5F2, 5F3, 5F4, 5F5, 5F6, 5F7, 5F8, or 5F9.

[0593] In one embodiment, the molecular scaffold may comprise at least one 5F1 flanking region.

[0594] In one embodiment, the molecular scaffold may comprise at least one 5F2 flanking region.

[0595] In one embodiment, the molecular scaffold may comprise at least one 5F3 flanking region.

[0596] In one embodiment, the molecular scaffold may comprise at least one 5F4 flanking region.

[0597] In one embodiment, the molecular scaffold may comprise at least one 5F5 flanking region.

[0598] In one embodiment, the molecular scaffold may comprise at least one 5F6 flanking region.

[0599] In one embodiment, the molecular scaffold may comprise at least one 5F7 flanking region.

[0600] In one embodiment, the molecular scaffold may comprise at least one 5F8 flanking region.

[0601] In one embodiment, the molecular scaffold may comprise at least one 5F9 flanking region.

[0602] In one embodiment, the molecular scaffold may comprise at least one loop motif region, fragment or variant thereof listed in Table 11. As a non-limiting example, the loop motif region may be L1, L2, L3, L4, L5, L6, L7, L8, L9, or L10.

[0603] In one embodiment, the molecular scaffold may comprise at least one L1 loop motif region.

[0604] In one embodiment, the molecular scaffold may comprise at least one L2 loop motif region.

[0605] In one embodiment, the molecular scaffold may comprise at least one L3 loop motif region.

[0606] In one embodiment, the molecular scaffold may comprise at least one L4 loop motif region.

[0607] In one embodiment, the molecular scaffold may comprise at least one L5 loop motif region.

[0608] In one embodiment, the molecular scaffold may comprise at least one L6 loop motif region.

[0609] In one embodiment, the molecular scaffold may comprise at least one L7 loop motif region.

[0610] In one embodiment, the molecular scaffold may comprise at least one L8 loop motif region.

[0611] In one embodiment, the molecular scaffold may comprise at least one L9 loop motif region.

[0612] In one embodiment, the molecular scaffold may comprise at least one L10 loop motif region.

[0613] In one embodiment, the molecular scaffold may comprise at least one 3′ flanking region, fragment or variant thereof listed in Table 12. As a non-limiting example, the 3′ flanking region may be 3F1, 3F2, 3F3, 3F4, 3F5, 3F6, or 3F7.

[0614] In one embodiment, the molecular scaffold may comprise at least one 3F1 flanking region.

[0615] In one embodiment, the molecular scaffold may comprise at least one 3F2 flanking region.

[0616] In one embodiment, the molecular scaffold may comprise at least one 3F3 flanking region.

[0617] In one embodiment, the molecular scaffold may comprise at least one 3F4 flanking region.

[0618] In one embodiment, the molecular scaffold may comprise at least one 3F5 flanking region.

[0619] In one embodiment, the molecular scaffold may comprise at least one 3F6 flanking region.

[0620] In one embodiment, the molecular scaffold may comprise at least one 3F7 flanking region.

[0621] In one embodiment, the molecular scaffold may comprise at least one 5′ flanking region, fragment or variant thereof, and at least one loop motif region, fragment or variant thereof, as described in Tables 10 and 11. As a non-limiting example, the 5′ flanking region and the loop motif region may be 5F1 and L1, 5F1 and L2, 5F1 and L3, 5F1 and L4, 5F1 and L5, 5F1 and L6, 5F1 and L7, 5F1 and L8, 5F1 and L9, 5F1 and L10, 5F2 and L1, 5F2 and L2, 5F2 and L3, 5F2 and L4, 5F2 and L5, 5F2 and L6, 5F2 and L7, 5F2 and L8, 5F2 and L9, 5F2 and L10, 5F3 and L1, 5F3 and L2, 5F3 and L3, 5F3 and L4, 5F3 and L5, 5F3 and L6, 5F3 and L7, 5F3 and L8, 5F3 and L9, 5F3 and L10, 5F4 and L1, 5F4 and L2, 5F4 and L3, 5F4 and L4, 5F4 and L5, 5F4 and L6, 5F4 and L7, 5F4 and L8, 5F4 and L9, 5F4 and L10, 5F5 and L1, 5F5 and L2, 5F5 and L3, 5F5 and L4, 5F5 and L5, 5F5 and L6, 5F5 and L7, 5F5 and L8, 5F5 and L9, 5F5 and L10, 5F6 and L1, 5F6 and L2, 5F6 and L3, 5F6 and L4, 5F6 and L5, 5F6 and L6, 5F6 and L7, 5F6 and L8, 5F6 and L9, 5F6 and L10, 5F7 and L1, 5F7 and L2, 5F7 and L3, 5F7 and L4, 5F7 and L5, 5F7 and L6, 5F7 and L7, 5F7 and L8, 5F7 and L9, 5F7 and L10, 5F8 and L1, 5F8 and L2, 5F8 and L3, 5F8 and L4, 5F8 and L5, 5F8 and L6, 5F8 and L7, 5F8 and L8, 5F8 and L9, 5F8 and L10, 5F9 and L1, 5F9 and L2, 5F9 and L3, 5F9 and L4, 5F9 and L5, 5F9 and L6, 5F9 and L7, 5F9 and L8, 5F9 and L9, and 5F9 and L10.

[0622] In one embodiment, the molecular scaffold may comprise at least one 5F2 flanking region and at least one L1 loop motif region.

[0623] In one embodiment, the molecular scaffold may comprise at least one 5F1 flanking region and at least one L4 loop motif region.

[0624] In one embodiment, the molecular scaffold may comprise at least one 5F7 flanking region and at least one L8 loop motif region.

[0625] In one embodiment, the molecular scaffold may comprise at least one 5F3 flanking region and at least one L4 loop motif region.

[0626] In one embodiment, the molecular scaffold may comprise at least one 5F3 flanking region and at least one L5 loop motif region.

[0627] In one embodiment, the molecular scaffold may comprise at least one 5F4 flanking region and at least one L4 loop motif region.

[0628] In one embodiment, the molecular scaffold may comprise at least one 5F3 flanking region and at least one L7 loop motif region.

[0629] In one embodiment, the molecular scaffold may comprise at least one 5F5 flanking region and at least one L4 loop motif region.

[0630] In one embodiment, the molecular scaffold may comprise at least one 5F6 flanking region and at least one L4 loop motif region.

[0631] In one embodiment, the molecular scaffold may comprise at least one 5F3 flanking region and at least one L6 loop motif region.

[0632] In one embodiment, the molecular scaffold may comprise at least one 5F7 flanking region and at least one L4 loop motif region.

[0633] In one embodiment, the molecular scaffold may comprise at least one 5F2 flanking region and at least one L2 loop motif region.

[0634] In one embodiment, the molecular scaffold may comprise at least one 5F1 flanking region and at least one L1 loop motif region.

[0635] In one embodiment, the molecular scaffold may comprise at least one 5F1 flanking region and at least one L2 loop motif region.

[0636] In one embodiment, the molecular scaffold may comprise at least one 3′ flanking region, fragment or variant thereof, and at least one motif region, fragment or variant thereof, as described in Tables 11 and 12. As a non-limiting example, the 3′ flanking region and the loop motif region may be 3F1 and L1, 3F1 and L2, 3F1 and L3, 3F1 and L4, 3F1 and L5, 3F1 and L6, 3F1 and L7, 3F1 and L8, 3F1 and L9, 3F1 and L10, 3F2 and L1, 3F2 and L2, 3F2 and L3, 3F2 and L4, 3F2 and L5, 3F2 and L6, 3F2 and L7, 3F2 and L8, 3F2 and L9, 3F2 and L10, 3F3 and L1, 3F3 and L2, 3F3 and L3, 3F3 and L4, 3F3 and L5, 3F3 and L6, 3F3 and L7, 3F3 and L8, 3F3 and L9, 3F3 and L10, 3F4 and L1, 3F4 and L2, 3F4 and L3, 3F4 and L4, 3F4 and L5, 3F4 and L6, 3F4 and L7, 3F4 and L8, 3F4 and L9, 3F4 and L10, 3F5 and L1, 3F5 and L2, 3F5 and L3, 3F5 and L4, 3F5 and L5, 3F5 and L6, 3F5 and L7, 3F5 and L8, 3F5 and L9, 3F5 and L10, 3F6 and L1, 3F6 and L2, 3F6 and L3, 3F6 and L4, 3F6 and L5, 3F6 and L6, 3F6 and L7, 3F6 and L8, 3F6 and L9, 3F6 and L10, 3F7 and L1, 3F7 and L2, 3F7 and L3, 3F7 and L4, 3F7 and L5, 3F7 and L6, 3F7 and L7, 3F7 and L8, 3F7 and L9, and 3F7 and L10.

[0637] In one embodiment, the molecular scaffold may comprise at least one L1 loop motif region and at least one 3F2 flanking region.

[0638] In one embodiment, the molecular scaffold may comprise at least one L4 loop motif region and at least one 3F1 flanking region.

[0639] In one embodiment, the molecular scaffold may comprise at least one L8 loop motif region and at least one 3F5 flanking region.

[0640] In one embodiment, the molecular scaffold may comprise at least one L5 loop motif region and at least 3F1 flanking region.

[0641] In one embodiment, the molecular scaffold may comprise at least one L4 loop motif region and at least one 3F4 flanking region.

[0642] In one embodiment, the molecular scaffold may comprise at least one L7 loop motif region and at least one 3F1 flanking region.

[0643] In one embodiment, the molecular scaffold may comprise at least one L6 loop motif region and at least one 3F1 flanking region.

[0644] In one embodiment, the molecular scaffold may comprise at least one L4 loop motif region and at least one 3F5 flanking region.

[0645] In one embodiment, the molecular scaffold may comprise at least one L2 loop motif region and at least one 3F2 flanking region.

[0646] In one embodiment, the molecular scaffold may comprise at least one L1 loop motif region and at least one 3F3 flanking region.

[0647] In one embodiment, the molecular scaffold may comprise at least one L5 loop motif region and at least one 3F4 flanking region.

[0648] In one embodiment, the molecular scaffold may comprise at least one L1 loop motif region and at least one 3F1 flanking region.

[0649] In one embodiment, the molecular scaffold may comprise at least one L2 loop motif region and at least one 3F1 flanking region.

[0650] In one embodiment, the molecular scaffold may comprise at least one 5′ flanking region, fragment or variant thereof, and at least one 3′ flanking region, fragment or variant thereof, as described in Tables 10 and 12. As a non-limiting example, the flanking regions may be 5F1 and 3F1, 5F1 and 3F2, 5F1 and 3F3, 5F1 and 3F4, 5F1 and 3F5, 5F1 and 3F6, 5F1 and 3F7, 5F2 and 3F1, 5F2 and 3F2, 5F2 and 3F3, 5F2 and 3F4, 5F2 and 3F5, 5F2 and 3F6, 5F2 and 3F7, 5F3 and 3F1, 5F3 and 3F2, 5F3 and 3F3, 5F3 and 3F4, 5F3 and 3F5, 5F3 and 3F6, 5F3 and 3F7, 5F4 and 3F1, 5F4 and 3F2, 5F4 and 3F3, 5F4 and 3F4, 5F4 and 3F5, 5F4 and 3F6, 5F4 and 3F7, 5F5 and 3F1, 5F5 and 3F2, 5F5 and 3F3, 5F5 and 3F4, 5F5 and 3F5, 5F5 and 3F6, 5F5 and 3F7, 5F6 and 3F1, 5F6 and 3F2, 5F6 and 3F3, 5F6 and 3F4, 5F6 and 3F5, 5F6 and 3F6, 5F6 and 3F7, 5F7 and 3F1, 5F7 and 3F2, 5F7 and 3F3, 5F7 and 3F4, 5F7 and 3F5, 5F7 and 3F6, 5F7 and 3F7, 5F8 and 3F1, 5F8 and 3F2, 5F8 and 3F3, 5F8 and 3F4, 5F8 and 3F5, 5F8 and 3F6, and 5F8 and 3F7. 5F9 and 3F1, 5F9 and 3F2, 5F9 and 3F3, 5F9 and 3F4, 5F9 and 3F5, 5F9 and 3F6, and 5F9 and 3F7

[0651] In one embodiment, the molecular scaffold may comprise at least one 5F2 5′ flanking region and at least one 3F2 3′ flanking region.

[0652] In one embodiment, the molecular scaffold may comprise at least one 5F1 5′ flanking region and at least one 3F1 3′ flanking region.

[0653] In one embodiment, the molecular scaffold may comprise at least one 5F7 5′ flanking region and at least one 3F5 3′ flanking region.

[0654] In one embodiment, the molecular scaffold may comprise at least one 5F3 5′ flanking region and at least one 3F1 3′ flanking region.

[0655] In one embodiment, the molecular scaffold may comprise at least one 5F4 5′ flanking region and at least one 3F4 3′ flanking region.

[0656] In one embodiment, the molecular scaffold may comprise at least one 5F5 5′ flanking region and at least one 3F4 3′ flanking region.

[0657] In one embodiment, the molecular scaffold may comprise at least one 5F6 5′ flanking region and at least one 3F1 3′ flanking region.

[0658] In one embodiment, the molecular scaffold may comprise at least one 5F2 5′ flanking region and at least one 3F3 3′ flanking region.

[0659] In one embodiment, the molecular scaffold may comprise at least one 5F3 5′ flanking region and at least one 3F4 3′ flanking region.

[0660] In one embodiment, the molecular scaffold may comprise at least one 5F1 5′ flanking region and at least one 3F2 3′ flanking region.

[0661] In one embodiment, the molecular scaffold may comprise at least one 5′ flanking region, fragment or variant thereof, at least one loop motif region, fragment or variant thereof, and at least one 3′ flanking region as described in Tables 10-12. As a non-limiting example, the flanking and loop motif regions may be 5F1, L1 and 3F1; 5F1, L1 and 3F2; 5F1, L1 and 3F3; 5F1, L1 and 3F4; 5F1, L1 and 3F5; 5F1, L1 and 3F6; 5F1, L1 and 3F7; 5F2, L1 and 3F1; 5F2, L1 and 3F2; 5F2, L1 and 3F3; 5F2, L1 and 3F4; 5F2, L1 and 3F5; 5F2, L1 and 3F6; 5F2, L1 and 3F7; 5F3, L1 and 3F1; 5F3, L1 and 3F2; 5F3, L1 and 3F3; 5F3, L1 and 3F4; 5F3, L1 and 3F5; 5F3, L1 and 3F6; 5F3, L1 and 3F7; 5F4, L1 and 3F1; 5F4, L1 and 3F2; 5F4, L1 and 3F3; 5F4, L1 and 3F4; 5F4, L1 and 3F5; 5F4, L1 and 3F6; 5F4, L1 and 3F7; 5F5, L1 and 3F1; 5F5, L1 and 3F2; 5F5, L1 and 3F3; 5F5, L1 and 3F4; 5F5, L1 and 3F5; 5F5, L1 and 3F6; 5F5, L1 and 3F7; 5F6, L1 and 3F1; 5F6, L1 and 3F2; 5F6, L1 and 3F3; 5F6, L1 and 3F4; 5F6, L1 and 3F5; 5F6, L1 and 3F6; 5F6, L1 and 3F7; 5F7, L1 and 3F1; 5F7, L1 and 3F2; 5F7, L1 and 3F3; 5F7, L1 and 3F4; 5F7, L1 and 3F5; 5F7, L1 and 3F6; 5F7, L1 and 3F7; 5F8, L1 and 3F1; 5F8, L1 and 3F2; 5F8, L1 and 3F3; 5F8, L1 and 3F4; 5F8, L1 and 3F5; 5F8, L1 and 3F6; 5F8, L1 and 3F7; 5F9, L1 and 3F1; 5F9, L1 and 3F2; 5F9, L1 and 3F3; 5F9, L1 and 3F4; 5F9, L1 and 3F5; 5F9, L1 and 3F6; 5F9, L1 and 3F7; 5F1, L2 and 3F1; 5F1, L2 and 3F2; 5F1, L2 and 3F3; 5F1, L2 and 3F4; 5F1, L2 and 3F5; 5F1, L2 and 3F6; 5F1, L2 and 3F7; 5F2, L2 and 3F1; 5F2, L2 and 3F2; 5F2, L2 and 3F3; 5F2, L2 and 3F4; 5F2, L2 and 3F5; 5F2, L2 and 3F6; 5F2, L2 and 3F7; 5F3, L2 and 3F1; 5F3, L2 and 3F2; 5F3, L2 and 3F3; 5F3, L2 and 3F4; 5F3, L2 and 3F5; 5F3, L2 and 3F6; 5F3, L2 and 3F7; 5F4, L2 and 3F1; 5F4, L2 and 3F2; 5F4, L2 and 3F3; 5F4, L2 and 3F4; 5F4, L2 and 3F5; 5F4, L2 and 3F6; 5F4, L2 and 3F7; 5F5, L2 and 3F1; 5F5, L2 and 3F2; 5F5, L2 and 3F3; 5F5, L2 and 3F4; 5F5, L2 and 3F5; 5F5, L2 and 3F6; 5F5, L2 and 3F7; 5F6, L2 and 3F1; 5F6, L2 and 3F2; 5F6, L2 and 3F3; 5F6, L2 and 3F4; 5F6, L2 and 3F5; 5F6, L2 and 3F6; 5F6, L2 and 3F7; 5F7, L2 and 3F1; 5F7, L2 and 3F2; 5F7, L2 and 3F3; 5F7, L2 and 3F4; 5F7, L2 and 3F5; 5F7, L2 and 3F6; 5F7, L2 and 3F7; 5F8, L2 and 3F1; 5F8, L2 and 3F2; 5F8, L2 and 3F3; 5F8, L2 and 3F4; 5F8, L2 and 3F5; 5F8, L2 and 3F6; 5F8, L2 and 3F7; 5F9, L2 and 3F1; 5F9, L2 and 3F2; 5F9, L2 and 3F3; 5F9, L2 and 3F4; 5F9, L2 and 3F5; 5F9, L2 and 3F6; 5F9, L2 and 3F7; 5F1, L3 and 3F1; 5F1, L3 and 3F2; 5F1, L3 and 3F3; 5F1, L3 and 3F4; 5F1, L3 and 3F5; 5F1, L3 and 3F6; 5F1, L3 and 3F7; 5F2, L3 and 3F1; 5F2, L3 and 3F2; 5F2, L3 and 3F3; 5F2, L3 and 3F4; 5F2, L3 and 3F5; 5F2, L3 and 3F6; 5F2, L3 and 3F7; 5F3, L3 and 3F1; 5F3, L3 and 3F2; 5F3, L3 and 3F3; 5F3, L3 and 3F4; 5F3, L3 and 3F5; 5F3, L3 and 3F6; 5F3, L3 and 3F7; 5F4, L3 and 3F1; 5F4, L3 and 3F2; 5F4, L3 and 3F3; 5F4, L3 and 3F4; 5F4, L3 and 3F5; 5F4, L3 and 3F6; 5F4, L3 and 3F7; 5F5, L3 and 3F1; 5F5, L3 and 3F2; 5F5, L3 and 3F3; 5F5, L3 and 3F4; 5F5, L3 and 3F5; 5F5, L3 and 3F6; 5F5, L3 and 3F7; 5F6, L3 and 3F1; 5F6, L3 and 3F2; 5F6, L3 and 3F3; 5F6, L3 and 3F4; 5F6, L3 and 3F5; 5F6, L3 and 3F6; 5F6, L3 and 3F7; 5F7, L3 and 3F1; 5F7, L3 and 3F2; 5F7, L3 and 3F3; 5F7, L3 and 3F4; 5F7, L3 and 3F5; 5F7, L3 and 3F6; 5F7, L3 and 3F7; 5F8, L3 and 3F1; 5F8, L3 and 3F2; 5F8, L3 and 3F3; 5F8, L3 and 3F4; 5F8, L3 and 3F5; 5F8, L3 and 3F6; 5F8, L3 and 3F7; 5F9, L3 and 3F1; 5F9, L3 and 3F2; 5F9, L3 and 3F3; 5F9, L3 and 3F4; 5F9, L3 and 3F5; 5F9, L3 and 3F6; 5F9, L3 and 3F7; 5F1, L4 and 3F1; 5F1, L4 and 3F2; 5F1, L4 and 3F3; 5F1, L4 and 3F4; 5F1, L4 and 3F5; 5F1, L4 and 3F6; 5F1, L4 and 3F7; 5F2, L4 and 3F1; 5F2, L4 and 3F2; 5F2, L4 and 3F3; 5F2, L4 and 3F4; 5F2, L4 and 3F5; 5F2, L4 and 3F6; 5F2, L4 and 3F7; 5F3, L4 and 3F1; 5F3, L4 and 3F2; 5F3, L4 and 3F3; 5F3, L4 and 3F4; 5F3, L4 and 3F5; 5F3, L4 and 3F6; 5F3, L4 and 3F7; 5F4, L4 and 3F1; 5F4, L4 and 3F2; 5F4, L4 and 3F3; 5F4, L4 and 3F4; 5F4, L4 and 3F5; 5F4, L4 and 3F6; 5F4, L4 and 3F7; 5F5, L4 and 3F1; 5F5, L4 and 3F2; 5F5, L4 and 3F3; 5F5, L4 and 3F4; 5F5, L4 and 3F5; 5F5, L4 and 3F6; 5F5, L4 and 3F7; 5F6, L4 and 3F1; 5F6, L4 and 3F2; 5F6, L4 and 3F3; 5F6, L4 and 3F4; 5F6, L4 and 3F5; 5F6, L4 and 3F6; 5F6, L4 and 3F7; 5F7, L4 and 3F1; 5F7, L4 and 3F2; 5F7, L4 and 3F3; 5F7, L4 and 3F4; 5F7, L4 and 3F5; 5F7, L4 and 3F6; 5F7, L4 and 3F7; 5F8, L4 and 3F1; 5F8, L4 and 3F2; 5F8, L4 and 3F3; 5F8, L4 and 3F4; 5F8, L4 and 3F5; 5F8, L4 and 3F6; 5F8, L4 and 3F7; 5F9, L4 and 3F1; 5F9, L4 and 3F2; 5F9, L4 and 3F3; 5F9, L4 and 3F4; 5F9, L4 and 3F5; 5F9, L4 and 3F6; 5F9, L4 and 3F7; 5F1, L5 and 3F1; 5F1, L5 and 3F2; 5F1, L5 and 3F3; 5F1, L5 and 3F4; 5F1, L5 and 3F5; 5F1, L5 and 3F6; 5F1, L5 and 3F7; 5F2, L5 and 3F1; 5F2, L5 and 3F2; 5F2, L5 and 3F3; 5F2, L5 and 3F4; 5F2, L5 and 3F5; 5F2, L5 and 3F6; 5F2, L5 and 3F7; 5F3, L5 and 3F1; 5F3, L5 and 3F2; 5F3, L5 and 3F3; 5F3, L5 and 3F4; 5F3, L5 and 3F5; 5F3, L5 and 3F6; 5F3, L5 and 3F7; 5F4, L5 and 3F1; 5F4, L5 and 3F2; 5F4, L5 and 3F3; 5F4, L5 and 3F4; 5F4, L5 and 3F5; 5F4, L5 and 3F6; 5F4, L5 and 3F7; 5F5, L5 and 3F1; 5F5, L5 and 3F2; 5F5, L5 and 3F3; 5F5, L5 and 3F4; 5F5, L5 and 3F5; 5F5, L5 and 3F6; 5F5, L5 and 3F7; 5F6, L5 and 3F1; 5F6, L5 and 3F2; 5F6, L5 and 3F3; 5F6, L5 and 3F4; 5F6, L5 and 3F5; 5F6, L5 and 3F6; 5F6, L5 and 3F7; 5F7, L5 and 3F1; 5F7, L5 and 3F2; 5F7, L5 and 3F3; 5F7, L5 and 3F4; 5F7, L5 and 3F5; 5F7, L5 and 3F6; 5F7, L5 and 3F7; 5F8, L5 and 3F1; 5F8, L5 and 3F2; 5F8, L5 and 3F3; 5F8, L5 and 3F4; 5F8, L5 and 3F5; 5F8, L5 and 3F6; 5F8, L5 and 3F7; 5F9, L5 and 3F1; 5F9, L5 and 3F2; 5F9, L5 and 3F3; 5F9, L5 and 3F4; 5F9, L5 and 3F5; 5F9, L5 and 3F6; 5F9, L5 and 3F7; 5F1, L6 and 3F1; 5F1, L6 and 3F2; 5F1, L6 and 3F3; 5F1, L6 and 3F4; 5F1, L6 and 3F5; 5F1, L6 and 3F6; 5F1, L6 and 3F7; 5F2, L6 and 3F1; 5F2, L6 and 3F2; 5F2, L6 and 3F3; 5F2, L6 and 3F4; 5F2, L6 and 3F5; 5F2, L6 and 3F6; 5F2, L6 and 3F7; 5F3, L6 and 3F1; 5F3, L6 and 3F2; 5F3, L6 and 3F3; 5F3, L6 and 3F4; 5F3, L6 and 3F5; 5F3, L6 and 3F6; 5F3, L6 and 3F7; 5F4, L6 and 3F1; 5F4, L6 and 3F2; 5F4, L6 and 3F3; 5F4, L6 and 3F4; 5F4, L6 and 3F5; 5F4, L6 and 3F6; 5F4, L6 and 3F7; 5F5, L6 and 3F1; 5F5, L6 and 3F2; 5F5, L6 and 3F3; 5F5, L6 and 3F4; 5F5, L6 and 3F5; 5F5, L6 and 3F6; 5F5, L6 and 3F7; 5F6, L6 and 3F1; 5F6, L6 and 3F2; 5F6, L6 and 3F3; 5F6, L6 and 3F4; 5F6, L6 and 3F5; 5F6, L6 and 3F6; 5F6, L6 and 3F7; 5F7, L6 and 3F1; 5F7, L6 and 3F2; 5F7, L6 and 3F3; 5F7, L6 and 3F4; 5F7, L6 and 3F5; 5F7, L6 and 3F6; 5F7, L6 and 3F7; 5F8, L6 and 3F1; 5F8, L6 and 3F2; 5F8, L6 and 3F3; 5F8, L6 and 3F4; 5F8, L6 and 3F5; 5F8, L6 and 3F6; 5F8, L6 and 3F7; 5F9, L6 and 3F1; 5F9, L6 and 3F2; 5F9, L6 and 3F3; 5F9, L6 and 3F4; 5F9, L6 and 3F5; 5F9, L6 and 3F6; 5F9, L6 and 3F7; 5F1, L7 and 3F1; 5F1, L7 and 3F2; 5F1, L7 and 3F3; 5F1, L7 and 3F4; 5F1, L7 and 3F5; 5F1, L7 and 3F6; 5F1, L7 and 3F7; 5F2, L7 and 3F1; 5F2, L7 and 3F2; 5F2, L7 and 3F3; 5F2, L7 and 3F4; 5F2, L7 and 3F5; 5F2, L7 and 3F6; 5F2, L7 and 3F7; 5F3, L7 and 3F1; 5F3, L7 and 3F2; 5F3, L7 and 3F3; 5F3, L7 and 3F4; 5F3, L7 and 3F5; 5F3, L7 and 3F6; 5F3, L7 and 3F7; 5F4, L7 and 3F1; 5F4, L7 and 3F2; 5F4, L7 and 3F3; 5F4, L7 and 3F4; 5F4, L7 and 3F5; 5F4, L7 and 3F6; 5F4, L7 and 3F7; 5F5, L7 and 3F1; 5F5, L7 and 3F2; 5F5, L7 and 3F3; 5F5, L7 and 3F4; 5F5, L7 and 3F5; 5F5, L7 and 3F6; 5F5, L7 and 3F7; 5F6, L7 and 3F1; 5F6, L7 and 3F2; 5F6, L7 and 3F3; 5F6, L7 and 3F4; 5F6, L7 and 3F5; 5F6, L7 and 3F6; 5F6, L7 and 3F7; 5F7, L7 and 3F1; 5F7, L7 and 3F2; 5F7, L7 and 3F3; 5F7, L7 and 3F4; 5F7, L7 and 3F5; 5F7, L7 and 3F6; 5F7, L7 and 3F7; 5F8, L7 and 3F1; 5F8, L7 and 3F2; 5F8, L7 and 3F3; 5F8, L7 and 3F4; 5F8, L7 and 3F5; 5F8, L7 and 3F6; 5F8, L7 and 3F7; 5F9, L7 and 3F1; 5F9, L7 and 3F2; 5F9, L7 and 3F3; 5F9, L7 and 3F4; 5F9, L7 and 3F5; 5F9, L7 and 3F6; 5F9, L7 and 3F7; 5F1, L8 and 3F1; 5F1, L8 and 3F2; 5F1, L8 and 3F3; 5F1, L8 and 3F4; 5F1, L8 and 3F5; 5F1, L8 and 3F6; 5F1, L8 and 3F7; 5F2, L8 and 3F1; 5F2, L8 and 3F2; 5F2, L8 and 3F3; 5F2, L8 and 3F4; 5F2, L8 and 3F5; 5F2, L8 and 3F6; 5F2, L8 and 3F7; 5F3, L8 and 3F1; 5F3, L8 and 3F2; 5F3, L8 and 3F3; 5F3, L8 and 3F4; 5F3, L8 and 3F5; 5F3, L8 and 3F6; 5F3, L8 and 3F7; 5F4, L8 and 3F1; 5F4, L8 and 3F2; 5F4, L8 and 3F3; 5F4, L8 and 3F4; 5F4, L8 and 3F5; 5F4, L8 and 3F6; 5F4, L8 and 3F7; 5F5, L8 and 3F1; 5F5, L8 and 3F2; 5F5, L8 and 3F3; 5F5, L8 and 3F4; 5F5, L8 and 3F5; 5F5, L8 and 3F6; 5F5, L8 and 3F7; 5F6, L8 and 3F1; 5F6, L8 and 3F2; 5F6, L8 and 3F3; 5F6, L8 and 3F4; 5F6, L8 and 3F5; 5F6, L8 and 3F6; 5F6, L8 and 3F7; 5F7, L8 and 3F1; 5F7, L8 and 3F2; 5F7, L8 and 3F3; 5F7, L8 and 3F4; 5F7, L8 and 3F5; 5F7, L8 and 3F6; 5F7, L8 and 3F7; 5F8, L8 and 3F1; 5F8, L8 and 3F2; 5F8, L8 and 3F3; 5F8, L8 and 3F4; 5F8, L8 and 3F5; 5F8, L8 and 3F6; 5F8, L8 and 3F7; 5F9, L8 and 3F1; 5F9, L8 and 3F2; 5F9, L8 and 3F3; 5F9, L8 and 3F4; 5F9, L8 and 3F5; 5F9, L8 and 3F6; 5F9, L8 and 3F7; 5F1, L9 and 3F1; 5F1, L9 and 3F2; 5F1, L9 and 3F3; 5F1, L9 and 3F4; 5F1, L9 and 3F5; 5F1, L9 and 3F6; 5F1, L9 and 3F7; 5F2, L9 and 3F1; 5F2, L9 and 3F2; 5F2, L9 and 3F3; 5F2, L9 and 3F4; 5F2, L9 and 3F5; 5F2, L9 and 3F6; 5F2, L9 and 3F7; 5F3, L9 and 3F1; 5F3, L9 and 3F2; 5F3, L9 and 3F3; 5F3, L9 and 3F4; 5F3, L9 and 3F5; 5F3, L9 and 3F6; 5F3, L9 and 3F7; 5F4, L9 and 3F1; 5F4, L9 and 3F2; 5F4, L9 and 3F3; 5F4, L9 and 3F4; 5F4, L9 and 3F5; 5F4, L9 and 3F6; 5F4, L9 and 3F7; 5F5, L9 and 3F1; 5F5, L9 and 3F2; 5F5, L9 and 3F3; 5F5, L9 and 3F4; 5F5, L9 and 3F5; 5F5, L9 and 3F6; 5F5, L9 and 3F7; 5F6, L9 and 3F1; 5F6, L9 and 3F2; 5F6, L9 and 3F3; 5F6, L9 and 3F4; 5F6, L9 and 3F5; 5F6, L9 and 3F6; 5F6, L9 and 3F7; 5F7, L9 and 3F1; 5F7, L9 and 3F2; 5F7, L9 and 3F3; 5F7, L9 and 3F4; 5F7, L9 and 3F5; 5F7, L9 and 3F6; 5F7, L9 and 3F7; 5F8, L9 and 3F1; 5F8, L9 and 3F2; 5F8, L9 and 3F3; 5F8, L9 and 3F4; 5F8, L9 and 3F5; 5F8, L9 and 3F6; 5F8, L9 and 3F7; 5F9, L9 and 3F1; 5F9, L9 and 3F2; 5F9, L9 and 3F3; 5F9, L9 and 3F4; 5F9, L9 and 3F5; 5F9, L9 and 3F6; 5F9, L9 and 3F7; 5F1, L10 and 3F1; 5F1, L10 and 3F2; 5F1, L10 and 3F3; 5F1, L10 and 3F4; 5F1, L10 and 3F5; 5F1, L10 and 3F6; 5F1, L10 and 3F7; 5F2, L10 and 3F1; 5F2, L10 and 3F2; 5F2, L10 and 3F3; 5F2, L10 and 3F4; 5F2, L10 and 3F5; 5F2, L10 and 3F6; 5F2, L10 and 3F7; 5F3, L10 and 3F1; 5F3, L10 and 3F2; 5F3, L10 and 3F3; 5F3, L10 and 3F4; 5F3, L10 and 3F5; 5F3, L10 and 3F6; 5F3, L10 and 3F7; 5F4, L10 and 3F1; 5F4, L10 and 3F2; 5F4, L10 and 3F3; 5F4, L10 and 3F4; 5F4, L10 and 3F5; 5F4, L10 and 3F6; 5F4, L10 and 3F7; 5F5, L10 and 3F1; 5F5, L10 and 3F2; 5F5, L10 and 3F3; 5F5, L10 and 3F4; 5F5, L10 and 3F5; 5F5, L10 and 3F6; 5F5, L10 and 3F7; 5F6, L10 and 3F1; 5F6, L10 and 3F2; 5F6, L10 and 3F3; 5F6, L10 and 3F4; 5F6, L10 and 3F5; 5F6, L10 and 3F6; 5F6, L10 and 3F7; 5F7, L10 and 3F1; 5F7, L10 and 3F2; 5F7, L10 and 3F3; 5F7, L10 and 3F4; 5F7, L10 and 3F5; 5F7, L10 and 3F6; 5F7, L10 and 3F7; 5F8, L10 and 3F1; 5F8, L10 and 3F2; 5F8, L10 and 3F3; 5F8, L10 and 3F4; 5F8, L10 and 3F5; 5F8, L10 and 3F6; 5F8, L10 and 3F7; 5F9, L10 and 3F1; 5F9, L10 and 3F2; 5F9, L10 and 3F3; 5F9, L10 and 3F4; 5F9, L10 and 3F5; 5F9, L10 and 3F6; and 5F9, L10 and 3F7.

[0662] In one embodiment, the molecular scaffold may comprise at least one 5F2 5′ flanking region, at least one L1 loop motif region, and at least one 3F2 3′ flanking region.

[0663] In one embodiment, the molecular scaffold may comprise at least one 5F1 5′ flanking region, at least one L4 loop motif region, and at least one 3F1 3′ flanking region.

[0664] In one embodiment, the molecular scaffold may comprise at least one 5F7 5′ flanking region, at least one L8 loop motif region, and at least one 3F5 3′ flanking region.

[0665] In one embodiment, the molecular scaffold may comprise at least one 5F3 5′ flanking region, at least one L4 loop motif region, and at least one 3F1 3′ flanking region.

[0666] In one embodiment, the molecular scaffold may comprise at least one 5F3 5′ flanking region, at least one L5 loop motif region, and at least one 3F1 3′ flanking region.

[0667] In one embodiment, the molecular scaffold may comprise at least one 5F4 5′ flanking region, at least one L4 loop motif region, and at least one 3F4 3′ flanking region.

[0668] In one embodiment, the molecular scaffold may comprise at least one 5F3 5′ flanking region, at least one L7 loop motif region, and at least one 3F1 3′ flanking region.

[0669] In one embodiment, the molecular scaffold may comprise at least one 5F5 5′ flanking region, at least one L4 loop motif region, and at least one 3F4 3′ flanking region.

[0670] In one embodiment, the molecular scaffold may comprise at least one 5F6 5′ flanking region, at least one L4 loop motif region, and at least one 3F1 3′ flanking region.

[0671] In one embodiment, the molecular scaffold may comprise at least one 5F3 5′ flanking region, at least one L6 loop motif region, and at least one 3F1 3′ flanking region.

[0672] In one embodiment, the molecular scaffold may comprise at least one 5F7 5′ flanking region, at least one L4 loop motif region, and at least one 3F5 3′ flanking region.

[0673] In one embodiment, the molecular scaffold may comprise at least one 5F2 5′ flanking region, at least one L2 loop motif region, and at least one 3F2 3′ flanking region.

[0674] In one embodiment, the molecular scaffold may comprise at least one 5F2 5′ flanking region, at least one L1 loop motif region, and at least one 3F3 3′ flanking region.

[0675] In one embodiment, the molecular scaffold may comprise at least one 5F3 5′ flanking region, at least one L5 loop motif region, and at least one 3F4 3′ flanking region.

[0676] In one embodiment, the molecular scaffold may comprise at least one 5F1 5′ flanking region, at least one L1 loop motif region, and at least one 3F1 3′ flanking region.

[0677] In one embodiment, the molecular scaffold may comprise at least one 5F1 5′ flanking region, at least one L2 loop motif region, and at least one 3F1 3′ flanking region.

[0678] In one embodiment, the molecular scaffold may comprise at least one 5F1 5′ flanking region, at least one L1 loop motif region, and at least one 3F2 3′ flanking region.

[0679] In one embodiment, the molecular scaffold may comprise at least one 5F2 5′ flanking region, at least one L3 loop motif region, and at least one 3F3 3′ flanking region.

[0680] In one embodiment, the molecular scaffold may be a natural pri-miRNA scaffold. As a non-limiting example, the molecular scaffold may be a scaffold derived from the human miR155 scaffold.

[0681] In one embodiment, the molecular scaffold may comprise one or more linkers known in the art. The linkers may separate regions or one molecular scaffold from another. As a non-limiting example, the molecular scaffold may be polycistronic.

Modulatory Polynucleotide Comprising Molecular Scaffold and siRNA Molecules Targeting HTT

[0682] In one embodiment, the modulatory polynucleotide may comprise 5′ and 3′ flanking regions, loop motif region, and nucleic acid sequences encoding sense sequence and antisense sequence as described in Tables 13 and 14. In Tables 13 and 14, the DNA sequence identifier for the passenger and guide strands are described as well as the 5′ and 3′ Flanking Regions and the Loop region (also referred to as the linker region). In Tables 13 and 14, the “miR” component of the name of the sequence does not necessarily correspond to the sequence numbering of miRNA genes (e.g., VOYHTmiR-102 is the name of the sequence and does not necessarily mean that miR-102 is part of the sequence).

TABLE 13
HTT Modulatory Polynucleotide Sequence Regions (5′ to 3′)

| Modulatory | 5′ Flanking to | 5′ | | | | 3′ |
|---|---|---|---|---|---|---|
| Polynucleotide | 3′ Flanking | Flanking | Passenger | Loop | uide | Flanking |
| Construct Name | SEQ ID NO | SEQ ID NO | SEQ ID NO | SEQ ID NO | SEQ ID NO | SEQ ID NO |
| VOYHTmiR-102.214 | 1523 | 1504 | 1636 | 1511 | 677 | 1518 |
| VOYHTmiR-104.214 | 1524 | 1504 | 1643 | 1511 | 677 | 1518 |
| VOYHTmiR-109.214 | 1525 | 1504 | 1650 | 1512 | 677 | 1518 |
| VOYHTmiR-114.214 | 1526 | 1504 | 1657 | 1511 | 677 | 1519 |
| VOYHTmiR-116.214 | 1527 | 1504 | 1650 | 1511 | 677 | 1519 |
| VOYHTmiR-127.214 | 1528 | 1505 | 1650 | 1513 | 674 | 1520 |
| VOYHTmiR-102.218 | 1529 | 1504 | 1637 | 1511 | 678 | 1518 |
| VOYHTmiR-104.218 | 1530 | 1504 | 1644 | 1511 | 678 | 1518 |
| VOYHTmiR-109.218 | 1531 | 1504 | 1651 | 1512 | 678 | 1518 |
| VOYHTmiR-114.218 | 1532 | 1504 | 1658 | 1511 | 678 | 1519 |
| VOYHTmiR-116.218 | 1533 | 1504 | 1651 | 1511 | 678 | 1519 |
| VOYHTmiR-127.218 | 1534 | 1505 | 1651 | 1513 | 678 | 1520 |
| VOYHTmiR-102.219.o | 1535 | 1504 | 1620 | 1511 | 673 | 1518 |
| VOYHTmiR-104.219.o | 1536 | 1504 | 1623 | 1511 | 673 | 1518 |
| VOYHTmiR-109.219.o | 1537 | 1504 | 1620 | 1512 | 673 | 1518 |
| VOYHTmiR-114.219 | 1538 | 1504 | 1626 | 1511 | 673 | 1519 |
| VOYHTmiR-116.219.o | 1539 | 1504 | 1629 | 1511 | 673 | 1519 |
| VOYHTmiR-127.219.o | 1540 | 1505 | 1620 | 1513 | 673 | 1520 |
| VOYHTmiR-102.219.n | 1541 | 1504 | 1632 | 1511 | 673 | 1518 |
| VOYHTmiR-104.219.n | 1542 | 1504 | 1633 | 1511 | 673 | 1518 |
| VOYHTmiR-109.219.n | 1543 | 1504 | 1632 | 1512 | 673 | 1518 |
| VOYHTmiR-116.219.n | 1544 | 1504 | 1634 | 1511 | 673 | 1519 |
| VOYHTmiR-127.219.n | 1545 | 1505 | 1632 | 1513 | 673 | 1520 |
| VOYHTmiR-102.257 | 1546 | 1504 | 1638 | 1511 | 679 | 1518 |
| VOYHTmiR-104.257 | 1547 | 1504 | 1645 | 1511 | 679 | 1518 |
| VOYHTmiR-109.257 | 1548 | 1504 | 1652 | 1512 | 679 | 1518 |
| VOYHTmiR-114.257 | 1549 | 1504 | 1659 | 1511 | 679 | 1519 |
| VOYHTmiR-116.257 | 1550 | 1504 | 1652 | 1511 | 679 | 1519 |
| VOYHTmiR-127.257 | 1551 | 1505 | 1652 | 1513 | 679 | 1520 |
| VOYHTmiR-102.894 | 1552 | 1504 | 1621 | 1511 | 674 | 1518 |
| VOYHTmiR-104.894 | 1553 | 1504 | 1624 | 1511 | 674 | 1518 |
| VOYHTmiR-109.894 | 1554 | 1504 | 1621 | 1512 | 674 | 1518 |
| VOYHTmiR-114.894 | 1555 | 1504 | 1627 | 1511 | 674 | 1519 |
| VOYHTmiR-116.894 | 1556 | 1504 | 1630 | 1511 | 674 | 1519 |
| VOYHTmiR-127.894 | 1557 | 1505 | 1621 | 1513 | 674 | 1520 |
| VOYHTmiR-102.907 | 1558 | 1504 | 1641 | 1511 | 682 | 1518 |
| VOYHTmiR-104.907 | 1559 | 1504 | 1648 | 1511 | 682 | 1518 |
| VOYHTmiR-109.907 | 1560 | 1504 | 1655 | 1512 | 682 | 1518 |
| VOYHTmiR-114.907 | 1561 | 1504 | 1662 | 1511 | 682 | 1519 |
| VOYHTmiR-116.907 | 1562 | 1504 | 1655 | 1511 | 682 | 1519 |
| VOYHTmiR-127.907 | 1563 | 1505 | 1655 | 1513 | 682 | 1520 |
| VOYHTmiR-102.372 | 1564 | 1504 | 1639 | 1511 | 680 | 1518 |
| VOYHTmiR-104.372 | 1565 | 1504 | 1646 | 1511 | 680 | 1518 |
| VOYHTmiR-109.372 | 1566 | 1504 | 1653 | 1512 | 680 | 1518 |
| VOYHTmiR-114.372 | 1567 | 1504 | 1660 | 1511 | 680 | 1519 |
| VOYHTmiR-116.372 | 1568 | 1504 | 1653 | 1511 | 680 | 1519 |
| VOYHTmiR-127.372 | 1569 | 1505 | 1653 | 1513 | 680 | 1520 |
| VOYHTmiR-102.425 | 1570 | 1504 | 1640 | 1511 | 681 | 1518 |
| VOYHTmiR-104.425 | 1571 | 1504 | 1647 | 1511 | 681 | 1518 |
| VOYHTmiR-109.425 | 1572 | 1504 | 1654 | 1512 | 681 | 1518 |
| VOYHTmiR-114.425 | 1573 | 1504 | 1661 | 1511 | 681 | 1519 |
| VOYHTmiR-116.425 | 1574 | 1504 | 1654 | 1511 | 681 | 1519 |
| VOYHTmiR-127.425 | 1575 | 1505 | 1654 | 1513 | 681 | 1520 |
| VOYHTmiR-102.032 | 1576 | 1504 | 1664 | 1511 | 684 | 1518 |
| VOYHTmiR-104.032 | 1577 | 1504 | 1666 | 1511 | 684 | 1518 |
| VOYHTmiR-109.032 | 1578 | 1504 | 1668 | 1512 | 684 | 1518 |
| VOYHTmiR-114.032 | 1579 | 1504 | 1670 | 1511 | 684 | 1519 |
| VOYHTmiR-116.032 | 1580 | 1504 | 1668 | 1511 | 684 | 1519 |
| VOYHTmiR-127.032 | 1581 | 1505 | 1668 | 1513 | 684 | 1520 |
| VOYHTmiR-102.020 | 1582 | 1504 | 1663 | 1511 | 683 | 1518 |
| VOYHTmiR-104.020 | 1583 | 1504 | 1665 | 1511 | 683 | 1518 |
| VOYHTmiR-109.020 | 1584 | 1504 | 1667 | 1512 | 683 | 1518 |
| VOYHTmiR-114.020 | 1585 | 1504 | 1669 | 1511 | 683 | 1519 |
| VOYHTmiR-116.020 | 1586 | 1504 | 1667 | 1511 | 683 | 1519 |
| VOYHTmiR-127.020 | 1587 | 1505 | 1667 | 1513 | 683 | 1520 |
| VOYHTmiR-102.016 | 1588 | 1504 | 1635 | 1511 | 676 | 1518 |
| VOYHTmiR-104.016 | 1589 | 1504 | 1642 | 1511 | 676 | 1518 |
| VOYHTmiR-109.016 | 1590 | 1504 | 1649 | 1512 | 676 | 1518 |
| VOYHTmiR-114.016 | 1591 | 1504 | 1656 | 1511 | 676 | 1519 |
| VOYHTmiR-116.016 | 1592 | 1504 | 1649 | 1511 | 676 | 1519 |
| VOYHTmiR-127.016 | 1593 | 1505 | 1649 | 1513 | 676 | 1520 |
| VOYHTmiR-102.579 | 1594 | 1504 | 1622 | 1511 | 675 | 1518 |
| VOYHTmiR-104.579 | 1595 | 1504 | 1625 | 1511 | 675 | 1518 |
| VOYHTmiR-109.579 | 1596 | 1504 | 1622 | 1512 | 675 | 1518 |
| VOYHTmiR-114.579 | 1597 | 1504 | 1628 | 1511 | 675 | 1519 |
| VOYHTmiR-116.579 | 1598 | 1504 | 1631 | 1511 | 675 | 1519 |
| VOYHTmiR-127.579 | 1599 | 1505 | 1622 | 1513 | 675 | 1520 |
| VOYHTmiR-104.579.1 | 1600 | 1504 | 1671 | 1514 | 675 | 1518 |
| VOYHTmiR-104.579.2 | 1601 | 1503 | 1671 | 1514 | 675 | 1518 |
| VOYHTmiR-104.579.3 | 1602 | 1503 | 1671 | 1510 | 675 | 1518 |
| VOYHTmiR-104.579.4 | 1603 | 1506 | 1671 | 1514 | 675 | 1521 |
| VOYHTmiR-104.579.6 | 1604 | 1507 | 1671 | 1514 | 675 | 1521 |
| VOYHTmiR-104.579.7 | 1605 | 1508 | 1671 | 1514 | 685 | 1518 |
| VOYHTmiR-104.579.8 | 1606 | 1503 | 1672 | 1515 | 675 | 1518 |
| VOYHTmiR-104.579.9 | 1607 | 1509 | 1671 | 1514 | 675 | 1522 |
| VOYHTmiR-102.020 | 1608 | 1504 | 1663 | 1511 | 683 | 1518 |
| VOYHTmiR-102.032 | 1609 | 1504 | 1664 | 1511 | 684 | 1518 |
| VOYHTmiR-104.020 | 1610 | 1504 | 1665 | 1511 | 683 | 1518 |
| VOYHTmiR-104.032 | 1611 | 1504 | 1666 | 1511 | 684 | 1518 |
| VOYHTmiR-109.020 | 1612 | 1504 | 1667 | 1512 | 683 | 1518 |
| VOYHTmiR-109.032 | 1613 | 1504 | 1668 | 1512 | 684 | 1518 |
| VOYHTmiR-114.020 | 1614 | 1504 | 1669 | 1511 | 683 | 1519 |
| VOYHTmiR-114.032 | 1615 | 1504 | 1670 | 1511 | 684 | 1519 |
| VOYHTmiR-116.020 | 1616 | 1504 | 1667 | 1511 | 683 | 1519 |
| VOYHTmiR-116.032 | 1617 | 1504 | 1668 | 1511 | 684 | 1519 |
| VOYHTmiR-127.020 | 1618 | 1505 | 1667 | 1513 | 683 | 1520 |
| VOYHTmiR-127.032 | 1619 | 1505 | 1668 | 1513 | 684 | 1520 |

TABLE 14
HTT Modulatory Polynucleotide Sequence Region (5′ to 3′)

| | 5′ Flanking to | 5′ | | | | 3′ |
|---|---|---|---|---|---|---|
| | 3′ Flanking | Flanking | Passenger | Loop | Guide | Flanking |
| Name | SEQ ID NO | SEQ ID NO | SEQ ID NO | SEQ ID NO | SEQ ID NO | SEQ ID NO |
| VOYHTmiR-104.579.5 | 1686 | 1503 | 1688 | 1516 | 1690 | 1518 |
| VOYHTmiR-104.579.10 | 1687 | 1509 | 1689 | 1517 | 1691 | 1532 |

Modulatory Polynucleotide Comprising Molecular Scaffold and siRNA Molecules Targeting SOD1

[0683] In one embodiment, the modulatory polynucleotide may comprise 5′ and 3′ flanking regions, loop motif region, and nucleic acid sequences encoding sense sequence and antisense sequence as described in Tables 15 and 16. In Tables 15 and 16, the DNA sequence identifier for the passenger and guide strands are described as well as the 5′ and 3′ Flanking Regions and the Loop region (also referred to as the linker region). In Tables 15 and 16, the “miR” component of the name of the sequence does not necessarily correspond to the sequence numbering of miRNA genes (e.g., VOYSOD1miR-102 is the name of the sequence and does not necessarily mean that miR-102 is part of the sequence).

TABLE 15
SOD1 Modulatory Polynucleotide Sequence Regions (5′ to 3′)

| Modulatory | 5′ Flanking to | 5′ | | | | 3′ |
|---|---|---|---|---|---|---|
| Polynucleotide | 3′ Flanking | Flanking | Passenger | Loop | uide | Flanking |
| Construct Name | SEQ ID NO | SEQ ID NO | SEQ ID NO | SEQ ID NO | SEQ ID NO | SEQ ID NO |
| VOYSOD1miR-101 | 1696 | 1692 | 1746 | 1510 | 747 | 1695 |
| VOYSOD1miR-102 | 1697 | 1503 | 1746 | 1510 | 747 | 1518 |
| VOYSOD1miR-103 | 1698 | 1503 | 1748 | 1510 | 747 | 1518 |
| VOYSOD1miR-104 | 1699 | 1503 | 1749 | 1510 | 747 | 1518 |
| VOYSOD1miR-105 | 1700 | 1503 | 1750 | 1510 | 747 | 1518 |
| VOYSOD1miR-106 | 1701 | 1503 | 1751 | 1510 | 747 | 1518 |
| VOYSOD1miR-107 | 1702 | 1503 | 1752 | 1510 | 747 | 1518 |
| VOYSOD1miR-108 | 1703 | 1503 | 1754 | 1510 | 747 | 1518 |
| VOYSOD1miR-109 | 1704 | 1503 | 1746 | 1511 | 747 | 1518 |
| VOYSOD1miR-110 | 1705 | 1503 | 1746 | 1693 | 747 | 1518 |
| VOYSOD1miR-111 | 1706 | 1503 | 1753 | 1694 | 747 | 1518 |
| VOYSOD1miR-112 | 1707 | 1503 | 1746 | 1510 | 747 | 1519 |
| VOYSOD1miR-113 | 1708 | 1503 | 1748 | 1510 | 747 | 1519 |
| VOYSOD1miR-114 | 1709 | 1503 | 1751 | 1510 | 747 | 1519 |
| VOYSOD1miR-115 | 1710 | 1503 | 1753 | 1694 | 747 | 1519 |
| VOYSOD1miR-116 | 1711 | 1503 | 1749 | 1510 | 747 | 1519 |
| VOYSOD1miR-117 | 1712 | 1503 | 1755 | 1510 | 756 | 1518 |
| VOYSOD1miR-118 | 1713 | 1503 | 1757 | 1510 | 758 | 1518 |
| VOYSOD1miR-119 | 1714 | 1503 | 1759 | 1510 | 760 | 1518 |
| VOYSOD1miR-127 | 1715 | 1504 | 1746 | 1512 | 747 | 1520 |
| VOYSOD1miR-102.860 | 1716 | 1503 | 1761 | 1510 | 762 | 1518 |
| VOYSOD1miR-102.861 | 1717 | 1503 | 1763 | 1510 | 764 | 1518 |
| VOYSOD1miR-102.866 | 1718 | 1503 | 1765 | 1510 | 760 | 1518 |
| VOYSOD1miR-102.870 | 1719 | 1503 | 1766 | 1510 | 767 | 1518 |
| VOYSOD1miR-102.823 | 1720 | 1503 | 1768 | 1510 | 758 | 1518 |
| VOYSOD1miR-104.860 | 1721 | 1503 | 1769 | 1510 | 762 | 1518 |
| VOYSOD1miR-104.861 | 1722 | 1503 | 1770 | 1510 | 764 | 1518 |
| VOYSOD1miR-104.866 | 1723 | 1503 | 1771 | 1510 | 760 | 1518 |
| VOYSOD1miR-104.870 | 1724 | 1503 | 1772 | 1510 | 767 | 1518 |
| VOYSOD1miR-104.823 | 1725 | 1503 | 1773 | 1510 | 758 | 1518 |
| VOYSOD1miR-109.860 | 1726 | 1503 | 1761 | 1511 | 762 | 1518 |
| VOYSOD1miR-104.861 | 1727 | 1503 | 1763 | 1511 | 764 | 1518 |
| VOYSOD1miR-104.866 | 1728 | 1503 | 1765 | 1511 | 760 | 1518 |
| VOYSOD1miR-109.870 | 1729 | 1503 | 1766 | 1511 | 767 | 1518 |
| VOYSOD1miR-109.823 | 1730 | 1503 | 1768 | 1511 | 758 | 1518 |
| VOYSOD1miR-114.860 | 1731 | 1503 | 1774 | 1510 | 762 | 1519 |
| VOYSOD1miR-114.861 | 1732 | 1503 | 1775 | 1510 | 764 | 1519 |
| VOYSOD1miR-114.866 | 1733 | 1503 | 1776 | 1510 | 760 | 1519 |
| VOYSOD1miR-114.870 | 1734 | 1503 | 1777 | 1510 | 767 | 1519 |
| VOYSOD1miR-114.823 | 1735 | 1503 | 1778 | 1510 | 758 | 1519 |
| VOYSOD1miR-116.860 | 1736 | 1503 | 1769 | 1510 | 762 | 1519 |
| VOYSOD1miR-116.861 | 1737 | 1503 | 1770 | 1510 | 764 | 1519 |
| VOYSOD1miR-116.866 | 1738 | 1503 | 1779 | 1510 | 760 | 1519 |
| VOYSOD1miR-116.870 | 1739 | 1503 | 1772 | 1510 | 767 | 1519 |
| VOYSOD1miR-116.823 | 1740 | 1503 | 1773 | 1510 | 758 | 1519 |
| VOYSOD1miR-127.860 | 1741 | 1504 | 1780 | 1512 | 762 | 1520 |
| VOYSOD1miR-127.861 | 1742 | 1504 | 1763 | 1512 | 764 | 1520 |
| VOYSOD1miR-127.866 | 1743 | 1504 | 1765 | 1512 | 760 | 1520 |
| VOYSOD1miR-127.870 | 1744 | 1504 | 1766 | 1512 | 767 | 1520 |
| VOYSOD1miR-127.823 | 1745 | 1504 | 1781 | 1512 | 758 | 1520 |

TABLE 16
SOD1 Modulatory Polynucleotide Sequence Region (5′ to 3′)

| | 5′ Flanking to | 5′ | | | | 3′ |
|---|---|---|---|---|---|---|
| | 3′ Flanking | Flanking | Passenger | Loop | Guide | Flanking |
| Name | SEQ ID NO | SEQ ID NO | SEQ ID NO | SEQ ID NO | SEQ ID NO | SEQ ID NO |
| VOYSOD1miR-120 | 1784 | 1782 | 1785 | 1511 | 1786 | 1783 |

### AAV Particles Comprising Modulatory Polynucleotides

[0684] In one embodiment, the AAV particle comprises a viral genome with a payload region comprising a modulatory polynucleotide sequences. In such an embodiment, a viral genome encoding more than one polypeptide may be replicated and packaged into a viral particle. A target cell transduced with a viral particle comprising a modulatory polynucleotide may express the encoded sense and/or antisense sequences in a single cell.

[0685] In some embodiments, the AAV particles are useful in the field of medicine for the treatment, prophylaxis, palliation or amelioration of neurological diseases and/or disorders.

[0686] In one embodiment, the AAV particles comprising modulatory polynucleotide sequence which comprises a nucleic acid sequence encoding at least one siRNA molecule may be introduced into mammalian cells.

[0687] Where the AAV particle payload region comprises a modulatory polynucleotide, the modulatory polynucleotide may comprise sense and/or antisense sequences to knock down a target gene. The AAV viral genomes encoding modulatory polynucleotides described herein may be useful in the fields of human disease, viruses, infections veterinary applications and a variety of in vivo and in vitro settings.

[0688] In one embodiment, the AAV particle viral genome may comprise at least one inverted terminal repeat (ITR) region. The ITR region(s) may, independently, have a length such as, but not limited to, 75, 76, 77, 78, 79, 80, 81, 82, 83, 84, 85, 86, 87, 88, 89, 90, 91, 92, 93, 94, 95, 96, 97, 98, 99, 100, 101, 102, 103, 104, 105, 106, 107, 108, 109, 110, 111, 112, 113, 114, 115, 116, 117, 118, 119, 120, 121, 122, 123, 124, 125, 126, 127, 128, 129, 130, 131, 132, 133, 134, 135, 136, 137, 138, 139, 140, 141, 142, 143, 144, 145, 146, 147, 148, 149, 150, 151, 152, 153, 154, 155, 156, 157, 158, 159, 160, 161, 162, 163, 164, 165, 166, 167, 168, 169, 170, 171, 172, 173, 174, and 175 nucleotides. The length of the ITR region for the viral genome may be 75-80, 75-85, 75-100, 80-85, 80-90, 80-105, 85-90, 85-95, 85-110, 90-95, 90-100, 90-115, 95-100, 95-105, 95-120, 100-105, 100-110, 100-125, 105-110, 105-115, 105-130, 110-115, 110-120, 110-135, 115-120, 115-125, 115-140, 120-125, 120-130, 120-145, 125-130, 125-135, 125-150, 130-135, 130-140, 130-155, 135-140, 135-145, 135-160, 140-145, 140-150, 140-165, 145-150, 145-155, 145-170, 150-155, 150-160, 150-175, 155-160, 155-165, 160-165, 160-170, 165-170, 165-175, and 170-175 nucleotides. As a non-limiting example, the viral genome comprises an ITR that is about 105 nucleotides in length. As a non-limiting example, the viral genome comprises an ITR that is about 141 nucleotides in length. As a non-limiting example, the viral genome comprises an ITR that is about 130 nucleotides in length.

[0689] In one embodiment, the AAV particle viral genome may comprises two inverted terminal repeat (ITR) regions. Each of the ITR regions may independently have a length such as, but not limited to, 75, 76, 77, 78, 79, 80, 81, 82, 83, 84, 85, 86, 87, 88, 89, 90, 91, 92, 93, 94, 95, 96, 97, 98, 99, 100, 101, 102, 103, 104, 105, 106, 107, 108, 109, 110, 111, 112, 113, 114, 115, 116, 117, 118, 119, 120, 121, 122, 123, 124, 125, 126, 127, 128, 129, 130, 131, 132, 133, 134, 135, 136, 137, 138, 139, 140, 141, 142, 143, 144, 145, 146, 147, 148, 149, 150, 151, 152, 153, 154, 155, 156, 157, 158, 159, 160, 161, 162, 163, 164, 165, 166, 167, 168, 169, 170, 171, 172, 173, 174, and 175 nucleotides. The length of the ITR regions for the viral genome may be 75-80, 75-85, 75-100, 80-85, 80-90, 80-105, 85-90, 85-95, 85-110, 90-95, 90-100, 90-115, 95-100, 95-105, 95-120, 100-105, 100-110, 100-125, 105-110, 105-115, 105-130, 110-115, 110-120, 110-135, 115-120, 115-125, 115-140, 120-125, 120-130, 120-145, 125-130, 125-135, 125-150, 130-135, 130-140, 130-155, 135-140, 135-145, 135-160, 140-145, 140-150, 140-165, 145-150, 145-155, 145-170, 150-155, 150-160, 150-175, 155-160, 155-165, 160-165, 160-170, 165-170, 165-175, and 170-175 nucleotides. As a non-limiting example, the viral genome comprises an ITR that is about 105 nucleotides in length and 141 nucleotides in length. As a non-limiting example, the viral genome comprises an ITR that is about 105 nucleotides in length and 130 nucleotides in length. As a non-limiting example, the viral genome comprises an ITR that is about 130 nucleotides in length and 141 nucleotides in length.

[0690] In one embodiment, the AAV particle viral genome may comprise at least one sequence region as described in Tables 17-24. The regions may be located before or after any of the other sequence regions described herein.

[0691] In one embodiment, the AAV particle viral genome comprises at least one inverted terminal repeat (ITR) sequence region. Non-limiting examples of ITR sequence regions are described in Table 17.

TABLE 17
Inverted Terminal Repeat (ITR) Sequence Regions

| Sequence Region Name | SEQ ID NO |
|---|---|
| ITR1 | 1787 |
| ITR2 | 1788 |
| ITR3 | 1789 |
| ITR4 | 1790 |

[0692] In one embodiment, the AAV particle viral genome comprises two ITR sequence regions. In one embodiment, the ITR sequence regions are the ITR1 sequence region and the ITR3 sequence region. In one embodiment, the ITR sequence regions are the ITR1 sequence region and the ITR4 sequence region. In one embodiment, the ITR sequence regions are the ITR2 sequence region and the ITR3 sequence region. In one embodiment, the ITR sequence regions are the ITR2 sequence region and the ITR4 sequence region.

[0693] In one embodiment, the AAV particle viral genome may comprise at least one multiple cloning site (MCS) sequence region. The MCS region(s) may, independently, have a length such as, but not limited to, 2, 3, 4, 5, 6, 7, 8, 9, 10, 11, 12, 13, 14, 15, 16, 17, 18, 19, 20, 21, 22, 23, 24, 25, 26, 27, 28, 29, 30, 31, 32, 33, 34, 35, 36, 37, 38, 39, 40, 41, 42, 43, 44, 45, 46, 47, 48, 49, 50, 51, 52, 53, 54, 55, 56, 57, 58, 59, 60, 61, 62, 63, 64, 65, 66, 67, 68, 69, 70, 71, 72, 73, 74, 75, 76, 77, 78, 79, 80, 81, 82, 83, 84, 85, 86, 87, 88, 89, 90, 91, 92, 93, 94, 95, 96, 97, 98, 99, 100, 101, 102, 103, 104, 105, 106, 107, 108, 109, 110, 111, 112, 113, 114, 115, 116, 117, 118, 119, 120, 121, 122, 123, 124, 125, 126, 127, 128, 129, 130, 131, 132, 133, 134, 135, 136, 137, 138, 139, 140, 141, 142, 143, 144, 145, 146, 147, 148, 149, and 150 nucleotides. The length of the MCS region for the viral genome may be 2-10, 5-10, 5-15, 10-20, 10-30, 10-40, 15-20, 15-25, 20-30, 20-40, 20-50, 25-30, 25-35, 30-40, 30-50, 30-60, 35-40, 35-45, 40-50, 40-60, 40-70, 45-50, 45-55, 50-60, 50-70, 50-80, 55-60, 55-65, 60-70, 60-80, 60-90, 65-70, 65-75, 70-80, 70-90, 70-100, 75-80, 75-85, 80-90, 80-100, 80-110, 85-90, 85-95, 90-100, 90-110, 90-120, 95-100, 95-105, 100-110, 100-120, 100-130, 105-110, 105-115, 110-120, 110-130, 110-140, 115-120, 115-125, 120-130, 120-140, 120-150, 125-130, 125-135, 130-140, 130-150, 135-140, 135-145, 140-150, and 145-150 nucleotides. As a non-limiting example, the viral genome comprises a MCS region that is about 5 nucleotides in length. As a non-limiting example, the viral genome comprises a MCS region that is about 10 nucleotides in length. As a non-limiting example, the viral genome comprises a MCS region that is about 14 nucleotides in length. As a non-limiting example, the viral genome comprises a MCS region that is about 18 nucleotides in length. As a non-limiting example, the viral genome comprises a MCS region that is about 73 nucleotides in length. As a non-limiting example, the viral genome comprises a MCS region that is about 121 nucleotides in length.

[0694] In one embodiment, the AAV particle viral genome comprises at least one multiple cloning site (MCS) sequence regions. Non-limiting examples of MCS sequence regions are described in Table 18.

TABLE 18
Multiple Cloning Site (MCS) Sequence Regions

| Sequence Region Name | SEQ ID NO or Sequence |
|---|---|
| MCS1 | 1791 |
| MCS2 | 1792 |
| MCS3 | 1793 |
| MCS4 | 1794 |
| MCS5 | TCGAG |
| MCS6 | 1795 |

[0695] In one embodiment, the AAV particle viral genome comprises one MCS sequence region. In one embodiment, the MCS sequence region is the MCS1 sequence region. In one embodiment, the MCS sequence region is the MCS2 sequence region. In one embodiment, the MCS sequence region is the MCS3 sequence region. In one embodiment, the MCS sequence region is the MCS4 sequence region. In one embodiment, the MCS sequence region is the MCS5 sequence region. In one embodiment, the MCS sequence region is the MCS6 sequence region.

[0696] In one embodiment, the AAV particle viral genome comprises two MCS sequence regions. In one embodiment, the two MCS sequence regions are the MCS1 sequence region and the MCS2 sequence region. In one embodiment, the two MCS sequence regions are the MCS1 sequence region and the MCS3 sequence region. In one embodiment, the two MCS sequence regions are the MCS1 sequence region and the MCS4 sequence region. In one embodiment, the two MCS sequence regions are the MCS1 sequence region and the MCS5 sequence region. In one embodiment, the two MCS sequence regions are the MCS1 sequence region and the MCS6 sequence region. In one embodiment, the two MCS sequence regions are the MCS2 sequence region and the MCS3 sequence region. In one embodiment, the two MCS sequence regions are the MCS2 sequence region and the MCS4 sequence region. In one embodiment, the two MCS sequence regions are the MCS2 sequence region and the MCS5 sequence region. In one embodiment, the two MCS sequence regions are the MCS2 sequence region and the MCS6 sequence region. In one embodiment, the two MCS sequence regions are the MCS3 sequence region and the MCS4 sequence region. In one embodiment, the two MCS sequence regions are the MCS3 sequence region and the MCS5 sequence region. In one embodiment, the two MCS sequence regions are the MCS3 sequence region and the MCS6 sequence region. In one embodiment, the two MCS sequence regions are the MCS4 sequence region and the MCS5 sequence region. In one embodiment, the two MCS sequence regions are the MCS4 sequence region and the MCS6 sequence region. In one embodiment, the two MCS sequence regions are the MCS5 sequence region and the MCS6 sequence region.

[0697] In one embodiment, the AAV particle viral genome comprises two or more MCS sequence regions.

[0698] In one embodiment, the AAV particle viral genome comprises three MCS sequence regions. In one embodiment, the three MCS sequence regions are the MCS1 sequence region, the MCS2 sequence region, and the MCS3 sequence region. In one embodiment, the three MCS sequence regions are the MCS1 sequence region, the MCS2 sequence region, and the MCS4 sequence region. In one embodiment, the three MCS sequence regions are the MCS1 sequence region, the MCS2 sequence region, and the MCS5 sequence region. In one embodiment, the three MCS sequence regions are the MCS1 sequence region, the MCS2 sequence region, and the MCS6 sequence region. In one embodiment, the three MCS sequence regions are the MCS1 sequence region, the MCS3 sequence region, and the MCS4 sequence region. In one embodiment, the three MCS sequence regions are the MCS1 sequence region, the MCS3 sequence region, and the MCS5 sequence region. In one embodiment, the three MCS sequence regions are the MCS1 sequence region, the MCS3 sequence region, and the MCS6 sequence region. In one embodiment, the three MCS sequence regions are the MCS1 sequence region, the MCS4 sequence region, and the MCS5 sequence region. In one embodiment, the three MCS sequence regions are the MCS1 sequence region, the MCS4 sequence region, and the MCS6 sequence region. In one embodiment, the three MCS sequence regions are the MCS1 sequence region, the MCS5 sequence region, and the MCS6 sequence region. In one embodiment, the three MCS sequence regions are the MCS2 sequence region, the MCS3 sequence region, and the MCS4 sequence region. In one embodiment, the three MCS sequence regions are the MCS2 sequence region, the MCS3 sequence region, and the MCS5 sequence region. In one embodiment, the three MCS sequence regions are the MCS2 sequence region, the MCS3 sequence region, and the MCS6 sequence region. In one embodiment, the three MCS sequence regions are the MCS2 sequence region, the MCS4 sequence region, and the MCS5 sequence region. In one embodiment, the three MCS sequence regions are the MCS2 sequence region, the MCS4 sequence region, and the MCS6 sequence region. In one embodiment, the three MCS sequence regions are the MCS2 sequence region, the MCS5 sequence region, and the MCS6 sequence region. In one embodiment, the three MCS sequence regions are the MCS3 sequence region, the MCS4 sequence region, and the MCS5 sequence region. In one embodiment, the three MCS sequence regions are the MCS3 sequence region, the MCS4 sequence region, and the MCS6 sequence region. In one embodiment, the three MCS sequence regions are the MCS3 sequence region, the MCS5 sequence region, and the MCS6 sequence region. In one embodiment, the three MCS sequence regions are the MCS4 sequence region, the MCS5 sequence region, and the MCS6 sequence region.

[0699] In one embodiment, the AAV particle viral genome may comprise at least one multiple filler sequence region. The filler region(s) may, independently, have a length such as, but not limited to, 50, 51, 52, 53, 54, 55, 56, 57, 58, 59, 60, 61, 62, 63, 64, 65, 66, 67, 68, 69, 70, 71, 72, 73, 74, 75, 76, 77, 78, 79, 80, 81, 82, 83, 84, 85, 86, 87, 88, 89, 90, 91, 92, 93, 94, 95, 96, 97, 98, 99, 100, 101, 102, 103, 104, 105, 106, 107, 108, 109, 110, 111, 112, 113, 114, 115, 116, 117, 118, 119, 120, 121, 122, 123, 124, 125, 126, 127, 128, 129, 130, 131, 132, 133, 134, 135, 136, 137, 138, 139, 140, 141, 142, 143, 144, 145, 146, 147, 148, 149, 150, 151, 152, 153, 154, 155, 156, 157, 158, 159, 160, 161, 162, 163, 164, 165, 166, 167, 168, 169, 170, 171, 172, 173, 174, 175, 176, 177, 178, 179, 180, 181, 182, 183, 184, 185, 186, 187, 188, 189, 190, 191, 192, 193, 194, 195, 196, 197, 198, 199, 200, 201, 202, 203, 204, 205, 206, 207, 208, 209, 210, 211, 212, 213, 214, 215, 216, 217, 218, 219, 220, 221, 222, 223, 224, 225, 226, 227, 228, 229, 230, 231, 232, 233, 234, 235, 236, 237, 238, 239, 240, 241, 242, 243, 244, 245, 246, 247, 248, 249, 250, 251, 252, 253, 254, 255, 256, 257, 258, 259, 260, 261, 262, 263, 264, 265, 266, 267, 268, 269, 270, 271, 272, 273, 274, 275, 276, 277, 278, 279, 280, 281, 282, 283, 284, 285, 286, 287, 288, 289, 290, 291, 292, 293, 294, 295, 296, 297, 298, 299, 300, 301, 302, 303, 304, 305, 306, 307, 308, 309, 310, 311, 312, 313, 314, 315, 316, 317, 318, 319, 320, 321, 322, 323, 324, 325, 326, 327, 328, 329, 330, 331, 332, 333, 334, 335, 336, 337, 338, 339, 340, 341, 342, 343, 344, 345, 346, 347, 348, 349, 350, 351, 352, 353, 354, 355, 356, 357, 358, 359, 360, 361, 362, 363, 364, 365, 366, 367, 368, 369, 370, 371, 372, 373, 374, 375, 376, 377, 378, 379, 380, 381, 382, 383, 384, 385, 386, 387, 388, 389, 390, 391, 392, 393, 394, 395, 396, 397, 398, 399, 400, 401, 402, 403, 404, 405, 406, 407, 408, 409, 410, 411, 412, 413, 414, 415, 416, 417, 418, 419, 420, 421, 422, 423, 424, 425, 426, 427, 428, 429, 430, 431, 432, 433, 434, 435, 436, 437, 438, 439, 440, 441, 442, 443, 444, 445, 446, 447, 448, 449, 450, 451, 452, 453, 454, 455, 456, 457, 458, 459, 460, 461, 462, 463, 464, 465, 466, 467, 468, 469, 470, 471, 472, 473, 474, 475, 476, 477, 478, 479, 480, 481, 482, 483, 484, 485, 486, 487, 488, 489, 490, 491, 492, 493, 494, 495, 496, 497, 498, 499, 500, 501, 502, 503, 504, 505, 506, 507, 508, 509, 510, 511, 512, 513, 514, 515, 516, 517, 518, 519, 520, 521, 522, 523, 524, 525, 526, 527, 528, 529, 530, 531, 532, 533, 534, 535, 536, 537, 538, 539, 540, 541, 542, 543, 544, 545, 546, 547, 548, 549, 550, 551, 552, 553, 554, 555, 556, 557, 558, 559, 560, 561, 562, 563, 564, 565, 566, 567, 568, 569, 570, 571, 572, 573, 574, 575, 576, 577, 578, 579, 580, 581, 582, 583, 584, 585, 586, 587, 588, 589, 590, 591, 592, 593, 594, 595, 596, 597, 598, 599, 600, 601, 602, 603, 604, 605, 606, 607, 608, 609, 610, 611, 612, 613, 614, 615, 616, 617, 618, 619, 620, 621, 622, 623, 624, 625, 626, 627, 628, 629, 630, 631, 632, 633, 634, 635, 636, 637, 638, 639, 640, 641, 642, 643, 644, 645, 646, 647, 648, 649, 650, 651, 652, 653, 654, 655, 656, 657, 658, 659, 660, 661, 662, 663, 664, 665, 666, 667, 668, 669, 670, 671, 672, 673, 674, 675, 676, 677, 678, 679, 680, 681, 682, 683, 684, 685, 686, 687, 688, 689, 690, 691, 692, 693, 694, 695, 696, 697, 698, 699, 700, 701, 702, 703, 704, 705, 706, 707, 708, 709, 710, 711, 712, 713, 714, 715, 716, 717, 718, 719, 720, 721, 722, 723, 724, 725, 726, 727, 728, 729, 730, 731, 732, 733, 734, 735, 736, 737, 738, 739, 740, 741, 742, 743, 744, 745, 746, 747, 748, 749, 750, 751, 752, 753, 754, 755, 756, 757, 758, 759, 760, 761, 762, 763, 764, 765, 766, 767, 768, 769, 770, 771, 772, 773, 774, 775, 776, 777, 778, 779, 780, 781, 782, 783, 784, 785, 786, 787, 788, 789, 790, 791, 792, 793, 794, 795, 796, 797, 798, 799, 800, 801, 802, 803, 804, 805, 806, 807, 808, 809, 810, 811, 812, 813, 814, 815, 816, 817, 818, 819, 820, 821, 822, 823, 824, 825, 826, 827, 828, 829, 830, 831, 832, 833, 834, 835, 836, 837, 838, 839, 840, 841, 842, 843, 844, 845, 846, 847, 848, 849, 850, 851, 852, 853, 854, 855, 856, 857, 858, 859, 860, 861, 862, 863, 864, 865, 866, 867, 868, 869, 870, 871, 872, 873, 874, 875, 876, 877, 878, 879, 880, 881, 882, 883, 884, 885, 886, 887, 888, 889, 890, 891, 892, 893, 894, 895, 896, 897, 898, 899, 900, 901, 902, 903, 904, 905, 906, 907, 908, 909, 910, 911, 912, 913, 914, 915, 916, 917, 918, 919, 920, 921, 922, 923, 924, 925, 926, 927, 928, 929, 930, 931, 932, 933, 934, 935, 936, 937, 938, 939, 940, 941, 942, 943, 944, 945, 946, 947, 948, 949, 950, 951, 952, 953, 954, 955, 956, 957, 958, 959, 960, 961, 962, 963, 964, 965, 966, 967, 968, 969, 970, 971, 972, 973, 974, 975, 976, 977, 978, 979, 980, 981, 982, 983, 984, 985, 986, 987, 988, 989, 990, 991, 992, 993, 994, 995, 996, 997, 998, 999, 1000, 1001, 1002, 1003, 1004, 1005, 1006, 1007, 1008, 1009, 1010, 1011, 1012, 1013, 1014, 1015, 1016, 1017, 1018, 1019, 1020, 1021, 1022, 1023, 1024, 1025, 1026, 1027, 1028, 1029, 1030, 1031, 1032, 1033, 1034, 1035, 1036, 1037, 1038, 1039, 1040, 1041, 1042, 1043, 1044, 1045, 1046, 1047, 1048, 1049, 1050, 1051, 1052, 1053, 1054, 1055, 1056, 1057, 1058, 1059, 1060, 1061, 1062, 1063, 1064, 1065, 1066, 1067, 1068, 1069, 1070, 1071, 1072, 1073, 1074, 1075, 1076, 1077, 1078, 1079, 1080, 1081, 1082, 1083, 1084, 1085, 1086, 1087, 1088, 1089, 1090, 1091, 1092, 1093, 1094, 1095, 1096, 1097, 1098, 1099, 1100, 1101, 1102, 1103, 1104, 1105, 1106, 1107, 1108, 1109, 1110, 1111, 1112, 1113, 1114, 1115, 1116, 1117, 1118, 1119, 1120, 1121, 1122, 1123, 1124, 1125, 1126, 1127, 1128, 1129, 1130, 1131, 1132, 1133, 1134, 1135, 1136, 1137, 1138, 1139, 1140, 1141, 1142, 1143, 1144, 1145, 1146, 1147, 1148, 1149, 1150, 1151, 1152, 1153, 1154, 1155, 1156, 1157, 1158, 1159, 1160, 1161, 1162, 1163, 1164, 1165, 1166, 1167, 1168, 1169, 1170, 1171, 1172, 1173, 1174, 1175, 1176, 1177, 1178, 1179, 1180, 1181, 1182, 1183, 1184, 1185, 1186, 1187, 1188, 1189, 1190, 1191, 1192, 1193, 1194, 1195, 1196, 1197, 1198, 1199, 1200, 1201, 1202, 1203, 1204, 1205, 1206, 1207, 1208, 1209, 1210, 1211, 1212, 1213, 1214, 1215, 1216, 1217, 1218, 1219, 1220, 1221, 1222, 1223, 1224, 1225, 1226, 1227, 1228, 1229, 1230, 1231, 1232, 1233, 1234, 1235, 1236, 1237, 1238, 1239, 1240, 1241, 1242, 1243, 1244, 1245, 1246, 1247, 1248, 1249, 1250, 1251, 1252, 1253, 1254, 1255, 1256, 1257, 1258, 1259, 1260, 1261, 1262, 1263, 1264, 1265, 1266, 1267, 1268, 1269, 1270, 1271, 1272, 1273, 1274, 1275, 1276, 1277, 1278, 1279, 1280, 1281, 1282, 1283, 1284, 1285, 1286, 1287, 1288, 1289, 1290, 1291, 1292, 1293, 1294, 1295, 1296, 1297, 1298, 1299, 1300, 1301, 1302, 1303, 1304, 1305, 1306, 1307, 1308, 1309, 1310, 1311, 1312, 1313, 1314, 1315, 1316, 1317, 1318, 1319, 1320, 1321, 1322, 1323, 1324, 1325, 1326, 1327, 1328, 1329, 1330, 1331, 1332, 1333, 1334, 1335, 1336, 1337, 1338, 1339, 1340, 1341, 1342, 1343, 1344, 1345, 1346, 1347, 1348, 1349, 1350, 1351, 1352, 1353, 1354, 1355, 1356, 1357, 1358, 1359, 1360, 1361, 1362, 1363, 1364, 1365, 1366, 1367, 1368, 1369, 1370, 1371, 1372, 1373, 1374, 1375, 1376, 1377, 1378, 1379, 1380, 1381, 1382, 1383, 1384, 1385, 1386, 1387, 1388, 1389, 1390, 1391, 1392, 1393, 1394, 1395, 1396, 1397, 1398, 1399, 1400, 1401, 1402, 1403, 1404, 1405, 1406, 1407, 1408, 1409, 1410, 1411, 1412, 1413, 1414, 1415, 1416, 1417, 1418, 1419, 1420, 1421, 1422, 1423, 1424, 1425, 1426, 1427, 1428, 1429, 1430, 1431, 1432, 1433, 1434, 1435, 1436, 1437, 1438, 1439, 1440, 1441, 1442, 1443, 1444, 1445, 1446, 1447, 1448, 1449, 1450, 1451, 1452, 1453, 1454, 1455, 1456, 1457, 1458, 1459, 1460, 1461, 1462, 1463, 1464, 1465, 1466, 1467, 1468, 1469, 1470, 1471, 1472, 1473, 1474, 1475, 1476, 1477, 1478, 1479, 1480, 1481, 1482, 1483, 1484, 1485, 1486, 1487, 1488, 1489, 1490, 1491, 1492, 1493, 1494, 1495, 1496, 1497, 1498, 1499, 1500, 1501, 1502, 1503, 1504, 1505, 1506, 1507, 1508, 1509, 1510, 1511, 1512, 1513, 1514, 1515, 1516, 1517, 1518, 1519, 1520, 1521, 1522, 1523, 1524, 1525, 1526, 1527, 1528, 1529, 1530, 1531, 1532, 1533, 1534, 1535, 1536, 1537, 1538, 1539, 1540, 1541, 1542, 1543, 1544, 1545, 1546, 1547, 1548, 1549, 1550, 1551, 1552, 1553, 1554, 1555, 1556, 1557, 1558, 1559, 1560, 1561, 1562, 1563, 1564, 1565, 1566, 1567, 1568, 1569, 1570, 1571, 1572, 1573, 1574, 1575, 1576, 1577, 1578, 1579, 1580, 1581, 1582, 1583, 1584, 1585, 1586, 1587, 1588, 1589, 1590, 1591, 1592, 1593, 1594, 1595, 1596, 1597, 1598, 1599, 1600, 1601, 1602, 1603, 1604, 1605, 1606, 1607, 1608, 1609, 1610, 1611, 1612, 1613, 1614, 1615, 1616, 1617, 1618, 1619, 1620, 1621, 1622, 1623, 1624, 1625, 1626, 1627, 1628, 1629, 1630, 1631, 1632, 1633, 1634, 1635, 1636, 1637, 1638, 1639, 1640, 1641, 1642, 1643, 1644, 1645, 1646, 1647, 1648, 1649, 1650, 1651, 1652, 1653, 1654, 1655, 1656, 1657, 1658, 1659, 1660, 1661, 1662, 1663, 1664, 1665, 1666, 1667, 1668, 1669, 1670, 1671, 1672, 1673, 1674, 1675, 1676, 1677, 1678, 1679, 1680, 1681, 1682, 1683, 1684, 1685, 1686, 1687, 1688, 1689, 1690, 1691, 1692, 1693, 1694, 1695, 1696, 1697, 1698, 1699, 1700, 1701, 1702, 1703, 1704, 1705, 1706, 1707, 1708, 1709, 1710, 1711, 1712, 1713, 1714, 1715, 1716, 1717, 1718, 1719, 1720, 1721, 1722, 1723, 1724, 1725, 1726, 1727, 1728, 1729, 1730, 1731, 1732, 1733, 1734, 1735, 1736, 1737, 1738, 1739, 1740, 1741, 1742, 1743, 1744, 1745, 1746, 1747, 1748, 1749, 1750, 1751, 1752, 1753, 1754, 1755, 1756, 1757, 1758, 1759, 1760, 1761, 1762, 1763, 1764, 1765, 1766, 1767, 1768, 1769, 1770, 1771, 1772, 1773, 1774, 1775, 1776, 1777, 1778, 1779, 1780, 1781, 1782, 1783, 1784, 1785, 1786, 1787, 1788, 1789, 1790, 1791, 1792, 1793, 1794, 1795, 1796, 1797, 1798, 1799, 1800, 1801, 1802, 1803, 1804, 1805, 1806, 1807, 1808, 1809, 1810, 1811, 1812, 1813, 1814, 1815, 1816, 1817, 1818, 1819, 1820, 1821, 1822, 1823, 1824, 1825, 1826, 1827, 1828, 1829, 1830, 1831, 1832, 1833, 1834, 1835, 1836, 1837, 1838, 1839, 1840, 1841, 1842, 1843, 1844, 1845, 1846, 1847, 1848, 1849, 1850, 1851, 1852, 1853, 1854, 1855, 1856, 1857, 1858, 1859, 1860, 1861, 1862, 1863, 1864, 1865, 1866, 1867, 1868, 1869, 1870, 1871, 1872, 1873, 1874, 1875, 1876, 1877, 1878, 1879, 1880, 1881, 1882, 1883, 1884, 1885, 1886, 1887, 1888, 1889, 1890, 1891, 1892, 1893, 1894, 1895, 1896, 1897, 1898, 1899, 1900, 1901, 1902, 1903, 1904, 1905, 1906, 1907, 1908, 1909, 1910, 1911, 1912, 1913, 1914, 1915, 1916, 1917, 1918, 1919, 1920, 1921, 1922, 1923, 1924, 1925, 1926, 1927, 1928, 1929, 1930, 1931, 1932, 1933, 1934, 1935, 1936, 1937, 1938, 1939, 1940, 1941, 1942, 1943, 1944, 1945, 1946, 1947, 1948, 1949, 1950, 1951, 1952, 1953, 1954, 1955, 1956, 1957, 1958, 1959, 1960, 1961, 1962, 1963, 1964, 1965, 1966, 1967, 1968, 1969, 1970, 1971, 1972, 1973, 1974, 1975, 1976, 1977, 1978, 1979, 1980, 1981, 1982, 1983, 1984, 1985, 1986, 1987, 1988, 1989, 1990, 1991, 1992, 1993, 1994, 1995, 1996, 1997, 1998, 1999, 2000, 2001, 2002, 2003, 2004, 2005, 2006, 2007, 2008, 2009, 2010, 2011, 2012, 2013, 2014, 2015, 2016, 2017, 2018, 2019, 2020, 2021, 2022, 2023, 2024, 2025, 2026, 2027, 2028, 2029, 2030, 2031, 2032, 2033, 2034, 2035, 2036, 2037, 2038, 2039, 2040, 2041, 2042, 2043, 2044, 2045, 2046, 2047, 2048, 2049, 2050, 2051, 2052, 2053, 2054, 2055, 2056, 2057, 2058, 2059, 2060, 2061, 2062, 2063, 2064, 2065, 2066, 2067, 2068, 2069, 2070, 2071, 2072, 2073, 2074, 2075, 2076, 2077, 2078, 2079, 2080, 2081, 2082, 2083, 2084, 2085, 2086, 2087, 2088, 2089, 2090, 2091, 2092, 2093, 2094, 2095, 2096, 2097, 2098, 2099, 2100, 2101, 2102, 2103, 2104, 2105, 2106, 2107, 2108, 2109, 2110, 2111, 2112, 2113, 2114, 2115, 2116, 2117, 2118, 2119, 2120, 2121, 2122, 2123, 2124, 2125, 2126, 2127, 2128, 2129, 2130, 2131, 2132, 2133, 2134, 2135, 2136, 2137, 2138, 2139, 2140, 2141, 2142, 2143, 2144, 2145, 2146, 2147, 2148, 2149, 2150, 2151, 2152, 2153, 2154, 2155, 2156, 2157, 2158, 2159, 2160, 2161, 2162, 2163, 2164, 2165, 2166, 2167, 2168, 2169, 2170, 2171, 2172, 2173, 2174, 2175, 2176, 2177, 2178, 2179, 2180, 2181, 2182, 2183, 2184, 2185, 2186, 2187, 2188, 2189, 2190, 2191, 2192, 2193, 2194, 2195, 2196, 2197, 2198, 2199, 2200, 2201, 2202, 2203, 2204, 2205, 2206, 2207, 2208, 2209, 2210, 2211, 2212, 2213, 2214, 2215, 2216, 2217, 2218, 2219, 2220, 2221, 2222, 2223, 2224, 2225, 2226, 2227, 2228, 2229, 2230, 2231, 2232, 2233, 2234, 2235, 2236, 2237, 2238, 2239, 2240, 2241, 2242, 2243, 2244, 2245, 2246, 2247, 2248, 2249, 2250, 2251, 2252, 2253, 2254, 2255, 2256, 2257, 2258, 2259, 2260, 2261, 2262, 2263, 2264, 2265, 2266, 2267, 2268, 2269, 2270, 2271, 2272, 2273, 2274, 2275, 2276, 2277, 2278, 2279, 2280, 2281, 2282, 2283, 2284, 2285, 2286, 2287, 2288, 2289, 2290, 2291, 2292, 2293, 2294, 2295, 2296, 2297, 2298, 2299, 2300, 2301, 2302, 2303, 2304, 2305, 2306, 2307, 2308, 2309, 2310, 2311, 2312, 2313, 2314, 2315, 2316, 2317, 2318, 2319, 2320, 2321, 2322, 2323, 2324, 2325, 2326, 2327, 2328, 2329, 2330, 2331, 2332, 2333, 2334, 2335, 2336, 2337, 2338, 2339, 2340, 2341, 2342, 2343, 2344, 2345, 2346, 2347, 2348, 2349, 2350, 2351, 2352, 2353, 2354, 2355, 2356, 2357, 2358, 2359, 2360, 2361, 2362, 2363, 2364, 2365, 2366, 2367, 2368, 2369, 2370, 2371, 2372, 2373, 2374, 2375, 2376, 2377, 2378, 2379, 2380, 2381, 2382, 2383, 2384, 2385, 2386, 2387, 2388, 2389, 2390, 2391, 2392, 2393, 2394, 2395, 2396, 2397, 2398, 2399, 2400, 2401, 2402, 2403, 2404, 2405, 2406, 2407, 2408, 2409, 2410, 2411, 2412, 2413, 2414, 2415, 2416, 2417, 2418, 2419, 2420, 2421, 2422, 2423, 2424, 2425, 2426, 2427, 2428, 2429, 2430, 2431, 2432, 2433, 2434, 2435, 2436, 2437, 2438, 2439, 2440, 2441, 2442, 2443, 2444, 2445, 2446, 2447, 2448, 2449, 2450, 2451, 2452, 2453, 2454, 2455, 2456, 2457, 2458, 2459, 2460, 2461, 2462, 2463, 2464, 2465, 2466, 2467, 2468, 2469, 2470, 2471, 2472, 2473, 2474, 2475, 2476, 2477, 2478, 2479, 2480, 2481, 2482, 2483, 2484, 2485, 2486, 2487, 2488, 2489, 2490, 2491, 2492, 2493, 2494, 2495, 2496, 2497, 2498, 2499, 2500, 2501, 2502, 2503, 2504, 2505, 2506, 2507, 2508, 2509, 2510, 2511, 2512, 2513, 2514, 2515, 2516, 2517, 2518, 2519, 2520, 2521, 2522, 2523, 2524, 2525, 2526, 2527, 2528, 2529, 2530, 2531, 2532, 2533, 2534, 2535, 2536, 2537, 2538, 2539, 2540, 2541, 2542, 2543, 2544, 2545, 2546, 2547, 2548, 2549, 2550, 2551, 2552, 2553, 2554, 2555, 2556, 2557, 2558, 2559, 2560, 2561, 2562, 2563, 2564, 2565, 2566, 2567, 2568, 2569, 2570, 2571, 2572, 2573, 2574, 2575, 2576, 2577, 2578, 2579, 2580, 2581, 2582, 2583, 2584, 2585, 2586, 2587, 2588, 2589, 2590, 2591, 2592, 2593, 2594, 2595, 2596, 2597, 2598, 2599, 2600, 2601, 2602, 2603, 2604, 2605, 2606, 2607, 2608, 2609, 2610, 2611, 2612, 2613, 2614, 2615, 2616, 2617, 2618, 2619, 2620, 2621, 2622, 2623, 2624, 2625, 2626, 2627, 2628, 2629, 2630, 2631, 2632, 2633, 2634, 2635, 2636, 2637, 2638, 2639, 2640, 2641, 2642, 2643, 2644, 2645, 2646, 2647, 2648, 2649, 2650, 2651, 2652, 2653, 2654, 2655, 2656, 2657, 2658, 2659, 2660, 2661, 2662, 2663, 2664, 2665, 2666, 2667, 2668, 2669, 2670, 2671, 2672, 2673, 2674, 2675, 2676, 2677, 2678, 2679, 2680, 2681, 2682, 2683, 2684, 2685, 2686, 2687, 2688, 2689, 2690, 2691, 2692, 2693, 2694, 2695, 2696, 2697, 2698, 2699, 2700, 2701, 2702, 2703, 2704, 2705, 2706, 2707, 2708, 2709, 2710, 2711, 2712, 2713, 2714, 2715, 2716, 2717, 2718, 2719, 2720, 2721, 2722, 2723, 2724, 2725, 2726, 2727, 2728, 2729, 2730, 2731, 2732, 2733, 2734, 2735, 2736, 2737, 2738, 2739, 2740, 2741, 2742, 2743, 2744, 2745, 2746, 2747, 2748, 2749, 2750, 2751, 2752, 2753, 2754, 2755, 2756, 2757, 2758, 2759, 2760, 2761, 2762, 2763, 2764, 2765, 2766, 2767, 2768, 2769, 2770, 2771, 2772, 2773, 2774, 2775, 2776, 2777, 2778, 2779, 2780, 2781, 2782, 2783, 2784, 2785, 2786, 2787, 2788, 2789, 2790, 2791, 2792, 2793, 2794, 2795, 2796, 2797, 2798, 2799, 2800, 2801, 2802, 2803, 2804, 2805, 2806, 2807, 2808, 2809, 2810, 2811, 2812, 2813, 2814, 2815, 2816, 2817, 2818, 2819, 2820, 2821, 2822, 2823, 2824, 2825, 2826, 2827, 2828, 2829, 2830, 2831, 2832, 2833, 2834, 2835, 2836, 2837, 2838, 2839, 2840, 2841, 2842, 2843, 2844, 2845, 2846, 2847, 2848, 2849, 2850, 2851, 2852, 2853, 2854, 2855, 2856, 2857, 2858, 2859, 2860, 2861, 2862, 2863, 2864, 2865, 2866, 2867, 2868, 2869, 2870, 2871, 2872, 2873, 2874, 2875, 2876, 2877, 2878, 2879, 2880, 2881, 2882, 2883, 2884, 2885, 2886, 2887, 2888, 2889, 2890, 2891, 2892, 2893, 2894, 2895, 2896, 2897, 2898, 2899, 2900, 2901, 2902, 2903, 2904, 2905, 2906, 2907, 2908, 2909, 2910, 2911, 2912, 2913, 2914, 2915, 2916, 2917, 2918, 2919, 2920, 2921, 2922, 2923, 2924, 2925, 2926, 2927, 2928, 2929, 2930, 2931, 2932, 2933, 2934, 2935, 2936, 2937, 2938, 2939, 2940, 2941, 2942, 2943, 2944, 2945, 2946, 2947, 2948, 2949, 2950, 2951, 2952, 2953, 2954, 2955, 2956, 2957, 2958, 2959, 2960, 2961, 2962, 2963, 2964, 2965, 2966, 2967, 2968, 2969, 2970, 2971, 2972, 2973, 2974, 2975, 2976, 2977, 2978, 2979, 2980, 2981, 2982, 2983, 2984, 2985, 2986, 2987, 2988, 2989, 2990, 2991, 2992, 2993, 2994, 2995, 2996, 2997, 2998, 2999, 3000, 3001, 3002, 3003, 3004, 3005, 3006, 3007, 3008, 3009, 3010, 3011, 3012, 3013, 3014, 3015, 3016, 3017, 3018, 3019, 3020, 3021, 3022, 3023, 3024, 3025, 3026, 3027, 3028, 3029, 3030, 3031, 3032, 3033, 3034, 3035, 3036, 3037, 3038, 3039, 3040, 3041, 3042, 3043, 3044, 3045, 3046, 3047, 3048, 3049, 3050, 3051, 3052, 3053, 3054, 3055, 3056, 3057, 3058, 3059, 3060, 3061, 3062, 3063, 3064, 3065, 3066, 3067, 3068, 3069, 3070, 3071, 3072, 3073, 3074, 3075, 3076, 3077, 3078, 3079, 3080, 3081, 3082, 3083, 3084, 3085, 3086, 3087, 3088, 3089, 3090, 3091, 3092, 3093, 3094, 3095, 3096, 3097, 3098, 3099, 3100, 3101, 3102, 3103, 3104, 3105, 3106, 3107, 3108, 3109, 3110, 3111, 3112, 3113, 3114, 3115, 3116, 3117, 3118, 3119, 3120, 3121, 3122, 3123, 3124, 3125, 3126, 3127, 3128, 3129, 3130, 3131, 3132, 3133, 3134, 3135, 3136, 3137, 3138, 3139, 3140, 3141, 3142, 3143, 3144, 3145, 3146, 3147, 3148, 3149, 3150, 3151, 3152, 3153, 3154, 3155, 3156, 3157, 3158, 3159, 3160, 3161, 3162, 3163, 3164, 3165, 3166, 3167, 3168, 3169, 3170, 3171, 3172, 3173, 3174, 3175, 3176, 3177, 3178, 3179, 3180, 3181, 3182, 3183, 3184, 3185, 3186, 3187, 3188, 3189, 3190, 3191, 3192, 3193, 3194, 3195, 3196, 3197, 3198, 3199, 3200, 3201, 3202, 3203, 3204, 3205, 3206, 3207, 3208, 3209, 3210, 3211, 3212, 3213, 3214, 3215, 3216, 3217, 3218, 3219, 3220, 3221, 3222, 3223, 3224, 3225, 3226, 3227, 3228, 3229, 3230, 3231, 3232, 3233, 3234, 3235, 3236, 3237, 3238, 3239, 3240, 3241, 3242, 3243, 3244, 3245, 3246, 3247, 3248, 3249, and 3250 nucleotides. The length of any filler region for the viral genome may be 50-100, 100-150, 150-200, 200-250, 250-300, 300-350, 350-400, 400-450, 450-500, 500-550, 550-600, 600-650, 650-700, 700-750, 750-800, 800-850, 850-900, 900-950, 950-1000, 1000-1050, 1050-1100, 1100-1150, 1150-1200, 1200-1250, 1250-1300, 1300-1350, 1350-1400, 1400-1450, 1450-1500, 1500-1550, 1550-1600, 1600-1650, 1650-1700, 1700-1750, 1750-1800, 1800-1850, 1850-1900, 1900-1950, 1950-2000, 2000-2050, 2050-2100, 2100-2150, 2150-2200, 2200-2250, 2250-2300, 2300-2350, 2350-2400, 2400-2450, 2450-2500, 2500-2550, 2550-2600, 2600-2650, 2650-2700, 2700-2750, 2750-2800, 2800-2850, 2850-2900, 2900-2950, 2950-3000, 3000-3050, 3050-3100, 3100-3150, 3150-3200, and 3200-3250 nucleotides. As a non-limiting example, the viral genome comprises a filler region that is about 55 nucleotides in length. As a non-limiting example, the viral genome comprises a filler region that is about 56 nucleotides in length. As a non-limiting example, the viral genome comprises a filler region that is about 97 nucleotides in length. As a non-limiting example, the viral genome comprises a filler region that is about 103 nucleotides in length. As a non-limiting example, the viral genome comprises a filler region that is about 105 nucleotides in length. As a non-limiting example, the viral genome comprises a filler region that is about 357 nucleotides in length. As a non-limiting example, the viral genome comprises a filler region that is about 363 nucleotides in length. As a non-limiting example, the viral genome comprises a filler region that is about 712 nucleotides in length. As a non-limiting example, the viral genome comprises a filler region that is about 714 nucleotides in length. As a non-limiting example, the viral genome comprises a filler region that is about 1203 nucleotides in length. As a non-limiting example, the viral genome comprises a filler region that is about 1209 nucleotides in length. As a non-limiting example, the viral genome comprises a filler region that is about 1512 nucleotides in length. As a non-limiting example, the viral genome comprises a filler region that is about 1519 nucleotides in length. As a non-limiting example, the viral genome comprises a filler region that is about 2395 nucleotides in length. As a non-limiting example, the viral genome comprises a filler region that is about 2403 nucleotides in length. As a non-limiting example, the viral genome comprises a filler region that is about 2405 nucleotides in length. As a non-limiting example, the viral genome comprises a filler region that is about 3013 nucleotides in length. As a non-limiting example, the viral genome comprises a filler region that is about 3021 nucleotides in length.

[0700] In one embodiment, the AAV particle viral genome may comprise at least one multiple filler sequence region. The filler region(s) may, independently, have a length such as, but not limited to, 50, 51, 52, 53, 54, 55, 56, 57, 58, 59, 60, 61, 62, 63, 64, 65, 66, 67, 68, 69, 70, 71, 72, 73, 74, 75, 76, 77, 78, 79, 80, 81, 82, 83, 84, 85, 86, 87, 88, 89, 90, 91, 92, 93, 94, 95, 96, 97, 98, 99, 100, 101, 102, 103, 104, 105, 106, 107, 108, 109, 110, 111, 112, 113, 114, 115, 116, 117, 118, 119, 120, 121, 122, 123, 124, 125, 126, 127, 128, 129, 130, 131, 132, 133, 134, 135, 136, 137, 138, 139, 140, 141, 142, 143, 144, 145, 146, 147, 148, 149, 150, 151, 152, 153, 154, 155, 156, 157, 158, 159, 160, 161, 162, 163, 164, 165, 166, 167, 168, 169, 170, 171, 172, 173, 174, 175, 176, 177, 178, 179, 180, 181, 182, 183, 184, 185, 186, 187, 188, 189, 190, 191, 192, 193, 194, 195, 196, 197, 198, 199, 200, 201, 202, 203, 204, 205, 206, 207, 208, 209, 210, 211, 212, 213, 214, 215, 216, 217, 218, 219, 220, 221, 222, 223, 224, 225, 226, 227, 228, 229, 230, 231, 232, 233, 234, 235, 236, 237, 238, 239, 240, 241, 242, 243, 244, 245, 246, 247, 248, 249, 250, 251, 252, 253, 254, 255, 256, 257, 258, 259, 260, 261, 262, 263, 264, 265, 266, 267, 268, 269, 270, 271, 272, 273, 274, 275, 276, 277, 278, 279, 280, 281, 282, 283, 284, 285, 286, 287, 288, 289, 290, 291, 292, 293, 294, 295, 296, 297, 298, 299, 300, 301, 302, 303, 304, 305, 306, 307, 308, 309, 310, 311, 312, 313, 314, 315, 316, 317, 318, 319, 320, 321, 322, 323, 324, 325, 326, 327, 328, 329, 330, 331, 332, 333, 334, 335, 336, 337, 338, 339, 340, 341, 342, 343, 344, 345, 346, 347, 348, 349, 350, 351, 352, 353, 354, 355, 356, 357, 358, 359, 360, 361, 362, 363, 364, 365, 366, 367, 368, 369, 370, 371, 372, 373, 374, 375, 376, 377, 378, 379, 380, 381, 382, 383, 384, 385, 386, 387, 388, 389, 390, 391, 392, 393, 394, 395, 396, 397, 398, 399, 400, 401, 402, 403, 404, 405, 406, 407, 408, 409, 410, 411, 412, 413, 414, 415, 416, 417, 418, 419, 420, 421, 422, 423, 424, 425, 426, 427, 428, 429, 430, 431, 432, 433, 434, 435, 436, 437, 438, 439, 440, 441, 442, 443, 444, 445, 446, 447, 448, 449, 450, 451, 452, 453, 454, 455, 456, 457, 458, 459, 460, 461, 462, 463, 464, 465, 466, 467, 468, 469, 470, 471, 472, 473, 474, 475, 476, 477, 478, 479, 480, 481, 482, 483, 484, 485, 486, 487, 488, 489, 490, 491, 492, 493, 494, 495, 496, 497, 498, 499, 500, 501, 502, 503, 504, 505, 506, 507, 508, 509, 510, 511, 512, 513, 514, 515, 516, 517, 518, 519, 520, 521, 522, 523, 524, 525, 526, 527, 528, 529, 530, 531, 532, 533, 534, 535, 536, 537, 538, 539, 540, 541, 542, 543, 544, 545, 546, 547, 548, 549, 550, 551, 552, 553, 554, 555, 556, 557, 558, 559, 560, 561, 562, 563, 564, 565, 566, 567, 568, 569, 570, 571, 572, 573, 574, 575, 576, 577, 578, 579, 580, 581, 582, 583, 584, 585, 586, 587, 588, 589, 590, 591, 592, 593, 594, 595, 596, 597, 598, 599, 600, 601, 602, 603, 604, 605, 606, 607, 608, 609, 610, 611, 612, 613, 614, 615, 616, 617, 618, 619, 620, 621, 622, 623, 624, 625, 626, 627, 628, 629, 630, 631, 632, 633, 634, 635, 636, 637, 638, 639, 640, 641, 642, 643, 644, 645, 646, 647, 648, 649, 650, 651, 652, 653, 654, 655, 656, 657, 658, 659, 660, 661, 662, 663, 664, 665, 666, 667, 668, 669, 670, 671, 672, 673, 674, 675, 676, 677, 678, 679, 680, 681, 682, 683, 684, 685, 686, 687, 688, 689, 690, 691, 692, 693, 694, 695, 696, 697, 698, 699, 700, 701, 702, 703, 704, 705, 706, 707, 708, 709, 710, 711, 712, 713, 714, 715, 716, 717, 718, 719, 720, 721, 722, 723, 724, 725, 726, 727, 728, 729, 730, 731, 732, 733, 734, 735, 736, 737, 738, 739, 740, 741, 742, 743, 744, 745, 746, 747, 748, 749, 750, 751, 752, 753, 754, 755, 756, 757, 758, 759, 760, 761, 762, 763, 764, 765, 766, 767, 768, 769, 770, 771, 772, 773, 774, 775, 776, 777, 778, 779, 780, 781, 782, 783, 784, 785, 786, 787, 788, 789, 790, 791, 792, 793, 794, 795, 796, 797, 798, 799, 800, 801, 802, 803, 804, 805, 806, 807, 808, 809, 810, 811, 812, 813, 814, 815, 816, 817, 818, 819, 820, 821, 822, 823, 824, 825, 826, 827, 828, 829, 830, 831, 832, 833, 834, 835, 836, 837, 838, 839, 840, 841, 842, 843, 844, 845, 846, 847, 848, 849, 850, 851, 852, 853, 854, 855, 856, 857, 858, 859, 860, 861, 862, 863, 864, 865, 866, 867, 868, 869, 870, 871, 872, 873, 874, 875, 876, 877, 878, 879, 880, 881, 882, 883, 884, 885, 886, 887, 888, 889, 890, 891, 892, 893, 894, 895, 896, 897, 898, 899, 900, 901, 902, 903, 904, 905, 906, 907, 908, 909, 910, 911, 912, 913, 914, 915, 916, 917, 918, 919, 920, 921, 922, 923, 924, 925, 926, 927, 928, 929, 930, 931, 932, 933, 934, 935, 936, 937, 938, 939, 940, 941, 942, 943, 944, 945, 946, 947, 948, 949, 950, 951, 952, 953, 954, 955, 956, 957, 958, 959, 960, 961, 962, 963, 964, 965, 966, 967, 968, 969, 970, 971, 972, 973, 974, 975, 976, 977, 978, 979, 980, 981, 982, 983, 984, 985, 986, 987, 988, 989, 990, 991, 992, 993, 994, 995, 996, 997, 998, 999, 1000, 1001, 1002, 1003, 1004, 1005, 1006, 1007, 1008, 1009, 1010, 1011, 1012, 1013, 1014, 1015, 1016, 1017, 1018, 1019, 1020, 1021, 1022, 1023, 1024, 1025, 1026, 1027, 1028, 1029, 1030, 1031, 1032, 1033, 1034, 1035, 1036, 1037, 1038, 1039, 1040, 1041, 1042, 1043, 1044, 1045, 1046, 1047, 1048, 1049, 1050, 1051, 1052, 1053, 1054, 1055, 1056, 1057, 1058, 1059, 1060, 1061, 1062, 1063, 1064, 1065, 1066, 1067, 1068, 1069, 1070, 1071, 1072, 1073, 1074, 1075, 1076, 1077, 1078, 1079, 1080, 1081, 1082, 1083, 1084, 1085, 1086, 1087, 1088, 1089, 1090, 1091, 1092, 1093, 1094, 1095, 1096, 1097, 1098, 1099, 1100, 1101, 1102, 1103, 1104, 1105, 1106, 1107, 1108, 1109, 1110, 1111, 1112, 1113, 1114, 1115, 1116, 1117, 1118, 1119, 1120, 1121, 1122, 1123, 1124, 1125, 1126, 1127, 1128, 1129, 1130, 1131, 1132, 1133, 1134, 1135, 1136, 1137, 1138, 1139, 1140, 1141, 1142, 1143, 1144, 1145, 1146, 1147, 1148, 1149, 1150, 1151, 1152, 1153, 1154, 1155, 1156, 1157, 1158, 1159, 1160, 1161, 1162, 1163, 1164, 1165, 1166, 1167, 1168, 1169, 1170, 1171, 1172, 1173, 1174, 1175, 1176, 1177, 1178, 1179, 1180, 1181, 1182, 1183, 1184, 1185, 1186, 1187, 1188, 1189, 1190, 1191, 1192, 1193, 1194, 1195, 1196, 1197, 1198, 1199, 1200, 1201, 1202, 1203, 1204, 1205, 1206, 1207, 1208, 1209, 1210, 1211, 1212, 1213, 1214, 1215, 1216, 1217, 1218, 1219, 1220, 1221, 1222, 1223, 1224, 1225, 1226, 1227, 1228, 1229, 1230, 1231, 1232, 1233, 1234, 1235, 1236, 1237, 1238, 1239, 1240, 1241, 1242, 1243, 1244, 1245, 1246, 1247, 1248, 1249, 1250, 1251, 1252, 1253, 1254, 1255, 1256, 1257, 1258, 1259, 1260, 1261, 1262, 1263, 1264, 1265, 1266, 1267, 1268, 1269, 1270, 1271, 1272, 1273, 1274, 1275, 1276, 1277, 1278, 1279, 1280, 1281, 1282, 1283, 1284, 1285, 1286, 1287, 1288, 1289, 1290, 1291, 1292, 1293, 1294, 1295, 1296, 1297, 1298, 1299, 1300, 1301, 1302, 1303, 1304, 1305, 1306, 1307, 1308, 1309, 1310, 1311, 1312, 1313, 1314, 1315, 1316, 1317, 1318, 1319, 1320, 1321, 1322, 1323, 1324, 1325, 1326, 1327, 1328, 1329, 1330, 1331, 1332, 1333, 1334, 1335, 1336, 1337, 1338, 1339, 1340, 1341, 1342, 1343, 1344, 1345, 1346, 1347, 1348, 1349, 1350, 1351, 1352, 1353, 1354, 1355, 1356, 1357, 1358, 1359, 1360, 1361, 1362, 1363, 1364, 1365, 1366, 1367, 1368, 1369, 1370, 1371, 1372, 1373, 1374, 1375, 1376, 1377, 1378, 1379, 1380, 1381, 1382, 1383, 1384, 1385, 1386, 1387, 1388, 1389, 1390, 1391, 1392, 1393, 1394, 1395, 1396, 1397, 1398, 1399, 1400, 1401, 1402, 1403, 1404, 1405, 1406, 1407, 1408, 1409, 1410, 1411, 1412, 1413, 1414, 1415, 1416, 1417, 1418, 1419, 1420, 1421, 1422, 1423, 1424, 1425, 1426, 1427, 1428, 1429, 1430, 1431, 1432, 1433, 1434, 1435, 1436, 1437, 1438, 1439, 1440, 1441, 1442, 1443, 1444, 1445, 1446, 1447, 1448, 1449, 1450, 1451, 1452, 1453, 1454, 1455, 1456, 1457, 1458, 1459, 1460, 1461, 1462, 1463, 1464, 1465, 1466, 1467, 1468, 1469, 1470, 1471, 1472, 1473, 1474, 1475, 1476, 1477, 1478, 1479, 1480, 1481, 1482, 1483, 1484, 1485, 1486, 1487, 1488, 1489, 1490, 1491, 1492, 1493, 1494, 1495, 1496, 1497, 1498, 1499, 1500, 1501, 1502, 1503, 1504, 1505, 1506, 1507, 1508, 1509, 1510, 1511, 1512, 1513, 1514, 1515, 1516, 1517, 1518, 1519, 1520, 1521, 1522, 1523, 1524, 1525, 1526, 1527, 1528, 1529, 1530, 1531, 1532, 1533, 1534, 1535, 1536, 1537, 1538, 1539, 1540, 1541, 1542, 1543, 1544, 1545, 1546, 1547, 1548, 1549, 1550, 1551, 1552, 1553, 1554, 1555, 1556, 1557, 1558, 1559, 1560, 1561, 1562, 1563, 1564, 1565, 1566, 1567, 1568, 1569, 1570, 1571, 1572, 1573, 1574, 1575, 1576, 1577, 1578, 1579, 1580, 1581, 1582, 1583, 1584, 1585, 1586, 1587, 1588, 1589, 1590, 1591, 1592, 1593, 1594, 1595, 1596, 1597, 1598, 1599, 1600, 1601, 1602, 1603, 1604, 1605, 1606, 1607, 1608, 1609, 1610, 1611, 1612, 1613, 1614, 1615, 1616, 1617, 1618, 1619, 1620, 1621, 1622, 1623, 1624, 1625, 1626, 1627, 1628, 1629, 1630, 1631, 1632, 1633, 1634, 1635, 1636, 1637, 1638, 1639, 1640, 1641, 1642, 1643, 1644, 1645, 1646, 1647, 1648, 1649, 1650, 1651, 1652, 1653, 1654, 1655, 1656, 1657, 1658, 1659, 1660, 1661, 1662, 1663, 1664, 1665, 1666, 1667, 1668, 1669, 1670, 1671, 1672, 1673, 1674, 1675, 1676, 1677, 1678, 1679, 1680, 1681, 1682, 1683, 1684, 1685, 1686, 1687, 1688, 1689, 1690, 1691, 1692, 1693, 1694, 1695, 1696, 1697, 1698, 1699, 1700, 1701, 1702, 1703, 1704, 1705, 1706, 1707, 1708, 1709, 1710, 1711, 1712, 1713, 1714, 1715, 1716, 1717, 1718, 1719, 1720, 1721, 1722, 1723, 1724, 1725, 1726, 1727, 1728, 1729, 1730, 1731, 1732, 1733, 1734, 1735, 1736, 1737, 1738, 1739, 1740, 1741, 1742, 1743, 1744, 1745, 1746, 1747, 1748, 1749, 1750, 1751, 1752, 1753, 1754, 1755, 1756, 1757, 1758, 1759, 1760, 1761, 1762, 1763, 1764, 1765, 1766, 1767, 1768, 1769, 1770, 1771, 1772, 1773, 1774, 1775, 1776, 1777, 1778, 1779, 1780, 1781, 1782, 1783, 1784, 1785, 1786, 1787, 1788, 1789, 1790, 1791, 1792, 1793, 1794, 1795, 1796, 1797, 1798, 1799, 1800, 1801, 1802, 1803, 1804, 1805, 1806, 1807, 1808, 1809, 1810, 1811, 1812, 1813, 1814, 1815, 1816, 1817, 1818, 1819, 1820, 1821, 1822, 1823, 1824, 1825, 1826, 1827, 1828, 1829, 1830, 1831, 1832, 1833, 1834, 1835, 1836, 1837, 1838, 1839, 1840, 1841, 1842, 1843, 1844, 1845, 1846, 1847, 1848, 1849, 1850, 1851, 1852, 1853, 1854, 1855, 1856, 1857, 1858, 1859, 1860, 1861, 1862, 1863, 1864, 1865, 1866, 1867, 1868, 1869, 1870, 1871, 1872, 1873, 1874, 1875, 1876, 1877, 1878, 1879, 1880, 1881, 1882, 1883, 1884, 1885, 1886, 1887, 1888, 1889, 1890, 1891, 1892, 1893, 1894, 1895, 1896, 1897, 1898, 1899, 1900, 1901, 1902, 1903, 1904, 1905, 1906, 1907, 1908, 1909, 1910, 1911, 1912, 1913, 1914, 1915, 1916, 1917, 1918, 1919, 1920, 1921, 1922, 1923, 1924, 1925, 1926, 1927, 1928, 1929, 1930, 1931, 1932, 1933, 1934, 1935, 1936, 1937, 1938, 1939, 1940, 1941, 1942, 1943, 1944, 1945, 1946, 1947, 1948, 1949, 1950, 1951, 1952, 1953, 1954, 1955, 1956, 1957, 1958, 1959, 1960, 1961, 1962, 1963, 1964, 1965, 1966, 1967, 1968, 1969, 1970, 1971, 1972, 1973, 1974, 1975, 1976, 1977, 1978, 1979, 1980, 1981, 1982, 1983, 1984, 1985, 1986, 1987, 1988, 1989, 1990, 1991, 1992, 1993, 1994, 1995, 1996, 1997, 1998, 1999, 2000, 2001, 2002, 2003, 2004, 2005, 2006, 2007, 2008, 2009, 2010, 2011, 2012, 2013, 2014, 2015, 2016, 2017, 2018, 2019, 2020, 2021, 2022, 2023, 2024, 2025, 2026, 2027, 2028, 2029, 2030, 2031, 2032, 2033, 2034, 2035, 2036, 2037, 2038, 2039, 2040, 2041, 2042, 2043, 2044, 2045, 2046, 2047, 2048, 2049, 2050, 2051, 2052, 2053, 2054, 2055, 2056, 2057, 2058, 2059, 2060, 2061, 2062, 2063, 2064, 2065, 2066, 2067, 2068, 2069, 2070, 2071, 2072, 2073, 2074, 2075, 2076, 2077, 2078, 2079, 2080, 2081, 2082, 2083, 2084, 2085, 2086, 2087, 2088, 2089, 2090, 2091, 2092, 2093, 2094, 2095, 2096, 2097, 2098, 2099, 2100, 2101, 2102, 2103, 2104, 2105, 2106, 2107, 2108, 2109, 2110, 2111, 2112, 2113, 2114, 2115, 2116, 2117, 2118, 2119, 2120, 2121, 2122, 2123, 2124, 2125, 2126, 2127, 2128, 2129, 2130, 2131, 2132, 2133, 2134, 2135, 2136, 2137, 2138, 2139, 2140, 2141, 2142, 2143, 2144, 2145, 2146, 2147, 2148, 2149, 2150, 2151, 2152, 2153, 2154, 2155, 2156, 2157, 2158, 2159, 2160, 2161, 2162, 2163, 2164, 2165, 2166, 2167, 2168, 2169, 2170, 2171, 2172, 2173, 2174, 2175, 2176, 2177, 2178, 2179, 2180, 2181, 2182, 2183, 2184, 2185, 2186, 2187, 2188, 2189, 2190, 2191, 2192, 2193, 2194, 2195, 2196, 2197, 2198, 2199, 2200, 2201, 2202, 2203, 2204, 2205, 2206, 2207, 2208, 2209, 2210, 2211, 2212, 2213, 2214, 2215, 2216, 2217, 2218, 2219, 2220, 2221, 2222, 2223, 2224, 2225, 2226, 2227, 2228, 2229, 2230, 2231, 2232, 2233, 2234, 2235, 2236, 2237, 2238, 2239, 2240, 2241, 2242, 2243, 2244, 2245, 2246, 2247, 2248, 2249, 2250, 2251, 2252, 2253, 2254, 2255, 2256, 2257, 2258, 2259, 2260, 2261, 2262, 2263, 2264, 2265, 2266, 2267, 2268, 2269, 2270, 2271, 2272, 2273, 2274, 2275, 2276, 2277, 2278, 2279, 2280, 2281, 2282, 2283, 2284, 2285, 2286, 2287, 2288, 2289, 2290, 2291, 2292, 2293, 2294, 2295, 2296, 2297, 2298, 2299, 2300, 2301, 2302, 2303, 2304, 2305, 2306, 2307, 2308, 2309, 2310, 2311, 2312, 2313, 2314, 2315, 2316, 2317, 2318, 2319, 2320, 2321, 2322, 2323, 2324, 2325, 2326, 2327, 2328, 2329, 2330, 2331, 2332, 2333, 2334, 2335, 2336, 2337, 2338, 2339, 2340, 2341, 2342, 2343, 2344, 2345, 2346, 2347, 2348, 2349, 2350, 2351, 2352, 2353, 2354, 2355, 2356, 2357, 2358, 2359, 2360, 2361, 2362, 2363, 2364, 2365, 2366, 2367, 2368, 2369, 2370, 2371, 2372, 2373, 2374, 2375, 2376, 2377, 2378, 2379, 2380, 2381, 2382, 2383, 2384, 2385, 2386, 2387, 2388, 2389, 2390, 2391, 2392, 2393, 2394, 2395, 2396, 2397, 2398, 2399, 2400, 2401, 2402, 2403, 2404, 2405, 2406, 2407, 2408, 2409, 2410, 2411, 2412, 2413, 2414, 2415, 2416, 2417, 2418, 2419, 2420, 2421, 2422, 2423, 2424, 2425, 2426, 2427, 2428, 2429, 2430, 2431, 2432, 2433, 2434, 2435, 2436, 2437, 2438, 2439, 2440, 2441, 2442, 2443, 2444, 2445, 2446, 2447, 2448, 2449, 2450, 2451, 2452, 2453, 2454, 2455, 2456, 2457, 2458, 2459, 2460, 2461, 2462, 2463, 2464, 2465, 2466, 2467, 2468, 2469, 2470, 2471, 2472, 2473, 2474, 2475, 2476, 2477, 2478, 2479, 2480, 2481, 2482, 2483, 2484, 2485, 2486, 2487, 2488, 2489, 2490, 2491, 2492, 2493, 2494, 2495, 2496, 2497, 2498, 2499, 2500, 2501, 2502, 2503, 2504, 2505, 2506, 2507, 2508, 2509, 2510, 2511, 2512, 2513, 2514, 2515, 2516, 2517, 2518, 2519, 2520, 2521, 2522, 2523, 2524, 2525, 2526, 2527, 2528, 2529, 2530, 2531, 2532, 2533, 2534, 2535, 2536, 2537, 2538, 2539, 2540, 2541, 2542, 2543, 2544, 2545, 2546, 2547, 2548, 2549, 2550, 2551, 2552, 2553, 2554, 2555, 2556, 2557, 2558, 2559, 2560, 2561, 2562, 2563, 2564, 2565, 2566, 2567, 2568, 2569, 2570, 2571, 2572, 2573, 2574, 2575, 2576, 2577, 2578, 2579, 2580, 2581, 2582, 2583, 2584, 2585, 2586, 2587, 2588, 2589, 2590, 2591, 2592, 2593, 2594, 2595, 2596, 2597, 2598, 2599, 2600, 2601, 2602, 2603, 2604, 2605, 2606, 2607, 2608, 2609, 2610, 2611, 2612, 2613, 2614, 2615, 2616, 2617, 2618, 2619, 2620, 2621, 2622, 2623, 2624, 2625, 2626, 2627, 2628, 2629, 2630, 2631, 2632, 2633, 2634, 2635, 2636, 2637, 2638, 2639, 2640, 2641, 2642, 2643, 2644, 2645, 2646, 2647, 2648, 2649, 2650, 2651, 2652, 2653, 2654, 2655, 2656, 2657, 2658, 2659, 2660, 2661, 2662, 2663, 2664, 2665, 2666, 2667, 2668, 2669, 2670, 2671, 2672, 2673, 2674, 2675, 2676, 2677, 2678, 2679, 2680, 2681, 2682, 2683, 2684, 2685, 2686, 2687, 2688, 2689, 2690, 2691, 2692, 2693, 2694, 2695, 2696, 2697, 2698, 2699, 2700, 2701, 2702, 2703, 2704, 2705, 2706, 2707, 2708, 2709, 2710, 2711, 2712, 2713, 2714, 2715, 2716, 2717, 2718, 2719, 2720, 2721, 2722, 2723, 2724, 2725, 2726, 2727, 2728, 2729, 2730, 2731, 2732, 2733, 2734, 2735, 2736, 2737, 2738, 2739, 2740, 2741, 2742, 2743, 2744, 2745, 2746, 2747, 2748, 2749, 2750, 2751, 2752, 2753, 2754, 2755, 2756, 2757, 2758, 2759, 2760, 2761, 2762, 2763, 2764, 2765, 2766, 2767, 2768, 2769, 2770, 2771, 2772, 2773, 2774, 2775, 2776, 2777, 2778, 2779, 2780, 2781, 2782, 2783, 2784, 2785, 2786, 2787, 2788, 2789, 2790, 2791, 2792, 2793, 2794, 2795, 2796, 2797, 2798, 2799, 2800, 2801, 2802, 2803, 2804, 2805, 2806, 2807, 2808, 2809, 2810, 2811, 2812, 2813, 2814, 2815, 2816, 2817, 2818, 2819, 2820, 2821, 2822, 2823, 2824, 2825, 2826, 2827, 2828, 2829, 2830, 2831, 2832, 2833, 2834, 2835, 2836, 2837, 2838, 2839, 2840, 2841, 2842, 2843, 2844, 2845, 2846, 2847, 2848, 2849, 2850, 2851, 2852, 2853, 2854, 2855, 2856, 2857, 2858, 2859, 2860, 2861, 2862, 2863, 2864, 2865, 2866, 2867, 2868, 2869, 2870, 2871, 2872, 2873, 2874, 2875, 2876, 2877, 2878, 2879, 2880, 2881, 2882, 2883, 2884, 2885, 2886, 2887, 2888, 2889, 2890, 2891, 2892, 2893, 2894, 2895, 2896, 2897, 2898, 2899, 2900, 2901, 2902, 2903, 2904, 2905, 2906, 2907, 2908, 2909, 2910, 2911, 2912, 2913, 2914, 2915, 2916, 2917, 2918, 2919, 2920, 2921, 2922, 2923, 2924, 2925, 2926, 2927, 2928, 2929, 2930, 2931, 2932, 2933, 2934, 2935, 2936, 2937, 2938, 2939, 2940, 2941, 2942, 2943, 2944, 2945, 2946, 2947, 2948, 2949, 2950, 2951, 2952, 2953, 2954, 2955, 2956, 2957, 2958, 2959, 2960, 2961, 2962, 2963, 2964, 2965, 2966, 2967, 2968, 2969, 2970, 2971, 2972, 2973, 2974, 2975, 2976, 2977, 2978, 2979, 2980, 2981, 2982, 2983, 2984, 2985, 2986, 2987, 2988, 2989, 2990, 2991, 2992, 2993, 2994, 2995, 2996, 2997, 2998, 2999, 3000, 3001, 3002, 3003, 3004, 3005, 3006, 3007, 3008, 3009, 3010, 3011, 3012, 3013, 3014, 3015, 3016, 3017, 3018, 3019, 3020, 3021, 3022, 3023, 3024, 3025, 3026, 3027, 3028, 3029, 3030, 3031, 3032, 3033, 3034, 3035, 3036, 3037, 3038, 3039, 3040, 3041, 3042, 3043, 3044, 3045, 3046, 3047, 3048, 3049, 3050, 3051, 3052, 3053, 3054, 3055, 3056, 3057, 3058, 3059, 3060, 3061, 3062, 3063, 3064, 3065, 3066, 3067, 3068, 3069, 3070, 3071, 3072, 3073, 3074, 3075, 3076, 3077, 3078, 3079, 3080, 3081, 3082, 3083, 3084, 3085, 3086, 3087, 3088, 3089, 3090, 3091, 3092, 3093, 3094, 3095, 3096, 3097, 3098, 3099, 3100, 3101, 3102, 3103, 3104, 3105, 3106, 3107, 3108, 3109, 3110, 3111, 3112, 3113, 3114, 3115, 3116, 3117, 3118, 3119, 3120, 3121, 3122, 3123, 3124, 3125, 3126, 3127, 3128, 3129, 3130, 3131, 3132, 3133, 3134, 3135, 3136, 3137, 3138, 3139, 3140, 3141, 3142, 3143, 3144, 3145, 3146, 3147, 3148, 3149, 3150, 3151, 3152, 3153, 3154, 3155, 3156, 3157, 3158, 3159, 3160, 3161, 3162, 3163, 3164, 3165, 3166, 3167, 3168, 3169, 3170, 3171, 3172, 3173, 3174, 3175, 3176, 3177, 3178, 3179, 3180, 3181, 3182, 3183, 3184, 3185, 3186, 3187, 3188, 3189, 3190, 3191, 3192, 3193, 3194, 3195, 3196, 3197, 3198, 3199, 3200, 3201, 3202, 3203, 3204, 3205, 3206, 3207, 3208, 3209, 3210, 3211, 3212, 3213, 3214, 3215, 3216, 3217, 3218, 3219, 3220, 3221, 3222, 3223, 3224, 3225, 3226, 3227, 3228, 3229, 3230, 3231, 3232, 3233, 3234, 3235, 3236, 3237, 3238, 3239, 3240, 3241, 3242, 3243, 3244, 3245, 3246, 3247, 3248, 3249, and 3250 nucleotides. The length of any filler region for the viral genome may be 50-100, 100-150, 150-200, 200-250, 250-300, 300-350, 350-400, 400-450, 450-500, 500-550, 550-600, 600-650, 650-700, 700-750, 750-800, 800-850, 850-900, 900-950, 950-1000, 1000-1050, 1050-1100, 1100-1150, 1150-1200, 1200-1250, 1250-1300, 1300-1350, 1350-1400, 1400-1450, 1450-1500, 1500-1550, 1550-1600, 1600-1650, 1650-1700, 1700-1750, 1750-1800, 1800-1850, 1850-1900, 1900-1950, 1950-2000, 2000-2050, 2050-2100, 2100-2150, 2150-2200, 2200-2250, 2250-2300, 2300-2350, 2350-2400, 2400-2450, 2450-2500, 2500-2550, 2550-2600, 2600-2650, 2650-2700, 2700-2750, 2750-2800, 2800-2850, 2850-2900, 2900-2950, 2950-3000, 3000-3050, 3050-3100, 3100-3150, 3150-3200, and 3200-3250 nucleotides. As a non-limiting example, the viral genome comprises a filler region that is about 55 nucleotides in length. As a non-limiting example, the viral genome comprises a filler region that is about 56 nucleotides in length. As a non-limiting example, the viral genome comprises a filler region that is about 97 nucleotides in length. As a non-limiting example, the viral genome comprises a filler region that is about 103 nucleotides in length. As a non-limiting example, the viral genome comprises a filler region that is about 105 nucleotides in length. As a non-limiting example, the viral genome comprises a filler region that is about 357 nucleotides in length. As a non-limiting example, the viral genome comprises a filler region that is about 363 nucleotides in length. As a non-limiting example, the viral genome comprises a filler region that is about 712 nucleotides in length. As a non-limiting example, the viral genome comprises a filler region that is about 714 nucleotides in length. As a non-limiting example, the viral genome comprises a filler region that is about 1203 nucleotides in length. As a non-limiting example, the viral genome comprises a filler region that is about 1209 nucleotides in length. As a non-limiting example, the viral genome comprises a filler region that is about 1512 nucleotides in length. As a non-limiting example, the viral genome comprises a filler region that is about 1519 nucleotides in length. As a non-limiting example, the viral genome comprises a filler region that is about 2395 nucleotides in length. As a non-limiting example, the viral genome comprises a filler region that is about 2403 nucleotides in length. As a non-limiting example, the viral genome comprises a filler region that is about 2405 nucleotides in length. As a non-limiting example, the viral genome comprises a filler region that is about 3013 nucleotides in length. As a non-limiting example, the viral genome comprises a filler region that is about 3021 nucleotides in length.

[0701] In one embodiment, the AAV particle viral genome comprises at least one filler sequence regions. Non-limiting examples of filler sequence regions are described in Table 19.

TABLE 19
Filler Sequence Regions

| Sequence Region Name | SEQ ID NO |
|---|---|
| FILL1 | 1796 |
| FILL2 | 1797 |
| FILL3 | 1798 |
| FILL4 | 1799 |
| FILL5 | 1800 |
| FILL6 | 1801 |
| FILL7 | 1802 |
| FILL8 | 1803 |
| FILL9 | 1804 |
| FILL10 | 1805 |
| FILL11 | 1806 |
| FILL12 | 1807 |
| FILL13 | 1808 |
| FILL14 | 1809 |
| FILL15 | 1810 |
| FILL16 | 1811 |
| FILL17 | 1812 |
| FILL18 | 1813 |

[0702] In one embodiment, the AAV particle viral genome comprises one filler sequence region. In one embodiment, the filler sequence region is the FILL1 sequence region. In one embodiment, the filler sequence region is the FILL2 sequence region. In one embodiment, the filler sequence region is the FILL3 sequence region. In one embodiment, the filler sequence region is the FILL4 sequence region. In one embodiment, the filler sequence region is the FILL5 sequence region. In one embodiment, the filler sequence region is the FILL6 sequence region. In one embodiment, the filler sequence region is the FILL7 sequence region. In one embodiment, the filler sequence region is the FILL8 sequence region. In one embodiment, the filler sequence region is the FILL9 sequence region. In one embodiment, the filler sequence region is the FILL10 sequence region. In one embodiment, the filler sequence region is the FILL11 sequence region. In one embodiment, the filler sequence region is the FILL12 sequence region. In one embodiment, the filler sequence region is the FILL13 sequence region. In one embodiment, the filler sequence region is the FILL14 sequence region. In one embodiment, the filler sequence region is the FILL15 sequence region. In one embodiment, the filler sequence region is the FILL16 sequence region. In one embodiment, the filler sequence region is the FILL17 sequence region. In one embodiment, the filler sequence region is the FILL18 sequence region.

[0703] In one embodiment, the AAV particle viral genome comprises two filler sequence regions. In one embodiment, the two filler sequence regions are the FILL1 sequence region, and the FILL2 sequence region. In one embodiment, the filler sequence region is the FILL1 sequence region, and the FILL3 sequence region. In one embodiment, the filler sequence region is the FILL1 sequence region, and the FILL4 sequence region. In one embodiment, the filler sequence region is the FILL1 sequence region, and the FILL5 sequence region. In one embodiment, the filler sequence region is the FILL1 sequence region, and the FILL6 sequence region. In one embodiment, the filler sequence region is the FILL1 sequence region, and the FILL7 sequence region. In one embodiment, the filler sequence region is the FILL1 sequence region, and the FILL8 sequence region. In one embodiment, the filler sequence region is the FILL1 sequence region, and the FILL9 sequence region. In one embodiment, the filler sequence region is the FILL1 sequence region, and the FILL10 sequence region. In one embodiment, the filler sequence region is the FILL1 sequence region, and the FILL11 sequence region. In one embodiment, the filler sequence region is the FILL1 sequence region, and the FILL12 sequence region. In one embodiment, the filler sequence region is the FILL1 sequence region, and the FILL13 sequence region. In one embodiment, the filler sequence region is the FILL1 sequence region, and the FILL14 sequence region. In one embodiment, the filler sequence region is the FILL1 sequence region, and the FILL15 sequence region. In one embodiment, the filler sequence region is the FILL1 sequence region, and the FILL16 sequence region. In one embodiment, the filler sequence region is the FILL1 sequence region, and the FILL17 sequence region. In one embodiment, the filler sequence region is the FILL1 sequence region, and the FILL18 sequence region. In one embodiment, the filler sequence region is the FILL2 sequence region, and the FILL3 sequence region. In one embodiment, the filler sequence region is the FILL3 sequence region, and the FILL4 sequence region. In one embodiment, the filler sequence region is the FILL3 sequence region, and the FILL5 sequence region. In one embodiment, the filler sequence region is the FILL3 sequence region, and the FILL6 sequence region. In one embodiment, the filler sequence region is the FILL3 sequence region, and the FILL7 sequence region. In one embodiment, the filler sequence region is the FILL3 sequence region, and the FILL8 sequence region. In one embodiment, the filler sequence region is the FILL3 sequence region, and the FILL9 sequence region. In one embodiment, the filler sequence region is the FILL3 sequence region, and the FILL10 sequence region. In one embodiment, the filler sequence region is the FILL3 sequence region, and the FILL11 sequence region. In one embodiment, the filler sequence region is the FILL3 sequence region, and the FILL12 sequence region. In one embodiment, the filler sequence region is the FILL3 sequence region, and the FILL13 sequence region. In one embodiment, the filler sequence region is the FILL3 sequence region, and the FILL14 sequence region. In one embodiment, the filler sequence region is the FILL3 sequence region, and the FILL15 sequence region. In one embodiment, the filler sequence region is the FILL3 sequence region, and the FILL16 sequence region. In one embodiment, the filler sequence region is the FILL3 sequence region, and the FILL17 sequence region. In one embodiment, the filler sequence region is the FILL3 sequence region, and the FILL18 sequence region. In one embodiment, the filler sequence region is the FILL4 sequence region, and the FILL5 sequence region. In one embodiment, the filler sequence region is the FILL4 sequence region, and the FILL6 sequence region. In one embodiment, the filler sequence region is the FILL4 sequence region, and the FILL7 sequence region. In one embodiment, the filler sequence region is the FILL4 sequence region, and the FILL8 sequence region. In one embodiment, the filler sequence region is the FILL4 sequence region, and the FILL9 sequence region. In one embodiment, the filler sequence region is the FILL4 sequence region, and the FILL10 sequence region. In one embodiment, the filler sequence region is the FILL4 sequence region, and the FILL11 sequence region. In one embodiment, the filler sequence region is the FILL4 sequence region, and the FILL12 sequence region. In one embodiment, the filler sequence region is the FILL4 sequence region, and the FILL13 sequence region. In one embodiment, the filler sequence region is the FILL4 sequence region, and the FILL14 sequence region. In one embodiment, the filler sequence region is the FILL4 sequence region, and the FILL15 sequence region. In one embodiment, the filler sequence region is the FILL4 sequence region, and the FILL16 sequence region. In one embodiment, the filler sequence region is the FILL4 sequence region, and the FILL17 sequence region. In one embodiment, the filler sequence region is the FILL4 sequence region, and the FILL18 sequence region. In one embodiment, the filler sequence region is the FILL5 sequence region, and the FILL6 sequence region. In one embodiment, the filler sequence region is the FILL5 sequence region, and the FILL7 sequence region. In one embodiment, the filler sequence region is the FILL5 sequence region, and the FILL8 sequence region. In one embodiment, the filler sequence region is the FILL5 sequence region, and the FILL9 sequence region. In one embodiment, the filler sequence region is the FILL5 sequence region, and the FILL10 sequence region. In one embodiment, the filler sequence region is the FILL5 sequence region, and the FILL11 sequence region. In one embodiment, the filler sequence region is the FILL5 sequence region, and the FILL12 sequence region. In one embodiment, the filler sequence region is the FILL5 sequence region, and the FILL13 sequence region. In one embodiment, the filler sequence region is the FILL5 sequence region, and the FILL14 sequence region. In one embodiment, the filler sequence region is the FILL5 sequence region, and the FILL15 sequence region. In one embodiment, the filler sequence region is the FILL5 sequence region, and the FILL16 sequence region. In one embodiment, the filler sequence region is the FILL5 sequence region, and the FILL17 sequence region. In one embodiment, the filler sequence region is the FILL5 sequence region, and the FILL18 sequence region. In one embodiment, the filler sequence region is the FILL6 sequence region, and the FILL7 sequence region. In one embodiment, the filler sequence region is the FILL6 sequence region, and the FILL8 sequence region. In one embodiment, the filler sequence region is the FILL6 sequence region, and the FILL9 sequence region. In one embodiment, the filler sequence region is the FILL6 sequence region, and the FILL10 sequence region. In one embodiment, the filler sequence region is the FILL6 sequence region, and the FILL11 sequence region. In one embodiment, the filler sequence region is the FILL6 sequence region, and the FILL12 sequence region. In one embodiment, the filler sequence region is the FILL6 sequence region, and the FILL13 sequence region. In one embodiment, the filler sequence region is the FILL6 sequence region, and the FILL14 sequence region. In one embodiment, the filler sequence region is the FILL6 sequence region, and the FILL15 sequence region. In one embodiment, the filler sequence region is the FILL6 sequence region, and the FILL16 sequence region. In one embodiment, the filler sequence region is the FILL6 sequence region, and the FILL17 sequence region. In one embodiment, the filler sequence region is the FILL6 sequence region, and the FILL18 sequence region. In one embodiment, the filler sequence region is the FILL7 sequence region, and the FILL8 sequence region. In one embodiment, the filler sequence region is the FILL7 sequence region, and the FILL9 sequence region. In one embodiment, the filler sequence region is the FILL7 sequence region, and the FILL10 sequence region. In one embodiment, the filler sequence region is the FILL7 sequence region, and the FILL11 sequence region. In one embodiment, the filler sequence region is the FILL7 sequence region, and the FILL12 sequence region. In one embodiment, the filler sequence region is the FILL7 sequence region, and the FILL13 sequence region. In one embodiment, the filler sequence region is the FILL7 sequence region, and the FILL14 sequence region. In one embodiment, the filler sequence region is the FILL7 sequence region, and the FILL15 sequence region. In one embodiment, the filler sequence region is the FILL7 sequence region, and the FILL16 sequence region. In one embodiment, the filler sequence region is the FILL7 sequence region, and the FILL17 sequence region. In one embodiment, the filler sequence region is the FILL7 sequence region, and the FILL18 sequence region. In one embodiment, the filler sequence region is the FILL8 sequence region, and the FILL9 sequence region. In one embodiment, the filler sequence region is the FILL8 sequence region, and the FILL10 sequence region. In one embodiment, the filler sequence region is the FILL8 sequence region, and the FILL11 sequence region. In one embodiment, the filler sequence region is the FILL8 sequence region, and the FILL12 sequence region. In one embodiment, the filler sequence region is the FILL8 sequence region, and the FILL13 sequence region. In one embodiment, the filler sequence region is the FILL8 sequence region, and the FILL14 sequence region. In one embodiment, the filler sequence region is the FILL8 sequence region, and the FILL15 sequence region. In one embodiment, the filler sequence region is the FILL8 sequence region, and the FILL16 sequence region. In one embodiment, the filler sequence region is the FILL8 sequence region, and the FILL17 sequence region. In one embodiment, the filler sequence region is the FILL8 sequence region, and the FILL18 sequence region. In one embodiment, the filler sequence region is the FILL9 sequence region, and the FILL10 sequence region. In one embodiment, the filler sequence region is the FILL9 sequence region, and the FILL11 sequence region. In one embodiment, the filler sequence region is the FILL9 sequence region, and the FILL12 sequence region. In one embodiment, the filler sequence region is the FILL9 sequence region, and the FILL13 sequence region. In one embodiment, the filler sequence region is the FILL9 sequence region, and the FILL14 sequence region. In one embodiment, the filler sequence region is the FILL9 sequence region, and the FILL15 sequence region. In one embodiment, the filler sequence region is the FILL9 sequence region, and the FILL16 sequence region. In one embodiment, the filler sequence region is the FILL9 sequence region, and the FILL17 sequence region. In one embodiment, the filler sequence region is the FILL9 sequence region, and the FILL18 sequence region. In one embodiment, the filler sequence region is the FILL10 sequence region, and the FILL11 sequence region. In one embodiment, the filler sequence region is the FILL10 sequence region, and the FILL12 sequence region. In one embodiment, the filler sequence region is the FILL10 sequence region, and the FILL13 sequence region. In one embodiment, the filler sequence region is the FILL10 sequence region, and the FILL14 sequence region. In one embodiment, the filler sequence region is the FILL10 sequence region, and the FILL15 sequence region. In one embodiment, the filler sequence region is the FILL10 sequence region, and the FILL16 sequence region. In one embodiment, the filler sequence region is the FILL10 sequence region, and the FILL17 sequence region. In one embodiment, the filler sequence region is the FILL10 sequence region, and the FILL18 sequence region. In one embodiment, the filler sequence region is the FILL11 sequence region, and the FILL12 sequence region. In one embodiment, the filler sequence region is the FILL11 sequence region, and the FILL13 sequence region. In one embodiment, the filler sequence region is the FILL11 sequence region, and the FILL14 sequence region. In one embodiment, the filler sequence region is the FILL11 sequence region, and the FILL15 sequence region. In one embodiment, the filler sequence region is the FILL11 sequence region, and the FILL16 sequence region. In one embodiment, the filler sequence region is the FILL11 sequence region, and the FILL17 sequence region. In one embodiment, the filler sequence region is the FILL11 sequence region, and the FILL18 sequence region. In one embodiment, the filler sequence region is the FILL12 sequence region, and the FILL13 sequence region. In one embodiment, the filler sequence region is the FILL12 sequence region, and the FILL14 sequence region. In one embodiment, the filler sequence region is the FILL12 sequence region, and the FILL15 sequence region. In one embodiment, the filler sequence region is the FILL12 sequence region, and the FILL16 sequence region. In one embodiment, the filler sequence region is the FILL12 sequence region, and the FILL17 sequence region. In one embodiment, the filler sequence region is the FILL12 sequence region, and the FILL18 sequence region. In one embodiment, the filler sequence region is the FILL13 sequence region, and the FILL14 sequence region. In one embodiment, the filler sequence region is the FILL13 sequence region, and the FILL15 sequence region. In one embodiment, the filler sequence region is the FILL13 sequence region, and the FILL16 sequence region. In one embodiment, the filler sequence region is the FILL13 sequence region, and the FILL17 sequence region. In one embodiment, the filler sequence region is the FILL13 sequence region, and the FILL18 sequence region. In one embodiment, the filler sequence region is the FILL14 sequence region, and the FILL15 sequence region. In one embodiment, the filler sequence region is the FILL14 sequence region, and the FILL16 sequence region. In one embodiment, the filler sequence region is the FILL14 sequence region, and the FILL17 sequence region. In one embodiment, the filler sequence region is the FILL14 sequence region, and the FILL18 sequence region. In one embodiment, the filler sequence region is the FILL15 sequence region, and the FILL16 sequence region. In one embodiment, the filler sequence region is the FILL15 sequence region, and the FILL17 sequence region. In one embodiment, the filler sequence region is the FILL15 sequence region, and the FILL18 sequence region. In one embodiment, the filler sequence region is the FILL16 sequence region, and the FILL17 sequence region. In one embodiment, the filler sequence region is the FILL16 sequence region, and the FILL18 sequence region. In one embodiment, the filler sequence region is the FILL17 sequence region, and the FILL18 sequence region.

[0704] In one embodiment, the AAV particle viral genome comprises three filler sequence regions. In one embodiment, the two filler sequence regions are the FILL1 sequence region, the FILL2 sequence region, and the FILL3 sequence region. In one embodiment, the filler sequence region is the FILL1 sequence region, the FILL2 sequence region, and the FILL4 sequence region. In one embodiment, the filler sequence region is the FILL1 sequence region, the FILL2 sequence region, and the FILL5 sequence region. In one embodiment, the filler sequence region is the FILL1 sequence region, the FILL2 sequence region, and the FILL6 sequence region. In one embodiment, the filler sequence region is the FILL1 sequence region, the FILL2 sequence region, and the FILL7 sequence region. In one embodiment, the filler sequence region is the FILL1 sequence region, the FILL2 sequence region, and the FILL8 sequence region. In one embodiment, the filler sequence region is the FILL1 sequence region, the FILL2 sequence region, and the FILL9 sequence region. In one embodiment, the filler sequence region is the FILL1 sequence region, the FILL2 sequence region, and the FILL10 sequence region. In one embodiment, the filler sequence region is the FILL1 sequence region, the FILL2 sequence region, and the FILL11 sequence region. In one embodiment, the filler sequence region is the FILL1 sequence region, the FILL2 sequence region, and the FILL12 sequence region. In one embodiment, the filler sequence region is the FILL1 sequence region, the FILL2 sequence region, and the FILL13 sequence region. In one embodiment, the filler sequence region is the FILL1 sequence region, the FILL2 sequence region, and the FILL14 sequence region. In one embodiment, the filler sequence region is the FILL1 sequence region, the FILL2 sequence region, and the FILL15 sequence region. In one embodiment, the filler sequence region is the FILL1 sequence region, the FILL2 sequence region, and the FILL16 sequence region. In one embodiment, the filler sequence region is the FILL1 sequence region, the FILL2 sequence region, and the FILL17 sequence region. In one embodiment, the filler sequence region is the FILL1 sequence region, the FILL2 sequence region, and the FILL18 sequence region. In one embodiment, the filler sequence region is the FILL1 sequence region, the FILL3 sequence region, and the FILL4 sequence region. In one embodiment, the filler sequence region is the FILL1 sequence region, the FILL3 sequence region, and the FILL5 sequence region. In one embodiment, the filler sequence region is the FILL1 sequence region, the FILL3 sequence region, and the FILL6 sequence region. In one embodiment, the filler sequence region is the FILL1 sequence region, the FILL3 sequence region, and the FILL7 sequence region. In one embodiment, the filler sequence region is the FILL1 sequence region, the FILL3 sequence region, and the FILL8 sequence region. In one embodiment, the filler sequence region is the FILL1 sequence region, the FILL3 sequence region, and the FILL9 sequence region. In one embodiment, the filler sequence region is the FILL1 sequence region, the FILL3 sequence region, and the FILL10 sequence region. In one embodiment, the filler sequence region is the FILL1 sequence region, the FILL3 sequence region, and the FILL11 sequence region. In one embodiment, the filler sequence region is the FILL1 sequence region, the FILL3 sequence region, and the FILL12 sequence region. In one embodiment, the filler sequence region is the FILL1 sequence region, the FILL3 sequence region, and the FILL13 sequence region. In one embodiment, the filler sequence region is the FILL1 sequence region, the FILL3 sequence region, and the FILL14 sequence region. In one embodiment, the filler sequence region is the FILL1 sequence region, the FILL3 sequence region, and the FILL15 sequence region. In one embodiment, the filler sequence region is the FILL1 sequence region, the FILL3 sequence region, and the FILL16 sequence region. In one embodiment, the filler sequence region is the FILL1 sequence region, the FILL3 sequence region, and the FILL17 sequence region. In one embodiment, the filler sequence region is the FILL1 sequence region, the FILL3 sequence region, and the FILL18 sequence region. In one embodiment, the filler sequence region is the FILL1 sequence region, the FILL4 sequence region, and the FILL5 sequence region. In one embodiment, the filler sequence region is the FILL1 sequence region, the FILL4 sequence region, and the FILL6 sequence region. In one embodiment, the filler sequence region is the FILL1 sequence region, the FILL4 sequence region, and the FILL7 sequence region. In one embodiment, the filler sequence region is the FILL1 sequence region, the FILL4 sequence region, and the FILL8 sequence region. In one embodiment, the filler sequence region is the FILL1 sequence region, the FILL4 sequence region, and the FILL9 sequence region. In one embodiment, the filler sequence region is the FILL1 sequence region, the FILL4 sequence region, and the FILL10 sequence region. In one embodiment, the filler sequence region is the FILL1 sequence region, the FILL4 sequence region, and the FILL11 sequence region. In one embodiment, the filler sequence region is the FILL1 sequence region, the FILL4 sequence region, and the FILL12 sequence region. In one embodiment, the filler sequence region is the FILL1 sequence region, the FILL4 sequence region, and the FILL13 sequence region. In one embodiment, the filler sequence region is the FILL1 sequence region, the FILL4 sequence region, and the FILL14 sequence region. In one embodiment, the filler sequence region is the FILL1 sequence region, the FILL4 sequence region, and the FILL15 sequence region. In one embodiment, the filler sequence region is the FILL1 sequence region, the FILL4 sequence region, and the FILL16 sequence region. In one embodiment, the filler sequence region is the FILL1 sequence region, the FILL4 sequence region, and the FILL17 sequence region. In one embodiment, the filler sequence region is the FILL1 sequence region, the FILL4 sequence region, and the FILL18 sequence region. In one embodiment, the filler sequence region is the FILL1 sequence region, the FILL5 sequence region, and the FILL6 sequence region. In one embodiment, the filler sequence region is the FILL1 sequence region, the FILL5 sequence region, and the FILL7 sequence region. In one embodiment, the filler sequence region is the FILL1 sequence region, the FILL5 sequence region, and the FILL8 sequence region. In one embodiment, the filler sequence region is the FILL1 sequence region, the FILL5 sequence region, and the FILL9 sequence region. In one embodiment, the filler sequence region is the FILL1 sequence region, the FILL5 sequence region, and the FILL10 sequence region. In one embodiment, the filler sequence region is the FILL1 sequence region, the FILL5 sequence region, and the FILL11 sequence region. In one embodiment, the filler sequence region is the FILL1 sequence region, the FILL5 sequence region, and the FILL12 sequence region. In one embodiment, the filler sequence region is the FILL1 sequence region, the FILL5 sequence region, and the FILL13 sequence region. In one embodiment, the filler sequence region is the FILL1 sequence region, the FILL5 sequence region, and the FILL14 sequence region. In one embodiment, the filler sequence region is the FILL1 sequence region, the FILL5 sequence region, and the FILL15 sequence region. In one embodiment, the filler sequence region is the FILL1 sequence region, the FILL5 sequence region, and the FILL16 sequence region. In one embodiment, the filler sequence region is the FILL1 sequence region, the FILL5 sequence region, and the FILL17 sequence region. In one embodiment, the filler sequence region is the FILL1 sequence region, the FILL5 sequence region, and the FILL18 sequence region. In one embodiment, the filler sequence region is the FILL1 sequence region, the FILL6 sequence region, and the FILL7 sequence region. In one embodiment, the filler sequence region is the FILL1 sequence region, the FILL6 sequence region, and the FILL8 sequence region. In one embodiment, the filler sequence region is the FILL1 sequence region, the FILL6 sequence region, and the FILL9 sequence region. In one embodiment, the filler sequence region is the FILL1 sequence region, the FILL6 sequence region, and the FILL10 sequence region. In one embodiment, the filler sequence region is the FILL1 sequence region, the FILL6 sequence region, and the FILL11 sequence region. In one embodiment, the filler sequence region is the FILL1 sequence region, the FILL6 sequence region, and the FILL12 sequence region. In one embodiment, the filler sequence region is the FILL1 sequence region, the FILL6 sequence region, and the FILL13 sequence region. In one embodiment, the filler sequence region is the FILL1 sequence region, the FILL6 sequence region, and the FILL14 sequence region. In one embodiment, the filler sequence region is the FILL1 sequence region, the FILL6 sequence region, and the FILL15 sequence region. In one embodiment, the filler sequence region is the FILL1 sequence region, the FILL6 sequence region, and the FILL16 sequence region. In one embodiment, the filler sequence region is the FILL1 sequence region, the FILL6 sequence region, and the FILL17 sequence region. In one embodiment, the filler sequence region is the FILL1 sequence region, the FILL6 sequence region, and the FILL18 sequence region. In one embodiment, the filler sequence region is the FILL1 sequence region, the FILL7 sequence region, and the FILL8 sequence region. In one embodiment, the filler sequence region is the FILL1 sequence region, the FILL7 sequence region, and the FILL9 sequence region. In one embodiment, the filler sequence region is the FILL1 sequence region, the FILL7 sequence region, and the FILL10 sequence region. In one embodiment, the filler sequence region is the FILL1 sequence region, the FILL7 sequence region, and the FILL11 sequence region. In one embodiment, the filler sequence region is the FILL1 sequence region, the FILL7 sequence region, and the FILL12 sequence region. In one embodiment, the filler sequence region is the FILL1 sequence region, the FILL7 sequence region, and the FILL13 sequence region. In one embodiment, the filler sequence region is the FILL1 sequence region, the FILL7 sequence region, and the FILL14 sequence region. In one embodiment, the filler sequence region is the FILL1 sequence region, the FILL7 sequence region, and the FILL15 sequence region. In one embodiment, the filler sequence region is the FILL1 sequence region, the FILL7 sequence region, and the FILL16 sequence region. In one embodiment, the filler sequence region is the FILL1 sequence region, the FILL7 sequence region, and the FILL17 sequence region. In one embodiment, the filler sequence region is the FILL1 sequence region, the FILL7 sequence region, and the FILL18 sequence region. In one embodiment, the filler sequence region is the FILL1 sequence region, the FILL8 sequence region, and the FILL9 sequence region. In one embodiment, the filler sequence region is the FILL1 sequence region, the FILL8 sequence region, and the FILL10 sequence region. In one embodiment, the filler sequence region is the FILL1 sequence region, the FILL8 sequence region, and the FILL11 sequence region. In one embodiment, the filler sequence region is the FILL1 sequence region, the FILL8 sequence region, and the FILL12 sequence region. In one embodiment, the filler sequence region is the FILL1 sequence region, the FILL8 sequence region, and the FILL13 sequence region. In one embodiment, the filler sequence region is the FILL1 sequence region, the FILL8 sequence region, and the FILL14 sequence region. In one embodiment, the filler sequence region is the FILL1 sequence region, the FILL8 sequence region, and the FILL15 sequence region. In one embodiment, the filler sequence region is the FILL1 sequence region, the FILL8 sequence region, and the FILL16 sequence region. In one embodiment, the filler sequence region is the FILL1 sequence region, the FILL8 sequence region, and the FILL17 sequence region. In one embodiment, the filler sequence region is the FILL1 sequence region, the FILL8 sequence region, and the FILL18 sequence region. In one embodiment, the filler sequence region is the FILL1 sequence region, the FILL9 sequence region, and the FILL10 sequence region. In one embodiment, the filler sequence region is the FILL1 sequence region, the FILL9 sequence region, and the FILL11 sequence region. In one embodiment, the filler sequence region is the FILL1 sequence region, the FILL9 sequence region, and the FILL12 sequence region. In one embodiment, the filler sequence region is the FILL1 sequence region, the FILL9 sequence region, and the FILL13 sequence region. In one embodiment, the filler sequence region is the FILL1 sequence region, the FILL9 sequence region, and the FILL14 sequence region. In one embodiment, the filler sequence region is the FILL1 sequence region, the FILL9 sequence region, and the FILL15 sequence region. In one embodiment, the filler sequence region is the FILL1 sequence region, the FILL9 sequence region, and the FILL16 sequence region. In one embodiment, the filler sequence region is the FILL1 sequence region, the FILL9 sequence region, and the FILL17 sequence region. In one embodiment, the filler sequence region is the FILL1 sequence region, the FILL9 sequence region, and the FILL18 sequence region. In one embodiment, the filler sequence region is the FILL1 sequence region, the FILL10 sequence region, and the FILL11 sequence region. In one embodiment, the filler sequence region is the FILL1 sequence region, the FILL10 sequence region, and the FILL12 sequence region. In one embodiment, the filler sequence region is the FILL1 sequence region, the FILL10 sequence region, and the FILL13 sequence region. In one embodiment, the filler sequence region is the FILL1 sequence region, the FILL10 sequence region, and the FILL14 sequence region. In one embodiment, the filler sequence region is the FILL1 sequence region, the FILL10 sequence region, and the FILL15 sequence region. In one embodiment, the filler sequence region is the FILL1 sequence region, the FILL10 sequence region, and the FILL16 sequence region. In one embodiment, the filler sequence region is the FILL1 sequence region, the FILL10 sequence region, and the FILL17 sequence region. In one embodiment, the filler sequence region is the FILL1 sequence region, the FILL10 sequence region, and the FILL18 sequence region. In one embodiment, the filler sequence region is the FILL1 sequence region, the FILL11 sequence region, and the FILL12 sequence region. In one embodiment, the filler sequence region is the FILL1 sequence region, the FILL11 sequence region, and the FILL13 sequence region. In one embodiment, the filler sequence region is the FILL1 sequence region, the FILL11 sequence region, and the FILL14 sequence region. In one embodiment, the filler sequence region is the FILL1 sequence region, the FILL11 sequence region, and the FILL15 sequence region. In one embodiment, the filler sequence region is the FILL1 sequence region, the FILL11 sequence region, and the FILL16 sequence region. In one embodiment, the filler sequence region is the FILL1 sequence region, the FILL11 sequence region, and the FILL17 sequence region. In one embodiment, the filler sequence region is the FILL1 sequence region, the FILL11 sequence region, and the FILL18 sequence region. In one embodiment, the filler sequence region is the FILL1 sequence region, the FILL12 sequence region, and the FILL13 sequence region. In one embodiment, the filler sequence region is the FILL1 sequence region, the FILL12 sequence region, and the FILL14 sequence region. In one embodiment, the filler sequence region is the FILL1 sequence region, the FILL12 sequence region, and the FILL15 sequence region. In one embodiment, the filler sequence region is the FILL1 sequence region, the FILL12 sequence region, and the FILL16 sequence region. In one embodiment, the filler sequence region is the FILL1 sequence region, the FILL12 sequence region, and the FILL17 sequence region. In one embodiment, the filler sequence region is the FILL1 sequence region, the FILL12 sequence region, and the FILL18 sequence region. In one embodiment, the filler sequence region is the FILL1 sequence region, the FILL13 sequence region, and the FILL14 sequence region. In one embodiment, the filler sequence region is the FILL1 sequence region, the FILL13 sequence region, and the FILL15 sequence region. In one embodiment, the filler sequence region is the FILL1 sequence region, the FILL13 sequence region, and the FILL16 sequence region. In one embodiment, the filler sequence region is the FILL1 sequence region, the FILL13 sequence region, and the FILL17 sequence region. In one embodiment, the filler sequence region is the FILL1 sequence region, the FILL13 sequence region, and the FILL18 sequence region. In one embodiment, the filler sequence region is the FILL1 sequence region, the FILL14 sequence region, and the FILL15 sequence region. In one embodiment, the filler sequence region is the FILL1 sequence region, the FILL14 sequence region, and the FILL16 sequence region. In one embodiment, the filler sequence region is the FILL1 sequence region, the FILL14 sequence region, and the FILL17 sequence region. In one embodiment, the filler sequence region is the FILL1 sequence region, the FILL14 sequence region, and the FILL18 sequence region. In one embodiment, the filler sequence region is the FILL1 sequence region, the FILL15 sequence region, and the FILL16 sequence region. In one embodiment, the filler sequence region is the FILL1 sequence region, the FILL15 sequence region, and the FILL17 sequence region. In one embodiment, the filler sequence region is the FILL1 sequence region, the FILL15 sequence region, and the FILL18 sequence region. In one embodiment, the filler sequence region is the FILL1 sequence region, the FILL16 sequence region, and the FILL17 sequence region. In one embodiment, the filler sequence region is the FILL1 sequence region, the FILL16 sequence region, and the FILL18 sequence region. In one embodiment, the filler sequence region is the FILL1 sequence region, the FILL17 sequence region, and the FILL18 sequence region. In one embodiment, the filler sequence region is the FILL2 sequence region, the FILL3 sequence region, and the FILL4 sequence region. In one embodiment, the filler sequence region is the FILL2 sequence region, the FILL3 sequence region, and the FILL5 sequence region. In one embodiment, the filler sequence region is the FILL2 sequence region, the FILL3 sequence region, and the FILL6 sequence region. In one embodiment, the filler sequence region is the FILL2 sequence region, the FILL3 sequence region, and the FILL7 sequence region. In one embodiment, the filler sequence region is the FILL2 sequence region, the FILL3 sequence region, and the FILL8 sequence region. In one embodiment, the filler sequence region is the FILL2 sequence region, the FILL3 sequence region, and the FILL9 sequence region. In one embodiment, the filler sequence region is the FILL2 sequence region, the FILL3 sequence region, and the FILL10 sequence region. In one embodiment, the filler sequence region is the FILL2 sequence region, the FILL3 sequence region, and the FILL11 sequence region. In one embodiment, the filler sequence region is the FILL2 sequence region, the FILL3 sequence region, and the FILL12 sequence region. In one embodiment, the filler sequence region is the FILL2 sequence region, the FILL3 sequence region, and the FILL13 sequence region. In one embodiment, the filler sequence region is the FILL2 sequence region, the FILL3 sequence region, and the FILL14 sequence region. In one embodiment, the filler sequence region is the FILL2 sequence region, the FILL3 sequence region, and the FILL15 sequence region. In one embodiment, the filler sequence region is the FILL2 sequence region, the FILL3 sequence region, and the FILL16 sequence region. In one embodiment, the filler sequence region is the FILL2 sequence region, the FILL3 sequence region, and the FILL17 sequence region. In one embodiment, the filler sequence region is the FILL2 sequence region, the FILL3 sequence region, and the FILL18 sequence region. In one embodiment, the filler sequence region is the FILL2 sequence region, the FILL4 sequence region, and the FILL5 sequence region. In one embodiment, the filler sequence region is the FILL2 sequence region, the FILL4 sequence region, and the FILL6 sequence region. In one embodiment, the filler sequence region is the FILL2 sequence region, the FILL4 sequence region, and the FILL7 sequence region. In one embodiment, the filler sequence region is the FILL2 sequence region, the FILL4 sequence region, and the FILL8 sequence region. In one embodiment, the filler sequence region is the FILL2 sequence region, the FILL4 sequence region, and the FILL9 sequence region. In one embodiment, the filler sequence region is the FILL2 sequence region, the FILL4 sequence region, and the FILL10 sequence region. In one embodiment, the filler sequence region is the FILL2 sequence region, the FILL4 sequence region, and the FILL11 sequence region. In one embodiment, the filler sequence region is the FILL2 sequence region, the FILL4 sequence region, and the FILL12 sequence region. In one embodiment, the filler sequence region is the FILL2 sequence region, the FILL4 sequence region, and the FILL13 sequence region. In one embodiment, the filler sequence region is the FILL2 sequence region, the FILL4 sequence region, and the FILL14 sequence region. In one embodiment, the filler sequence region is the FILL2 sequence region, the FILL4 sequence region, and the FILL15 sequence region. In one embodiment, the filler sequence region is the FILL2 sequence region, the FILL4 sequence region, and the FILL16 sequence region. In one embodiment, the filler sequence region is the FILL2 sequence region, the FILL4 sequence region, and the FILL17 sequence region. In one embodiment, the filler sequence region is the FILL2 sequence region, the FILL4 sequence region, and the FILL18 sequence region. In one embodiment, the filler sequence region is the FILL2 sequence region, the FILL5 sequence region, and the FILL6 sequence region. In one embodiment, the filler sequence region is the FILL2 sequence region, the FILL5 sequence region, and the FILL7 sequence region. In one embodiment, the filler sequence region is the FILL2 sequence region, the FILL5 sequence region, and the FILL8 sequence region. In one embodiment, the filler sequence region is the FILL2 sequence region, the FILL5 sequence region, and the FILL9 sequence region. In one embodiment, the filler sequence region is the FILL2 sequence region, the FILL5 sequence region, and the FILL10 sequence region. In one embodiment, the filler sequence region is the FILL2 sequence region, the FILL5 sequence region, and the FILL11 sequence region. In one embodiment, the filler sequence region is the FILL2 sequence region, the FILL5 sequence region, and the FILL12 sequence region. In one embodiment, the filler sequence region is the FILL2 sequence region, the FILL5 sequence region, and the FILL13 sequence region. In one embodiment, the filler sequence region is the FILL2 sequence region, the FILL5 sequence region, and the FILL14 sequence region. In one embodiment, the filler sequence region is the FILL2 sequence region, the FILL5 sequence region, and the FILL15 sequence region. In one embodiment, the filler sequence region is the FILL2 sequence region, the FILL5 sequence region, and the FILL16 sequence region. In one embodiment, the filler sequence region is the FILL2 sequence region, the FILL5 sequence region, and the FILL17 sequence region. In one embodiment, the filler sequence region is the FILL2 sequence region, the FILL5 sequence region, and the FILL18 sequence region. In one embodiment, the filler sequence region is the FILL2 sequence region, the FILL6 sequence region, and the FILL7 sequence region. In one embodiment, the filler sequence region is the FILL2 sequence region, the FILL6 sequence region, and the FILL8 sequence region. In one embodiment, the filler sequence region is the FILL2 sequence region, the FILL6 sequence region, and the FILL9 sequence region. In one embodiment, the filler sequence region is the FILL2 sequence region, the FILL6 sequence region, and the FILL10 sequence region. In one embodiment, the filler sequence region is the FILL2 sequence region, the FILL6 sequence region, and the FILL11 sequence region. In one embodiment, the filler sequence region is the FILL2 sequence region, the FILL6 sequence region, and the FILL12 sequence region. In one embodiment, the filler sequence region is the FILL2 sequence region, the FILL6 sequence region, and the FILL13 sequence region. In one embodiment, the filler sequence region is the FILL2 sequence region, the FILL6 sequence region, and the FILL14 sequence region. In one embodiment, the filler sequence region is the FILL2 sequence region, the FILL6 sequence region, and the FILL15 sequence region. In one embodiment, the filler sequence region is the FILL2 sequence region, the FILL6 sequence region, and the FILL16 sequence region. In one embodiment, the filler sequence region is the FILL2 sequence region, the FILL6 sequence region, and the FILL17 sequence region. In one embodiment, the filler sequence region is the FILL2 sequence region, the FILL6 sequence region, and the FILL18 sequence region. In one embodiment, the filler sequence region is the FILL2 sequence region, the FILL7 sequence region, and the FILL8 sequence region. In one embodiment, the filler sequence region is the FILL2 sequence region, the FILL7 sequence region, and the FILL9 sequence region. In one embodiment, the filler sequence region is the FILL2 sequence region, the FILL7 sequence region, and the FILL10 sequence region. In one embodiment, the filler sequence region is the FILL2 sequence region, the FILL7 sequence region, and the FILL11 sequence region. In one embodiment, the filler sequence region is the FILL2 sequence region, the FILL7 sequence region, and the FILL12 sequence region. In one embodiment, the filler sequence region is the FILL2 sequence region, the FILL7 sequence region, and the FILL13 sequence region. In one embodiment, the filler sequence region is the FILL2 sequence region, the FILL7 sequence region, and the FILL14 sequence region. In one embodiment, the filler sequence region is the FILL2 sequence region, the FILL7 sequence region, and the FILL15 sequence region. In one embodiment, the filler sequence region is the FILL2 sequence region, the FILL7 sequence region, and the FILL16 sequence region. In one embodiment, the filler sequence region is the FILL2 sequence region, the FILL7 sequence region, and the FILL17 sequence region. In one embodiment, the filler sequence region is the FILL2 sequence region, the FILL7 sequence region, and the FILL18 sequence region. In one embodiment, the filler sequence region is the FILL2 sequence region, the FILL8 sequence region, and the FILL9 sequence region. In one embodiment, the filler sequence region is the FILL2 sequence region, the FILL8 sequence region, and the FILL10 sequence region. In one embodiment, the filler sequence region is the FILL2 sequence region, the FILL8 sequence region, and the FILL11 sequence region. In one embodiment, the filler sequence region is the FILL2 sequence region, the FILL8 sequence region, and the FILL12 sequence region. In one embodiment, the filler sequence region is the FILL2 sequence region, the FILL8 sequence region, and the FILL13 sequence region. In one embodiment, the filler sequence region is the FILL2 sequence region, the FILL8 sequence region, and the FILL14 sequence region. In one embodiment, the filler sequence region is the FILL2 sequence region, the FILL8 sequence region, and the FILL15 sequence region. In one embodiment, the filler sequence region is the FILL2 sequence region, the FILL8 sequence region, and the FILL16 sequence region. In one embodiment, the filler sequence region is the FILL2 sequence region, the FILL8 sequence region, and the FILL17 sequence region. In one embodiment, the filler sequence region is the FILL2 sequence region, the FILL8 sequence region, and the FILL18 sequence region. In one embodiment, the filler sequence region is the FILL2 sequence region, the FILL9 sequence region, and the FILL10 sequence region. In one embodiment, the filler sequence region is the FILL2 sequence region, the FILL9 sequence region, and the FILL11 sequence region. In one embodiment, the filler sequence region is the FILL2 sequence region, the FILL9 sequence region, and the FILL12 sequence region. In one embodiment, the filler sequence region is the FILL2 sequence region, the FILL9 sequence region, and the FILL13 sequence region. In one embodiment, the filler sequence region is the FILL2 sequence region, the FILL9 sequence region, and the FILL14 sequence region. In one embodiment, the filler sequence region is the FILL2 sequence region, the FILL9 sequence region, and the FILL15 sequence region. In one embodiment, the filler sequence region is the FILL2 sequence region, the FILL9 sequence region, and the FILL16 sequence region. In one embodiment, the filler sequence region is the FILL2 sequence region, the FILL9 sequence region, and the FILL17 sequence region. In one embodiment, the filler sequence region is the FILL2 sequence region, the FILL9 sequence region, and the FILL18 sequence region. In one embodiment, the filler sequence region is the FILL2 sequence region, the FILL10 sequence region, and the FILL11 sequence region. In one embodiment, the filler sequence region is the FILL2 sequence region, the FILL10 sequence region, and the FILL12 sequence region. In one embodiment, the filler sequence region is the FILL2 sequence region, the FILL10 sequence region, and the FILL13 sequence region. In one embodiment, the filler sequence region is the FILL2 sequence region, the FILL10 sequence region, and the FILL14 sequence region. In one embodiment, the filler sequence region is the FILL2 sequence region, the FILL10 sequence region, and the FILL15 sequence region. In one embodiment, the filler sequence region is the FILL2 sequence region, the FILL10 sequence region, and the FILL16 sequence region. In one embodiment, the filler sequence region is the FILL2 sequence region, the FILL10 sequence region, and the FILL17 sequence region. In one embodiment, the filler sequence region is the FILL2 sequence region, the FILL10 sequence region, and the FILL18 sequence region. In one embodiment, the filler sequence region is the FILL2 sequence region, the FILL11 sequence region, and the FILL12 sequence region. In one embodiment, the filler sequence region is the FILL2 sequence region, the FILL11 sequence region, and the FILL13 sequence region. In one embodiment, the filler sequence region is the FILL2 sequence region, the FILL11 sequence region, and the FILL14 sequence region. In one embodiment, the filler sequence region is the FILL2 sequence region, the FILL11 sequence region, and the FILL15 sequence region. In one embodiment, the filler sequence region is the FILL2 sequence region, the FILL11 sequence region, and the FILL16 sequence region. In one embodiment, the filler sequence region is the FILL2 sequence region, the FILL11 sequence region, and the FILL17 sequence region. In one embodiment, the filler sequence region is the FILL2 sequence region, the FILL11 sequence region, and the FILL18 sequence region. In one embodiment, the filler sequence region is the FILL2 sequence region, the FILL12 sequence region, and the FILL13 sequence region. In one embodiment, the filler sequence region is the FILL2 sequence region, the FILL12 sequence region, and the FILL14 sequence region. In one embodiment, the filler sequence region is the FILL2 sequence region, the FILL12 sequence region, and the FILL15 sequence region. In one embodiment, the filler sequence region is the FILL2 sequence region, the FILL12 sequence region, and the FILL16 sequence region. In one embodiment, the filler sequence region is the FILL2 sequence region, the FILL12 sequence region, and the FILL17 sequence region. In one embodiment, the filler sequence region is the FILL2 sequence region, the FILL12 sequence region, and the FILL18 sequence region. In one embodiment, the filler sequence region is the FILL2 sequence region, the FILL13 sequence region, and the FILL14 sequence region. In one embodiment, the filler sequence region is the FILL2 sequence region, the FILL13 sequence region, and the FILL15 sequence region. In one embodiment, the filler sequence region is the FILL2 sequence region, the FILL13 sequence region, and the FILL16 sequence region. In one embodiment, the filler sequence region is the FILL2 sequence region, the FILL13 sequence region, and the FILL17 sequence region. In one embodiment, the filler sequence region is the FILL2 sequence region, the FILL13 sequence region, and the FILL18 sequence region. In one embodiment, the filler sequence region is the FILL2 sequence region, the FILL14 sequence region, and the FILL15 sequence region. In one embodiment, the filler sequence region is the FILL2 sequence region, the FILL14 sequence region, and the FILL16 sequence region. In one embodiment, the filler sequence region is the FILL2 sequence region, the FILL14 sequence region, and the FILL17 sequence region. In one embodiment, the filler sequence region is the FILL2 sequence region, the FILL14 sequence region, and the FILL18 sequence region. In one embodiment, the filler sequence region is the FILL2 sequence region, the FILL15 sequence region, and the FILL16 sequence region. In one embodiment, the filler sequence region is the FILL2 sequence region, the FILL15 sequence region, and the FILL17 sequence region. In one embodiment, the filler sequence region is the FILL2 sequence region, the FILL15 sequence region, and the FILL18 sequence region. In one embodiment, the filler sequence region is the FILL2 sequence region, the FILL16 sequence region, and the FILL17 sequence region. In one embodiment, the filler sequence region is the FILL2 sequence region, the FILL16 sequence region, and the FILL18 sequence region. In one embodiment, the filler sequence region is the FILL2 sequence region, the FILL17 sequence region, and the FILL18 sequence region. In one embodiment, the filler sequence region is the FILL3 sequence region, the FILL4 sequence region, and the FILL5 sequence region. In one embodiment, the filler sequence region is the FILL3 sequence region, the FILL4 sequence region, and the FILL6 sequence region. In one embodiment, the filler sequence region is the FILL3 sequence region, the FILL4 sequence region, and the FILL7 sequence region. In one embodiment, the filler sequence region is the FILL3 sequence region, the FILL4 sequence region, and the FILL8 sequence region. In one embodiment, the filler sequence region is the FILL3 sequence region, the FILL4 sequence region, and the FILL9 sequence region. In one embodiment, the filler sequence region is the FILL3 sequence region, the FILL4 sequence region, and the FILL10 sequence region. In one embodiment, the filler sequence region is the FILL3 sequence region, the FILL4 sequence region, and the FILL11 sequence region. In one embodiment, the filler sequence region is the FILL3 sequence region, the FILL4 sequence region, and the FILL12 sequence region. In one embodiment, the filler sequence region is the FILL3 sequence region, the FILL4 sequence region, and the FILL13 sequence region. In one embodiment, the filler sequence region is the FILL3 sequence region, the FILL4 sequence region, and the FILL14 sequence region. In one embodiment, the filler sequence region is the FILL3 sequence region, the FILL4 sequence region, and the FILL15 sequence region. In one embodiment, the filler sequence region is the FILL3 sequence region, the FILL4 sequence region, and the FILL16 sequence region. In one embodiment, the filler sequence region is the FILL3 sequence region, the FILL4 sequence region, and the FILL17 sequence region. In one embodiment, the filler sequence region is the FILL3 sequence region, the FILL4 sequence region, and the FILL18 sequence region. In one embodiment, the filler sequence region is the FILL3 sequence region, the FILL5 sequence region, and the FILL6 sequence region. In one embodiment, the filler sequence region is the FILL3 sequence region, the FILL5 sequence region, and the FILL7 sequence region. In one embodiment, the filler sequence region is the FILL3 sequence region, the FILL5 sequence region, and the FILL8 sequence region. In one embodiment, the filler sequence region is the FILL3 sequence region, the FILL5 sequence region, and the FILL9 sequence region. In one embodiment, the filler sequence region is the FILL3 sequence region, the FILL5 sequence region, and the FILL10 sequence region. In one embodiment, the filler sequence region is the FILL3 sequence region, the FILL5 sequence region, and the FILL11 sequence region. In one embodiment, the filler sequence region is the FILL3 sequence region, the FILL5 sequence region, and the FILL12 sequence region. In one embodiment, the filler sequence region is the FILL3 sequence region, the FILL5 sequence region, and the FILL13 sequence region. In one embodiment, the filler sequence region is the FILL3 sequence region, the FILL5 sequence region, and the FILL14 sequence region. In one embodiment, the filler sequence region is the FILL3 sequence region, the FILL5 sequence region, and the FILL15 sequence region. In one embodiment, the filler sequence region is the FILL3 sequence region, the FILL5 sequence region, and the FILL16 sequence region. In one embodiment, the filler sequence region is the FILL3 sequence region, the FILL5 sequence region, and the FILL17 sequence region. In one embodiment, the filler sequence region is the FILL3 sequence region, the FILL5 sequence region, and the FILL18 sequence region. In one embodiment, the filler sequence region is the FILL3 sequence region, the FILL6 sequence region, and the FILL7 sequence region. In one embodiment, the filler sequence region is the FILL3 sequence region, the FILL6 sequence region, and the FILL8 sequence region. In one embodiment, the filler sequence region is the FILL3 sequence region, the FILL6 sequence region, and the FILL9 sequence region. In one embodiment, the filler sequence region is the FILL3 sequence region, the FILL6 sequence region, and the FILL10 sequence region. In one embodiment, the filler sequence region is the FILL3 sequence region, the FILL6 sequence region, and the FILL11 sequence region. In one embodiment, the filler sequence region is the FILL3 sequence region, the FILL6 sequence region, and the FILL12 sequence region. In one embodiment, the filler sequence region is the FILL3 sequence region, the FILL6 sequence region, and the FILL13 sequence region. In one embodiment, the filler sequence region is the FILL3 sequence region, the FILL6 sequence region, and the FILL14 sequence region. In one embodiment, the filler sequence region is the FILL3 sequence region, the FILL6 sequence region, and the FILL15 sequence region. In one embodiment, the filler sequence region is the FILL3 sequence region, the FILL6 sequence region, and the FILL16 sequence region. In one embodiment, the filler sequence region is the FILL3 sequence region, the FILL6 sequence region, and the FILL17 sequence region. In one embodiment, the filler sequence region is the FILL3 sequence region, the FILL6 sequence region, and the FILL18 sequence region. In one embodiment, the filler sequence region is the FILL3 sequence region, the FILL7 sequence region, and the FILL8 sequence region. In one embodiment, the filler sequence region is the FILL3 sequence region, the FILL7 sequence region, and the FILL9 sequence region. In one embodiment, the filler sequence region is the FILL3 sequence region, the FILL7 sequence region, and the FILL10 sequence region. In one embodiment, the filler sequence region is the FILL3 sequence region, the FILL7 sequence region, and the FILL11 sequence region. In one embodiment, the filler sequence region is the FILL3 sequence region, the FILL7 sequence region, and the FILL12 sequence region. In one embodiment, the filler sequence region is the FILL3 sequence region, the FILL7 sequence region, and the FILL13 sequence region. In one embodiment, the filler sequence region is the FILL3 sequence region, the FILL7 sequence region, and the FILL14 sequence region. In one embodiment, the filler sequence region is the FILL3 sequence region, the FILL7 sequence region, and the FILL15 sequence region. In one embodiment, the filler sequence region is the FILL3 sequence region, the FILL7 sequence region, and the FILL16 sequence region. In one embodiment, the filler sequence region is the FILL3 sequence region, the FILL7 sequence region, and the FILL17 sequence region. In one embodiment, the filler sequence region is the FILL3 sequence region, the FILL7 sequence region, and the FILL18 sequence region. In one embodiment, the filler sequence region is the FILL3 sequence region, the FILL8 sequence region, and the FILL9 sequence region. In one embodiment, the filler sequence region is the FILL3 sequence region, the FILL8 sequence region, and the FILL10 sequence region. In one embodiment, the filler sequence region is the FILL3 sequence region, the FILL8 sequence region, and the FILL11 sequence region. In one embodiment, the filler sequence region is the FILL3 sequence region, the FILL8 sequence region, and the FILL12 sequence region. In one embodiment, the filler sequence region is the FILL3 sequence region, the FILL8 sequence region, and the FILL13 sequence region. In one embodiment, the filler sequence region is the FILL3 sequence region, the FILL8 sequence region, and the FILL14 sequence region. In one embodiment, the filler sequence region is the FILL3 sequence region, the FILL8 sequence region, and the FILL15 sequence region. In one embodiment, the filler sequence region is the FILL3 sequence region, the FILL8 sequence region, and the FILL16 sequence region. In one embodiment, the filler sequence region is the FILL3 sequence region, the FILL8 sequence region, and the FILL17 sequence region. In one embodiment, the filler sequence region is the FILL3 sequence region, the FILL8 sequence region, and the FILL18 sequence region. In one embodiment, the filler sequence region is the FILL3 sequence region, the FILL9 sequence region, and the FILL10 sequence region. In one embodiment, the filler sequence region is the FILL3 sequence region, the FILL9 sequence region, and the FILL11 sequence region. In one embodiment, the filler sequence region is the FILL3 sequence region, the FILL9 sequence region, and the FILL12 sequence region. In one embodiment, the filler sequence region is the FILL3 sequence region, the FILL9 sequence region, and the FILL13 sequence region. In one embodiment, the filler sequence region is the FILL3 sequence region, the FILL9 sequence region, and the FILL14 sequence region. In one embodiment, the filler sequence region is the FILL3 sequence region, the FILL9 sequence region, and the FILL15 sequence region. In one embodiment, the filler sequence region is the FILL3 sequence region, the FILL9 sequence region, and the FILL16 sequence region. In one embodiment, the filler sequence region is the FILL3 sequence region, the FILL9 sequence region, and the FILL17 sequence region. In one embodiment, the filler sequence region is the FILL3 sequence region, the FILL9 sequence region, and the FILL18 sequence region. In one embodiment, the filler sequence region is the FILL3 sequence region, the FILL10 sequence region, and the FILL11 sequence region. In one embodiment, the filler sequence region is the FILL3 sequence region, the FILL10 sequence region, and the FILL12 sequence region. In one embodiment, the filler sequence region is the FILL3 sequence region, the FILL10 sequence region, and the FILL13 sequence region. In one embodiment, the filler sequence region is the FILL3 sequence region, the FILL10 sequence region, and the FILL14 sequence region. In one embodiment, the filler sequence region is the FILL3 sequence region, the FILL10 sequence region, and the FILL15 sequence region. In one embodiment, the filler sequence region is the FILL3 sequence region, the FILL10 sequence region, and the FILL16 sequence region. In one embodiment, the filler sequence region is the FILL3 sequence region, the FILL10 sequence region, and the FILL17 sequence region. In one embodiment, the filler sequence region is the FILL3 sequence region, the FILL10 sequence region, and the FILL18 sequence region. In one embodiment, the filler sequence region is the FILL3 sequence region, the FILL11 sequence region, and the FILL12 sequence region. In one embodiment, the filler sequence region is the FILL3 sequence region, the FILL11 sequence region, and the FILL13 sequence region. In one embodiment, the filler sequence region is the FILL3 sequence region, the FILL11 sequence region, and the FILL14 sequence region. In one embodiment, the filler sequence region is the FILL3 sequence region, the FILL11 sequence region, and the FILL15 sequence region. In one embodiment, the filler sequence region is the FILL3 sequence region, the FILL11 sequence region, and the FILL16 sequence region. In one embodiment, the filler sequence region is the FILL3 sequence region, the FILL11 sequence region, and the FILL17 sequence region. In one embodiment, the filler sequence region is the FILL3 sequence region, the FILL11 sequence region, and the FILL18 sequence region. In one embodiment, the filler sequence region is the FILL3 sequence region, the FILL12 sequence region, and the FILL13 sequence region. In one embodiment, the filler sequence region is the FILL3 sequence region, the FILL12 sequence region, and the FILL14 sequence region. In one embodiment, the filler sequence region is the FILL3 sequence region, the FILL12 sequence region, and the FILL15 sequence region. In one embodiment, the filler sequence region is the FILL3 sequence region, the FILL12 sequence region, and the FILL16 sequence region. In one embodiment, the filler sequence region is the FILL3 sequence region, the FILL12 sequence region, and the FILL17 sequence region. In one embodiment, the filler sequence region is the FILL3 sequence region, the FILL12 sequence region, and the FILL18 sequence region. In one embodiment, the filler sequence region is the FILL3 sequence region, the FILL13 sequence region, and the FILL14 sequence region. In one embodiment, the filler sequence region is the FILL3 sequence region, the FILL13 sequence region, and the FILL15 sequence region. In one embodiment, the filler sequence region is the FILL3 sequence region, the FILL13 sequence region, and the FILL16 sequence region. In one embodiment, the filler sequence region is the FILL3 sequence region, the FILL13 sequence region, and the FILL17 sequence region. In one embodiment, the filler sequence region is the FILL3 sequence region, the FILL13 sequence region, and the FILL18 sequence region. In one embodiment, the filler sequence region is the FILL3 sequence region, the FILL14 sequence region, and the FILL15 sequence region. In one embodiment, the filler sequence region is the FILL3 sequence region, the FILL14 sequence region, and the FILL16 sequence region. In one embodiment, the filler sequence region is the FILL3 sequence region, the FILL14 sequence region, and the FILL17 sequence region. In one embodiment, the filler sequence region is the FILL3 sequence region, the FILL14 sequence region, and the FILL18 sequence region. In one embodiment, the filler sequence region is the FILL3 sequence region, the FILL15 sequence region, and the FILL16 sequence region. In one embodiment, the filler sequence region is the FILL3 sequence region, the FILL15 sequence region, and the FILL17 sequence region. In one embodiment, the filler sequence region is the FILL3 sequence region, the FILL15 sequence region, and the FILL18 sequence region. In one embodiment, the filler sequence region is the FILL3 sequence region, the FILL16 sequence region, and the FILL17 sequence region. In one embodiment, the filler sequence region is the FILL3 sequence region, the FILL16 sequence region, and the FILL18 sequence region. In one embodiment, the filler sequence region is the FILL3 sequence region, the FILL17 sequence region, and the FILL18 sequence region. In one embodiment, the filler sequence region is the FILL4 sequence region, the FILL5 sequence region, and the FILL6 sequence region. In one embodiment, the filler sequence region is the FILL4 sequence region, the FILL5 sequence region, and the FILL7 sequence region. In one embodiment, the filler sequence region is the FILL4 sequence region, the FILL5 sequence region, and the FILL8 sequence region. In one embodiment, the filler sequence region is the FILL4 sequence region, the FILL5 sequence region, and the FILL9 sequence region. In one embodiment, the filler sequence region is the FILL4 sequence region, the FILL5 sequence region, and the FILL10 sequence region. In one embodiment, the filler sequence region is the FILL4 sequence region, the FILL5 sequence region, and the FILL11 sequence region. In one embodiment, the filler sequence region is the FILL4 sequence region, the FILL5 sequence region, and the FILL12 sequence region. In one embodiment, the filler sequence region is the FILL4 sequence region, the FILL5 sequence region, and the FILL13 sequence region. In one embodiment, the filler sequence region is the FILL4 sequence region, the FILL5 sequence region, and the FILL14 sequence region. In one embodiment, the filler sequence region is the FILL4 sequence region, the FILL5 sequence region, and the FILL15 sequence region. In one embodiment, the filler sequence region is the FILL4 sequence region, the FILL5 sequence region, and the FILL16 sequence region. In one embodiment, the filler sequence region is the FILL4 sequence region, the FILL5 sequence region, and the FILL17 sequence region. In one embodiment, the filler sequence region is the FILL4 sequence region, the FILL5 sequence region, and the FILL18 sequence region. In one embodiment, the filler sequence region is the FILL4 sequence region, the FILL6 sequence region, and the FILL7 sequence region. In one embodiment, the filler sequence region is the FILL4 sequence region, the FILL6 sequence region, and the FILL8 sequence region. In one embodiment, the filler sequence region is the FILL4 sequence region, the FILL6 sequence region, and the FILL9 sequence region. In one embodiment, the filler sequence region is the FILL4 sequence region, the FILL6 sequence region, and the FILL10 sequence region. In one embodiment, the filler sequence region is the FILL4 sequence region, the FILL6 sequence region, and the FILL11 sequence region. In one embodiment, the filler sequence region is the FILL4 sequence region, the FILL6 sequence region, and the FILL12 sequence region. In one embodiment, the filler sequence region is the FILL4 sequence region, the FILL6 sequence region, and the FILL13 sequence region. In one embodiment, the filler sequence region is the FILL4 sequence region, the FILL6 sequence region, and the FILL14 sequence region. In one embodiment, the filler sequence region is the FILL4 sequence region, the FILL6 sequence region, and the FILL15 sequence region. In one embodiment, the filler sequence region is the FILL4 sequence region, the FILL6 sequence region, and the FILL16 sequence region. In one embodiment, the filler sequence region is the FILL4 sequence region, the FILL6 sequence region, and the FILL17 sequence region. In one embodiment, the filler sequence region is the FILL4 sequence region, the FILL6 sequence region, and the FILL18 sequence region. In one embodiment, the filler sequence region is the FILL4 sequence region, the FILL7 sequence region, and the FILL8 sequence region. In one embodiment, the filler sequence region is the FILL4 sequence region, the FILL7 sequence region, and the FILL9 sequence region. In one embodiment, the filler sequence region is the FILL4 sequence region, the FILL7 sequence region, and the FILL10 sequence region. In one embodiment, the filler sequence region is the FILL4 sequence region, the FILL7 sequence region, and the FILL11 sequence region. In one embodiment, the filler sequence region is the FILL4 sequence region, the FILL7 sequence region, and the FILL12 sequence region. In one embodiment, the filler sequence region is the FILL4 sequence region, the FILL7 sequence region, and the FILL13 sequence region. In one embodiment, the filler sequence region is the FILL4 sequence region, the FILL7 sequence region, and the FILL14 sequence region. In one embodiment, the filler sequence region is the FILL4 sequence region, the FILL7 sequence region, and the FILL15 sequence region. In one embodiment, the filler sequence region is the FILL4 sequence region, the FILL7 sequence region, and the FILL16 sequence region. In one embodiment, the filler sequence region is the FILL4 sequence region, the FILL7 sequence region, and the FILL17 sequence region. In one embodiment, the filler sequence region is the FILL4 sequence region, the FILL7 sequence region, and the FILL18 sequence region. In one embodiment, the filler sequence region is the FILL4 sequence region, the FILL8 sequence region, and the FILL9 sequence region. In one embodiment, the filler sequence region is the FILL4 sequence region, the FILL8 sequence region, and the FILL10 sequence region. In one embodiment, the filler sequence region is the FILL4 sequence region, the FILL8 sequence region, and the FILL11 sequence region. In one embodiment, the filler sequence region is the FILL4 sequence region, the FILL8 sequence region, and the FILL12 sequence region. In one embodiment, the filler sequence region is the FILL4 sequence region, the FILL8 sequence region, and the FILL13 sequence region. In one embodiment, the filler sequence region is the FILL4 sequence region, the FILL8 sequence region, and the FILL14 sequence region. In one embodiment, the filler sequence region is the FILL4 sequence region, the FILL8 sequence region, and the FILL15 sequence region. In one embodiment, the filler sequence region is the FILL4 sequence region, the FILL8 sequence region, and the FILL16 sequence region. In one embodiment, the filler sequence region is the FILL4 sequence region, the FILL8 sequence region, and the FILL17 sequence region. In one embodiment, the filler sequence region is the FILL4 sequence region, the FILL8 sequence region, and the FILL18 sequence region. In one embodiment, the filler sequence region is the FILL4 sequence region, the FILL9 sequence region, and the FILL10 sequence region. In one embodiment, the filler sequence region is the FILL4 sequence region, the FILL9 sequence region, and the FILL11 sequence region. In one embodiment, the filler sequence region is the FILL4 sequence region, the FILL9 sequence region, and the FILL12 sequence region. In one embodiment, the filler sequence region is the FILL4 sequence region, the FILL9 sequence region, and the FILL13 sequence region. In one embodiment, the filler sequence region is the FILL4 sequence region, the FILL9 sequence region, and the FILL14 sequence region. In one embodiment, the filler sequence region is the FILL4 sequence region, the FILL9 sequence region, and the FILL15 sequence region. In one embodiment, the filler sequence region is the FILL4 sequence region, the FILL9 sequence region, and the FILL16 sequence region. In one embodiment, the filler sequence region is the FILL4 sequence region, the FILL9 sequence region, and the FILL17 sequence region. In one embodiment, the filler sequence region is the FILL4 sequence region, the FILL9 sequence region, and the FILL18 sequence region. In one embodiment, the filler sequence region is the FILL4 sequence region, the FILL10 sequence region, and the FILL11 sequence region. In one embodiment, the filler sequence region is the FILL4 sequence region, the FILL10 sequence region, and the FILL12 sequence region. In one embodiment, the filler sequence region is the FILL4 sequence region, the FILL10 sequence region, and the FILL13 sequence region. In one embodiment, the filler sequence region is the FILL4 sequence region, the FILL10 sequence region, and the FILL14 sequence region. In one embodiment, the filler sequence region is the FILL4 sequence region, the FILL10 sequence region, and the FILL15 sequence region. In one embodiment, the filler sequence region is the FILL4 sequence region, the FILL10 sequence region, and the FILL16 sequence region. In one embodiment, the filler sequence region is the FILL4 sequence region, the FILL10 sequence region, and the FILL17 sequence region. In one embodiment, the filler sequence region is the FILL4 sequence region, the FILL10 sequence region, and the FILL18 sequence region. In one embodiment, the filler sequence region is the FILL4 sequence region, the FILL11 sequence region, and the FILL12 sequence region. In one embodiment, the filler sequence region is the FILL4 sequence region, the FILL11 sequence region, and the FILL13 sequence region. In one embodiment, the filler sequence region is the FILL4 sequence region, the FILL11 sequence region, and the FILL14 sequence region. In one embodiment, the filler sequence region is the FILL4 sequence region, the FILL11 sequence region, and the FILL15 sequence region. In one embodiment, the filler sequence region is the FILL4 sequence region, the FILL11 sequence region, and the FILL16 sequence region. In one embodiment, the filler sequence region is the FILL4 sequence region, the FILL11 sequence region, and the FILL17 sequence region. In one embodiment, the filler sequence region is the FILL4 sequence region, the FILL11 sequence region, and the FILL18 sequence region. In one embodiment, the filler sequence region is the FILL4 sequence region, the FILL12 sequence region, and the FILL13 sequence region. In one embodiment, the filler sequence region is the FILL4 sequence region, the FILL12 sequence region, and the FILL14 sequence region. In one embodiment, the filler sequence region is the FILL4 sequence region, the FILL12 sequence region, and the FILL15 sequence region. In one embodiment, the filler sequence region is the FILL4 sequence region, the FILL12 sequence region, and the FILL16 sequence region. In one embodiment, the filler sequence region is the FILL4 sequence region, the FILL12 sequence region, and the FILL17 sequence region. In one embodiment, the filler sequence region is the FILL4 sequence region, the FILL12 sequence region, and the FILL18 sequence region. In one embodiment, the filler sequence region is the FILL4 sequence region, the FILL13 sequence region, and the FILL14 sequence region. In one embodiment, the filler sequence region is the FILL4 sequence region, the FILL13 sequence region, and the FILL15 sequence region. In one embodiment, the filler sequence region is the FILL4 sequence region, the FILL13 sequence region, and the FILL16 sequence region. In one embodiment, the filler sequence region is the FILL4 sequence region, the FILL13 sequence region, and the FILL17 sequence region. In one embodiment, the filler sequence region is the FILL4 sequence region, the FILL13 sequence region, and the FILL18 sequence region. In one embodiment, the filler sequence region is the FILL4 sequence region, the FILL14 sequence region, and the FILL15 sequence region. In one embodiment, the filler sequence region is the FILL4 sequence region, the FILL14 sequence region, and the FILL16 sequence region. In one embodiment, the filler sequence region is the FILL4 sequence region, the FILL14 sequence region, and the FILL17 sequence region. In one embodiment, the filler sequence region is the FILL4 sequence region, the FILL14 sequence region, and the FILL18 sequence region. In one embodiment, the filler sequence region is the FILL4 sequence region, the FILL15 sequence region, and the FILL16 sequence region. In one embodiment, the filler sequence region is the FILL4 sequence region, the FILL15 sequence region, and the FILL17 sequence region. In one embodiment, the filler sequence region is the FILL4 sequence region, the FILL15 sequence region, and the FILL18 sequence region. In one embodiment, the filler sequence region is the FILL4 sequence region, the FILL16 sequence region, and the FILL17 sequence region. In one embodiment, the filler sequence region is the FILL4 sequence region, the FILL16 sequence region, and the FILL18 sequence region. In one embodiment, the filler sequence region is the FILL4 sequence region, the FILL17 sequence region, and the FILL18 sequence region. In one embodiment, the filler sequence region is the FILL5 sequence region, the FILL6 sequence region, and the FILL7 sequence region. In one embodiment, the filler sequence region is the FILL5 sequence region, the FILL6 sequence region, and the FILL8 sequence region. In one embodiment, the filler sequence region is the FILL5 sequence region, the FILL6 sequence region, and the FILL9 sequence region. In one embodiment, the filler sequence region is the FILL5 sequence region, the FILL6 sequence region, and the FILL10 sequence region. In one embodiment, the filler sequence region is the FILL5 sequence region, the FILL6 sequence region, and the FILL11 sequence region. In one embodiment, the filler sequence region is the FILL5 sequence region, the FILL6 sequence region, and the FILL12 sequence region. In one embodiment, the filler sequence region is the FILL5 sequence region, the FILL6 sequence region, and the FILL13 sequence region. In one embodiment, the filler sequence region is the FILL5 sequence region, the FILL6 sequence region, and the FILL14 sequence region. In one embodiment, the filler sequence region is the FILL5 sequence region, the FILL6 sequence region, and the FILL15 sequence region. In one embodiment, the filler sequence region is the FILL5 sequence region, the FILL6 sequence region, and the FILL16 sequence region. In one embodiment, the filler sequence region is the FILL5 sequence region, the FILL6 sequence region, and the FILL17 sequence region. In one embodiment, the filler sequence region is the FILL5 sequence region, the FILL6 sequence region, and the FILL18 sequence region. In one embodiment, the filler sequence region is the FILL5 sequence region, the FILL7 sequence region, and the FILL8 sequence region. In one embodiment, the filler sequence region is the FILL5 sequence region, the FILL7 sequence region, and the FILL9 sequence region. In one embodiment, the filler sequence region is the FILL5 sequence region, the FILL7 sequence region, and the FILL10 sequence region. In one embodiment, the filler sequence region is the FILL5 sequence region, the FILL7 sequence region, and the FILL11 sequence region. In one embodiment, the filler sequence region is the FILL5 sequence region, the FILL7 sequence region, and the FILL12 sequence region. In one embodiment, the filler sequence region is the FILL5 sequence region, the FILL7 sequence region, and the FILL13 sequence region. In one embodiment, the filler sequence region is the FILL5 sequence region, the FILL7 sequence region, and the FILL14 sequence region. In one embodiment, the filler sequence region is the FILL5 sequence region, the FILL7 sequence region, and the FILL15 sequence region. In one embodiment, the filler sequence region is the FILL5 sequence region, the FILL7 sequence region, and the FILL16 sequence region. In one embodiment, the filler sequence region is the FILL5 sequence region, the FILL7 sequence region, and the FILL17 sequence region. In one embodiment, the filler sequence region is the FILL5 sequence region, the FILL7 sequence region, and the FILL18 sequence region. In one embodiment, the filler sequence region is the FILL5 sequence region, the FILL8 sequence region, and the FILL9 sequence region. In one embodiment, the filler sequence region is the FILL5 sequence region, the FILL8 sequence region, and the FILL10 sequence region. In one embodiment, the filler sequence region is the FILL5 sequence region, the FILL8 sequence region, and the FILL11 sequence region. In one embodiment, the filler sequence region is the FILL5 sequence region, the FILL8 sequence region, and the FILL12 sequence region. In one embodiment, the filler sequence region is the FILL5 sequence region, the FILL8 sequence region, and the FILL13 sequence region. In one embodiment, the filler sequence region is the FILL5 sequence region, the FILL8 sequence region, and the FILL14 sequence region. In one embodiment, the filler sequence region is the FILL5 sequence region, the FILL8 sequence region, and the FILL15 sequence region. In one embodiment, the filler sequence region is the FILL5 sequence region, the FILL8 sequence region, and the FILL16 sequence region. In one embodiment, the filler sequence region is the FILL5 sequence region, the FILL8 sequence region, and the FILL17 sequence region. In one embodiment, the filler sequence region is the FILL5 sequence region, the FILL8 sequence region, and the FILL18 sequence region. In one embodiment, the filler sequence region is the FILL5 sequence region, the FILL9 sequence region, and the FILL10 sequence region. In one embodiment, the filler sequence region is the FILL5 sequence region, the FILL9 sequence region, and the FILL11 sequence region. In one embodiment, the filler sequence region is the FILL5 sequence region, the FILL9 sequence region, and the FILL12 sequence region. In one embodiment, the filler sequence region is the FILL5 sequence region, the FILL9 sequence region, and the FILL13 sequence region. In one embodiment, the filler sequence region is the FILL5 sequence region, the FILL9 sequence region, and the FILL14 sequence region. In one embodiment, the filler sequence region is the FILL5 sequence region, the FILL9 sequence region, and the FILL15 sequence region. In one embodiment, the filler sequence region is the FILL5 sequence region, the FILL9 sequence region, and the FILL16 sequence region. In one embodiment, the filler sequence region is the FILL5 sequence region, the FILL9 sequence region, and the FILL17 sequence region. In one embodiment, the filler sequence region is the FILL5 sequence region, the FILL9 sequence region, and the FILL18 sequence region. In one embodiment, the filler sequence region is the FILL5 sequence region, the FILL10 sequence region, and the FILL11 sequence region. In one embodiment, the filler sequence region is the FILL5 sequence region, the FILL10 sequence region, and the FILL12 sequence region. In one embodiment, the filler sequence region is the FILL5 sequence region, the FILL10 sequence region, and the FILL13 sequence region. In one embodiment, the filler sequence region is the FILL5 sequence region, the FILL10 sequence region, and the FILL14 sequence region. In one embodiment, the filler sequence region is the FILL5 sequence region, the FILL10 sequence region, and the FILL15 sequence region. In one embodiment, the filler sequence region is the FILL5 sequence region, the FILL10 sequence region, and the FILL16 sequence region. In one embodiment, the filler sequence region is the FILL5 sequence region, the FILL10 sequence region, and the FILL17 sequence region. In one embodiment, the filler sequence region is the FILL5 sequence region, the FILL10 sequence region, and the FILL18 sequence region. In one embodiment, the filler sequence region is the FILL5 sequence region, the FILL11 sequence region, and the FILL12 sequence region. In one embodiment, the filler sequence region is the FILL5 sequence region, the FILL11 sequence region, and the FILL13 sequence region. In one embodiment, the filler sequence region is the FILL5 sequence region, the FILL11 sequence region, and the FILL14 sequence region. In one embodiment, the filler sequence region is the FILL5 sequence region, the FILL11 sequence region, and the FILL15 sequence region. In one embodiment, the filler sequence region is the FILL5 sequence region, the FILL11 sequence region, and the FILL16 sequence region. In one embodiment, the filler sequence region is the FILL5 sequence region, the FILL11 sequence region, and the FILL17 sequence region. In one embodiment, the filler sequence region is the FILL5 sequence region, the FILL11 sequence region, and the FILL18 sequence region. In one embodiment, the filler sequence region is the FILL5 sequence region, the FILL12 sequence region, and the FILL13 sequence region. In one embodiment, the filler sequence region is the FILL5 sequence region, the FILL12 sequence region, and the FILL14 sequence region. In one embodiment, the filler sequence region is the FILL5 sequence region, the FILL12 sequence region, and the FILL15 sequence region. In one embodiment, the filler sequence region is the FILL5 sequence region, the FILL12 sequence region, and the FILL16 sequence region. In one embodiment, the filler sequence region is the FILL5 sequence region, the FILL12 sequence region, and the FILL17 sequence region. In one embodiment, the filler sequence region is the FILL5 sequence region, the FILL12 sequence region, and the FILL18 sequence region. In one embodiment, the filler sequence region is the FILL5 sequence region, the FILL13 sequence region, and the FILL14 sequence region. In one embodiment, the filler sequence region is the FILL5 sequence region, the FILL13 sequence region, and the FILL15 sequence region. In one embodiment, the filler sequence region is the FILL5 sequence region, the FILL13 sequence region, and the FILL16 sequence region. In one embodiment, the filler sequence region is the FILL5 sequence region, the FILL13 sequence region, and the FILL17 sequence region. In one embodiment, the filler sequence region is the FILL5 sequence region, the FILL13 sequence region, and the FILL18 sequence region. In one embodiment, the filler sequence region is the FILL5 sequence region, the FILL14 sequence region, and the FILL15 sequence region. In one embodiment, the filler sequence region is the FILL5 sequence region, the FILL14 sequence region, and the FILL16 sequence region. In one embodiment, the filler sequence region is the FILL5 sequence region, the FILL14 sequence region, and the FILL17 sequence region. In one embodiment, the filler sequence region is the FILL5 sequence region, the FILL14 sequence region, and the FILL18 sequence region. In one embodiment, the filler sequence region is the FILL5 sequence region, the FILL15 sequence region, and the FILL16 sequence region. In one embodiment, the filler sequence region is the FILL5 sequence region, the FILL15 sequence region, and the FILL17 sequence region. In one embodiment, the filler sequence region is the FILL5 sequence region, the FILL15 sequence region, and the FILL18 sequence region. In one embodiment, the filler sequence region is the FILL5 sequence region, the FILL16 sequence region, and the FILL17 sequence region. In one embodiment, the filler sequence region is the FILL5 sequence region, the FILL16 sequence region, and the FILL18 sequence region. In one embodiment, the filler sequence region is the FILL5 sequence region, the FILL17 sequence region, and the FILL18 sequence region. In one embodiment, the filler sequence region is the FILL6 sequence region, the FILL7 sequence region, and the FILL8 sequence region. In one embodiment, the filler sequence region is the FILL6 sequence region, the FILL7 sequence region, and the FILL9 sequence region. In one embodiment, the filler sequence region is the FILL6 sequence region, the FILL7 sequence region, and the FILL10 sequence region. In one embodiment, the filler sequence region is the FILL6 sequence region, the FILL7 sequence region, and the FILL11 sequence region. In one embodiment, the filler sequence region is the FILL6 sequence region, the FILL7 sequence region, and the FILL12 sequence region. In one embodiment, the filler sequence region is the FILL6 sequence region, the FILL7 sequence region, and the FILL13 sequence region. In one embodiment, the filler sequence region is the FILL6 sequence region, the FILL7 sequence region, and the FILL14 sequence region. In one embodiment, the filler sequence region is the FILL6 sequence region, the FILL7 sequence region, and the FILL15 sequence region. In one embodiment, the filler sequence region is the FILL6 sequence region, the FILL7 sequence region, and the FILL16 sequence region. In one embodiment, the filler sequence region is the FILL6 sequence region, the FILL7 sequence region, and the FILL17 sequence region. In one embodiment, the filler sequence region is the FILL6 sequence region, the FILL7 sequence region, and the FILL18 sequence region. In one embodiment, the filler sequence region is the FILL6 sequence region, the FILL8 sequence region, and the FILL9 sequence region. In one embodiment, the filler sequence region is the FILL6 sequence region, the FILL8 sequence region, and the FILL10 sequence region. In one embodiment, the filler sequence region is the FILL6 sequence region, the FILL8 sequence region, and the FILL11 sequence region. In one embodiment, the filler sequence region is the FILL6 sequence region, the FILL8 sequence region, and the FILL12 sequence region. In one embodiment, the filler sequence region is the FILL6 sequence region, the FILL8 sequence region, and the FILL13 sequence region. In one embodiment, the filler sequence region is the FILL6 sequence region, the FILL8 sequence region, and the FILL14 sequence region. In one embodiment, the filler sequence region is the FILL6 sequence region, the FILL8 sequence region, and the FILL15 sequence region. In one embodiment, the filler sequence region is the FILL6 sequence region, the FILL8 sequence region, and the FILL16 sequence region. In one embodiment, the filler sequence region is the FILL6 sequence region, the FILL8 sequence region, and the FILL17 sequence region. In one embodiment, the filler sequence region is the FILL6 sequence region, the FILL8 sequence region, and the FILL18 sequence region. In one embodiment, the filler sequence region is the FILL6 sequence region, the FILL9 sequence region, and the FILL10 sequence region. In one embodiment, the filler sequence region is the FILL6 sequence region, the FILL9 sequence region, and the FILL11 sequence region. In one embodiment, the filler sequence region is the FILL6 sequence region, the FILL9 sequence region, and the FILL12 sequence region. In one embodiment, the filler sequence region is the FILL6 sequence region, the FILL9 sequence region, and the FILL13 sequence region. In one embodiment, the filler sequence region is the FILL6 sequence region, the FILL9 sequence region, and the FILL14 sequence region. In one embodiment, the filler sequence region is the FILL6 sequence region, the FILL9 sequence region, and the FILL15 sequence region. In one embodiment, the filler sequence region is the FILL6 sequence region, the FILL9 sequence region, and the FILL16 sequence region. In one embodiment, the filler sequence region is the FILL6 sequence region, the FILL9 sequence region, and the FILL17 sequence region. In one embodiment, the filler sequence region is the FILL6 sequence region, the FILL9 sequence region, and the FILL18 sequence region. In one embodiment, the filler sequence region is the FILL6 sequence region, the FILL10 sequence region, and the FILL11 sequence region. In one embodiment, the filler sequence region is the FILL6 sequence region, the FILL10 sequence region, and the FILL12 sequence region. In one embodiment, the filler sequence region is the FILL6 sequence region, the FILL10 sequence region, and the FILL13 sequence region. In one embodiment, the filler sequence region is the FILL6 sequence region, the FILL10 sequence region, and the FILL14 sequence region. In one embodiment, the filler sequence region is the FILL6 sequence region, the FILL10 sequence region, and the FILL15 sequence region. In one embodiment, the filler sequence region is the FILL6 sequence region, the FILL10 sequence region, and the FILL16 sequence region. In one embodiment, the filler sequence region is the FILL6 sequence region, the FILL10 sequence region, and the FILL17 sequence region. In one embodiment, the filler sequence region is the FILL6 sequence region, the FILL10 sequence region, and the FILL18 sequence region. In one embodiment, the filler sequence region is the FILL6 sequence region, the FILL11 sequence region, and the FILL12 sequence region. In one embodiment, the filler sequence region is the FILL6 sequence region, the FILL11 sequence region, and the FILL13 sequence region. In one embodiment, the filler sequence region is the FILL6 sequence region, the FILL11 sequence region, and the FILL14 sequence region. In one embodiment, the filler sequence region is the FILL6 sequence region, the FILL11 sequence region, and the FILL15 sequence region. In one embodiment, the filler sequence region is the FILL6 sequence region, the FILL11 sequence region, and the FILL16 sequence region. In one embodiment, the filler sequence region is the FILL6 sequence region, the FILL11 sequence region, and the FILL17 sequence region. In one embodiment, the filler sequence region is the FILL6 sequence region, the FILL11 sequence region, and the FILL18 sequence region. In one embodiment, the filler sequence region is the FILL6 sequence region, the FILL12 sequence region, and the FILL13 sequence region. In one embodiment, the filler sequence region is the FILL6 sequence region, the FILL12 sequence region, and the FILL14 sequence region. In one embodiment, the filler sequence region is the FILL6 sequence region, the FILL12 sequence region, and the FILL15 sequence region. In one embodiment, the filler sequence region is the FILL6 sequence region, the FILL12 sequence region, and the FILL16 sequence region. In one embodiment, the filler sequence region is the FILL6 sequence region, the FILL12 sequence region, and the FILL17 sequence region. In one embodiment, the filler sequence region is the FILL6 sequence region, the FILL12 sequence region, and the FILL18 sequence region. In one embodiment, the filler sequence region is the FILL6 sequence region, the FILL13 sequence region, and the FILL14 sequence region. In one embodiment, the filler sequence region is the FILL6 sequence region, the FILL13 sequence region, and the FILL15 sequence region. In one embodiment, the filler sequence region is the FILL6 sequence region, the FILL13 sequence region, and the FILL16 sequence region. In one embodiment, the filler sequence region is the FILL6 sequence region, the FILL13 sequence region, and the FILL17 sequence region. In one embodiment, the filler sequence region is the FILL6 sequence region, the FILL13 sequence region, and the FILL18 sequence region. In one embodiment, the filler sequence region is the FILL6 sequence region, the FILL14 sequence region, and the FILL15 sequence region. In one embodiment, the filler sequence region is the FILL6 sequence region, the FILL14 sequence region, and the FILL16 sequence region. In one embodiment, the filler sequence region is the FILL6 sequence region, the FILL14 sequence region, and the FILL17 sequence region. In one embodiment, the filler sequence region is the FILL6 sequence region, the FILL14 sequence region, and the FILL18 sequence region. In one embodiment, the filler sequence region is the FILL6 sequence region, the FILL15 sequence region, and the FILL16 sequence region. In one embodiment, the filler sequence region is the FILL6 sequence region, the FILL15 sequence region, and the FILL17 sequence region. In one embodiment, the filler sequence region is the FILL6 sequence region, the FILL15 sequence region, and the FILL18 sequence region. In one embodiment, the filler sequence region is the FILL6 sequence region, the FILL16 sequence region, and the FILL17 sequence region. In one embodiment, the filler sequence region is the FILL6 sequence region, the FILL16 sequence region, and the FILL18 sequence region. In one embodiment, the filler sequence region is the FILL6 sequence region, the FILL17 sequence region, and the FILL18 sequence region. In one embodiment, the filler sequence region is the FILL7 sequence region, the FILL8 sequence region, and the FILL9 sequence region. In one embodiment, the filler sequence region is the FILL7 sequence region, the FILL8 sequence region, and the FILL10 sequence region. In one embodiment, the filler sequence region is the FILL7 sequence region, the FILL8 sequence region, and the FILL11 sequence region. In one embodiment, the filler sequence region is the FILL7 sequence region, the FILL8 sequence region, and the FILL12 sequence region. In one embodiment, the filler sequence region is the FILL7 sequence region, the FILL8 sequence region, and the FILL13 sequence region. In one embodiment, the filler sequence region is the FILL7 sequence region, the FILL8 sequence region, and the FILL14 sequence region. In one embodiment, the filler sequence region is the FILL7 sequence region, the FILL8 sequence region, and the FILL15 sequence region. In one embodiment, the filler sequence region is the FILL7 sequence region, the FILL8 sequence region, and the FILL16 sequence region. In one embodiment, the filler sequence region is the FILL7 sequence region, the FILL8 sequence region, and the FILL17 sequence region. In one embodiment, the filler sequence region is the FILL7 sequence region, the FILL8 sequence region, and the FILL18 sequence region. In one embodiment, the filler sequence region is the FILL7 sequence region, the FILL9 sequence region, and the FILL10 sequence region. In one embodiment, the filler sequence region is the FILL7 sequence region, the FILL9 sequence region, and the FILL11 sequence region. In one embodiment, the filler sequence region is the FILL7 sequence region, the FILL9 sequence region, and the FILL12 sequence region. In one embodiment, the filler sequence region is the FILL7 sequence region, the FILL9 sequence region, and the FILL13 sequence region. In one embodiment, the filler sequence region is the FILL7 sequence region, the FILL9 sequence region, and the FILL14 sequence region. In one embodiment, the filler sequence region is the FILL7 sequence region, the FILL9 sequence region, and the FILL15 sequence region. In one embodiment, the filler sequence region is the FILL7 sequence region, the FILL9 sequence region, and the FILL16 sequence region. In one embodiment, the filler sequence region is the FILL7 sequence region, the FILL9 sequence region, and the FILL17 sequence region. In one embodiment, the filler sequence region is the FILL7 sequence region, the FILL9 sequence region, and the FILL18 sequence region. In one embodiment, the filler sequence region is the FILL7 sequence region, the FILL10 sequence region, and the FILL11 sequence region. In one embodiment, the filler sequence region is the FILL7 sequence region, the FILL10 sequence region, and the FILL12 sequence region. In one embodiment, the filler sequence region is the FILL7 sequence region, the FILL10 sequence region, and the FILL13 sequence region. In one embodiment, the filler sequence region is the FILL7 sequence region, the FILL10 sequence region, and the FILL14 sequence region. In one embodiment, the filler sequence region is the FILL7 sequence region, the FILL10 sequence region, and the FILL15 sequence region. In one embodiment, the filler sequence region is the FILL7 sequence region, the FILL10 sequence region, and the FILL16 sequence region. In one embodiment, the filler sequence region is the FILL7 sequence region, the FILL10 sequence region, and the FILL17 sequence region. In one embodiment, the filler sequence region is the FILL7 sequence region, the FILL10 sequence region, and the FILL18 sequence region. In one embodiment, the filler sequence region is the FILL7 sequence region, the FILL11 sequence region, and the FILL12 sequence region. In one embodiment, the filler sequence region is the FILL7 sequence region, the FILL11 sequence region, and the FILL13 sequence region. In one embodiment, the filler sequence region is the FILL7 sequence region, the FILL11 sequence region, and the FILL14 sequence region. In one embodiment, the filler sequence region is the FILL7 sequence region, the FILL11 sequence region, and the FILL15 sequence region. In one embodiment, the filler sequence region is the FILL7 sequence region, the FILL11 sequence region, and the FILL16 sequence region. In one embodiment, the filler sequence region is the FILL7 sequence region, the FILL11 sequence region, and the FILL17 sequence region. In one embodiment, the filler sequence region is the FILL7 sequence region, the FILL11 sequence region, and the FILL18 sequence region. In one embodiment, the filler sequence region is the FILL7 sequence region, the FILL12 sequence region, and the FILL13 sequence region. In one embodiment, the filler sequence region is the FILL7 sequence region, the FILL12 sequence region, and the FILL14 sequence region. In one embodiment, the filler sequence region is the FILL7 sequence region, the FILL12 sequence region, and the FILL15 sequence region. In one embodiment, the filler sequence region is the FILL7 sequence region, the FILL12 sequence region, and the FILL16 sequence region. In one embodiment, the filler sequence region is the FILL7 sequence region, the FILL12 sequence region, and the FILL17 sequence region. In one embodiment, the filler sequence region is the FILL7 sequence region, the FILL12 sequence region, and the FILL18 sequence region. In one embodiment, the filler sequence region is the FILL7 sequence region, the FILL13 sequence region, and the FILL14 sequence region. In one embodiment, the filler sequence region is the FILL7 sequence region, the FILL13 sequence region, and the FILL15 sequence region. In one embodiment, the filler sequence region is the FILL7 sequence region, the FILL13 sequence region, and the FILL16 sequence region. In one embodiment, the filler sequence region is the FILL7 sequence region, the FILL13 sequence region, and the FILL17 sequence region. In one embodiment, the filler sequence region is the FILL7 sequence region, the FILL13 sequence region, and the FILL18 sequence region. In one embodiment, the filler sequence region is the FILL7 sequence region, the FILL14 sequence region, and the FILL15 sequence region. In one embodiment, the filler sequence region is the FILL7 sequence region, the FILL14 sequence region, and the FILL16 sequence region. In one embodiment, the filler sequence region is the FILL7 sequence region, the FILL14 sequence region, and the FILL17 sequence region. In one embodiment, the filler sequence region is the FILL7 sequence region, the FILL14 sequence region, and the FILL18 sequence region. In one embodiment, the filler sequence region is the FILL7 sequence region, the FILL15 sequence region, and the FILL16 sequence region. In one embodiment, the filler sequence region is the FILL7 sequence region, the FILL15 sequence region, and the FILL17 sequence region. In one embodiment, the filler sequence region is the FILL7 sequence region, the FILL15 sequence region, and the FILL18 sequence region. In one embodiment, the filler sequence region is the FILL7 sequence region, the FILL16 sequence region, and the FILL17 sequence region. In one embodiment, the filler sequence region is the FILL7 sequence region, the FILL16 sequence region, and the FILL18 sequence region. In one embodiment, the filler sequence region is the FILL7 sequence region, the FILL17 sequence region, and the FILL18 sequence region. In one embodiment, the filler sequence region is the FILL8 sequence region, the FILL9 sequence region, and the FILL10 sequence region. In one embodiment, the filler sequence region is the FILL8 sequence region, the FILL9 sequence region, and the FILL11 sequence region. In one embodiment, the filler sequence region is the FILL8 sequence region, the FILL9 sequence region, and the FILL12 sequence region. In one embodiment, the filler sequence region is the FILL8 sequence region, the FILL9 sequence region, and the FILL13 sequence region. In one embodiment, the filler sequence region is the FILL8 sequence region, the FILL9 sequence region, and the FILL14 sequence region. In one embodiment, the filler sequence region is the FILL8 sequence region, the FILL9 sequence region, and the FILL15 sequence region. In one embodiment, the filler sequence region is the FILL8 sequence region, the FILL9 sequence region, and the FILL16 sequence region. In one embodiment, the filler sequence region is the FILL8 sequence region, the FILL9 sequence region, and the FILL17 sequence region. In one embodiment, the filler sequence region is the FILL8 sequence region, the FILL9 sequence region, and the FILL18 sequence region. In one embodiment, the filler sequence region is the FILL8 sequence region, the FILL10 sequence region, and the FILL11 sequence region. In one embodiment, the filler sequence region is the FILL8 sequence region, the FILL10 sequence region, and the FILL12 sequence region. In one embodiment, the filler sequence region is the FILL8 sequence region, the FILL10 sequence region, and the FILL13 sequence region. In one embodiment, the filler sequence region is the FILL8 sequence region, the FILL10 sequence region, and the FILL14 sequence region. In one embodiment, the filler sequence region is the FILL8 sequence region, the FILL10 sequence region, and the FILL15 sequence region. In one embodiment, the filler sequence region is the FILL8 sequence region, the FILL10 sequence region, and the FILL16 sequence region. In one embodiment, the filler sequence region is the FILL8 sequence region, the FILL10 sequence region, and the FILL17 sequence region. In one embodiment, the filler sequence region is the FILL8 sequence region, the FILL10 sequence region, and the FILL18 sequence region. In one embodiment, the filler sequence region is the FILL8 sequence region, the FILL11 sequence region, and the FILL12 sequence region. In one embodiment, the filler sequence region is the FILL8 sequence region, the FILL11 sequence region, and the FILL13 sequence region. In one embodiment, the filler sequence region is the FILL8 sequence region, the FILL11 sequence region, and the FILL14 sequence region. In one embodiment, the filler sequence region is the FILL8 sequence region, the FILL11 sequence region, and the FILL15 sequence region. In one embodiment, the filler sequence region is the FILL8 sequence region, the FILL11 sequence region, and the FILL16 sequence region. In one embodiment, the filler sequence region is the FILL8 sequence region, the FILL11 sequence region, and the FILL17 sequence region. In one embodiment, the filler sequence region is the FILL8 sequence region, the FILL11 sequence region, and the FILL18 sequence region. In one embodiment, the filler sequence region is the FILL8 sequence region, the FILL12 sequence region, and the FILL13 sequence region. In one embodiment, the filler sequence region is the FILL8 sequence region, the FILL12 sequence region, and the FILL14 sequence region. In one embodiment, the filler sequence region is the FILL8 sequence region, the FILL12 sequence region, and the FILL15 sequence region. In one embodiment, the filler sequence region is the FILL8 sequence region, the FILL12 sequence region, and the FILL16 sequence region. In one embodiment, the filler sequence region is the FILL8 sequence region, the FILL12 sequence region, and the FILL17 sequence region. In one embodiment, the filler sequence region is the FILL8 sequence region, the FILL12 sequence region, and the FILL18 sequence region. In one embodiment, the filler sequence region is the FILL8 sequence region, the FILL13 sequence region, and the FILL14 sequence region. In one embodiment, the filler sequence region is the FILL8 sequence region, the FILL13 sequence region, and the FILL15 sequence region. In one embodiment, the filler sequence region is the FILL8 sequence region, the FILL13 sequence region, and the FILL16 sequence region. In one embodiment, the filler sequence region is the FILL8 sequence region, the FILL13 sequence region, and the FILL17 sequence region. In one embodiment, the filler sequence region is the FILL8 sequence region, the FILL13 sequence region, and the FILL18 sequence region. In one embodiment, the filler sequence region is the FILL8 sequence region, the FILL14 sequence region, and the FILL15 sequence region. In one embodiment, the filler sequence region is the FILL8 sequence region, the FILL14 sequence region, and the FILL16 sequence region. In one embodiment, the filler sequence region is the FILL8 sequence region, the FILL14 sequence region, and the FILL17 sequence region. In one embodiment, the filler sequence region is the FILL8 sequence region, the FILL14 sequence region, and the FILL18 sequence region. In one embodiment, the filler sequence region is the FILL8 sequence region, the FILL15 sequence region, and the FILL16 sequence region. In one embodiment, the filler sequence region is the FILL8 sequence region, the FILL15 sequence region, and the FILL17 sequence region. In one embodiment, the filler sequence region is the FILL8 sequence region, the FILL15 sequence region, and the FILL18 sequence region. In one embodiment, the filler sequence region is the FILL8 sequence region, the FILL16 sequence region, and the FILL17 sequence region. In one embodiment, the filler sequence region is the FILL8 sequence region, the FILL16 sequence region, and the FILL18 sequence region. In one embodiment, the filler sequence region is the FILL8 sequence region, the FILL17 sequence region, and the FILL18 sequence region. In one embodiment, the filler sequence region is the FILL9 sequence region, the FILL10 sequence region, and the FILL11 sequence region. In one embodiment, the filler sequence region is the FILL9 sequence region, the FILL10 sequence region, and the FILL12 sequence region. In one embodiment, the filler sequence region is the FILL9 sequence region, the FILL10 sequence region, and the FILL13 sequence region. In one embodiment, the filler sequence region is the FILL9 sequence region, the FILL10 sequence region, and the FILL14 sequence region. In one embodiment, the filler sequence region is the FILL9 sequence region, the FILL10 sequence region, and the FILL15 sequence region. In one embodiment, the filler sequence region is the FILL9 sequence region, the FILL10 sequence region, and the FILL16 sequence region. In one embodiment, the filler sequence region is the FILL9 sequence region, the FILL10 sequence region, and the FILL17 sequence region. In one embodiment, the filler sequence region is the FILL9 sequence region, the FILL10 sequence region, and the FILL18 sequence region. In one embodiment, the filler sequence region is the FILL9 sequence region, the FILL11 sequence region, and the FILL12 sequence region. In one embodiment, the filler sequence region is the FILL9 sequence region, the FILL11 sequence region, and the FILL13 sequence region. In one embodiment, the filler sequence region is the FILL9 sequence region, the FILL11 sequence region, and the FILL14 sequence region. In one embodiment, the filler sequence region is the FILL9 sequence region, the FILL11 sequence region, and the FILL15 sequence region. In one embodiment, the filler sequence region is the FILL9 sequence region, the FILL11 sequence region, and the FILL16 sequence region. In one embodiment, the filler sequence region is the FILL9 sequence region, the FILL11 sequence region, and the FILL17 sequence region. In one embodiment, the filler sequence region is the FILL9 sequence region, the FILL11 sequence region, and the FILL18 sequence region. In one embodiment, the filler sequence region is the FILL9 sequence region, the FILL12 sequence region, and the FILL13 sequence region. In one embodiment, the filler sequence region is the FILL9 sequence region, the FILL12 sequence region, and the FILL14 sequence region. In one embodiment, the filler sequence region is the FILL9 sequence region, the FILL12 sequence region, and the FILL15 sequence region. In one embodiment, the filler sequence region is the FILL9 sequence region, the FILL12 sequence region, and the FILL16 sequence region. In one embodiment, the filler sequence region is the FILL9 sequence region, the FILL12 sequence region, and the FILL17 sequence region. In one embodiment, the filler sequence region is the FILL9 sequence region, the FILL12 sequence region, and the FILL18 sequence region. In one embodiment, the filler sequence region is the FILL9 sequence region, the FILL13 sequence region, and the FILL14 sequence region. In one embodiment, the filler sequence region is the FILL9 sequence region, the FILL13 sequence region, and the FILL15 sequence region. In one embodiment, the filler sequence region is the FILL9 sequence region, the FILL13 sequence region, and the FILL16 sequence region. In one embodiment, the filler sequence region is the FILL9 sequence region, the FILL13 sequence region, and the FILL17 sequence region. In one embodiment, the filler sequence region is the FILL9 sequence region, the FILL13 sequence region, and the FILL18 sequence region. In one embodiment, the filler sequence region is the FILL9 sequence region, the FILL14 sequence region, and the FILL15 sequence region. In one embodiment, the filler sequence region is the FILL9 sequence region, the FILL14 sequence region, and the FILL16 sequence region. In one embodiment, the filler sequence region is the FILL9 sequence region, the FILL14 sequence region, and the FILL17 sequence region. In one embodiment, the filler sequence region is the FILL9 sequence region, the FILL14 sequence region, and the FILL18 sequence region. In one embodiment, the filler sequence region is the FILL9 sequence region, the FILL15 sequence region, and the FILL16 sequence region. In one embodiment, the filler sequence region is the FILL9 sequence region, the FILL15 sequence region, and the FILL17 sequence region. In one embodiment, the filler sequence region is the FILL9 sequence region, the FILL15 sequence region, and the FILL18 sequence region. In one embodiment, the filler sequence region is the FILL9 sequence region, the FILL16 sequence region, and the FILL17 sequence region. In one embodiment, the filler sequence region is the FILL9 sequence region, the FILL16 sequence region, and the FILL18 sequence region. In one embodiment, the filler sequence region is the FILL9 sequence region, the FILL17 sequence region, and the FILL18 sequence region. In one embodiment, the filler sequence region is the FILL10 sequence region, the FILL11 sequence region, and the FILL12 sequence region. In one embodiment, the filler sequence region is the FILL10 sequence region, the FILL11 sequence region, and the FILL13 sequence region. In one embodiment, the filler sequence region is the FILL10 sequence region, the FILL11 sequence region, and the FILL14 sequence region. In one embodiment, the filler sequence region is the FILL10 sequence region, the FILL11 sequence region, and the FILL15 sequence region. In one embodiment, the filler sequence region is the FILL10 sequence region, the FILL11 sequence region, and the FILL16 sequence region. In one embodiment, the filler sequence region is the FILL10 sequence region, the FILL11 sequence region, and the FILL17 sequence region. In one embodiment, the filler sequence region is the FILL10 sequence region, the FILL11 sequence region, and the FILL18 sequence region. In one embodiment, the filler sequence region is the FILL10 sequence region, the FILL12 sequence region, and the FILL13 sequence region. In one embodiment, the filler sequence region is the FILL10 sequence region, the FILL12 sequence region, and the FILL14 sequence region. In one embodiment, the filler sequence region is the FILL10 sequence region, the FILL12 sequence region, and the FILL15 sequence region. In one embodiment, the filler sequence region is the FILL10 sequence region, the FILL12 sequence region, and the FILL16 sequence region. In one embodiment, the filler sequence region is the FILL10 sequence region, the FILL12 sequence region, and the FILL17 sequence region. In one embodiment, the filler sequence region is the FILL10 sequence region, the FILL12 sequence region, and the FILL18 sequence region. In one embodiment, the filler sequence region is the FILL10 sequence region, the FILL13 sequence region, and the FILL14 sequence region. In one embodiment, the filler sequence region is the FILL10 sequence region, the FILL13 sequence region, and the FILL15 sequence region. In one embodiment, the filler sequence region is the FILL10 sequence region, the FILL13 sequence region, and the FILL16 sequence region. In one embodiment, the filler sequence region is the FILL10 sequence region, the FILL13 sequence region, and the FILL17 sequence region. In one embodiment, the filler sequence region is the FILL10 sequence region, the FILL13 sequence region, and the FILL18 sequence region. In one embodiment, the filler sequence region is the FILL10 sequence region, the FILL14 sequence region, and the FILL15 sequence region. In one embodiment, the filler sequence region is the FILL10 sequence region, the FILL14 sequence region, and the FILL16 sequence region. In one embodiment, the filler sequence region is the FILL10 sequence region, the FILL14 sequence region, and the FILL17 sequence region. In one embodiment, the filler sequence region is the FILL10 sequence region, the FILL14 sequence region, and the FILL18 sequence region. In one embodiment, the filler sequence region is the FILL10 sequence region, the FILL15 sequence region, and the FILL16 sequence region. In one embodiment, the filler sequence region is the FILL10 sequence region, the FILL15 sequence region, and the FILL17 sequence region. In one embodiment, the filler sequence region is the FILL10 sequence region, the FILL15 sequence region, and the FILL18 sequence region. In one embodiment, the filler sequence region is the FILL10 sequence region, the FILL16 sequence region, and the FILL17 sequence region. In one embodiment, the filler sequence region is the FILL10 sequence region, the FILL16 sequence region, and the FILL18 sequence region. In one embodiment, the filler sequence region is the FILL10 sequence region, the FILL17 sequence region, and the FILL18 sequence region. In one embodiment, the filler sequence region is the FILL11 sequence region, the FILL12 sequence region, and the FILL13 sequence region. In one embodiment, the filler sequence region is the FILL11 sequence region, the FILL12 sequence region, and the FILL14 sequence region. In one embodiment, the filler sequence region is the FILL11 sequence region, the FILL12 sequence region, and the FILL15 sequence region. In one embodiment, the filler sequence region is the FILL11 sequence region, the FILL12 sequence region, and the FILL16 sequence region. In one embodiment, the filler sequence region is the FILL11 sequence region, the FILL12 sequence region, and the FILL17 sequence region. In one embodiment, the filler sequence region is the FILL11 sequence region, the FILL12 sequence region, and the FILL18 sequence region. In one embodiment, the filler sequence region is the FILL11 sequence region, the FILL13 sequence region, and the FILL14 sequence region. In one embodiment, the filler sequence region is the FILL11 sequence region, the FILL13 sequence region, and the FILL15 sequence region. In one embodiment, the filler sequence region is the FILL11 sequence region, the FILL13 sequence region, and the FILL16 sequence region. In one embodiment, the filler sequence region is the FILL11 sequence region, the FILL13 sequence region, and the FILL17 sequence region. In one embodiment, the filler sequence region is the FILL11 sequence region, the FILL13 sequence region, and the FILL18 sequence region. In one embodiment, the filler sequence region is the FILL11 sequence region, the FILL14 sequence region, and the FILL15 sequence region. In one embodiment, the filler sequence region is the FILL11 sequence region, the FILL14 sequence region, and the FILL16 sequence region. In one embodiment, the filler sequence region is the FILL11 sequence region, the FILL14 sequence region, and the FILL17 sequence region. In one embodiment, the filler sequence region is the FILL11 sequence region, the FILL14 sequence region, and the FILL18 sequence region. In one embodiment, the filler sequence region is the FILL11 sequence region, the FILL15 sequence region, and the FILL16 sequence region. In one embodiment, the filler sequence region is the FILL11 sequence region, the FILL15 sequence region, and the FILL17 sequence region. In one embodiment, the filler sequence region is the FILL11 sequence region, the FILL15 sequence region, and the FILL18 sequence region. In one embodiment, the filler sequence region is the FILL11 sequence region, the FILL16 sequence region, and the FILL17 sequence region. In one embodiment, the filler sequence region is the FILL11 sequence region, the FILL16 sequence region, and the FILL18 sequence region. In one embodiment, the filler sequence region is the FILL11 sequence region, the FILL17 sequence region, and the FILL18 sequence region. In one embodiment, the filler sequence region is the FILL12 sequence region, the FILL13 sequence region, and the FILL14 sequence region. In one embodiment, the filler sequence region is the FILL12 sequence region, the FILL13 sequence region, and the FILL15 sequence region. In one embodiment, the filler sequence region is the FILL12 sequence region, the FILL13 sequence region, and the FILL16 sequence region. In one embodiment, the filler sequence region is the FILL12 sequence region, the FILL13 sequence region, and the FILL17 sequence region. In one embodiment, the filler sequence region is the FILL12 sequence region, the FILL13 sequence region, and the FILL18 sequence region. In one embodiment, the filler sequence region is the FILL12 sequence region, the FILL14 sequence region, and the FILL15 sequence region. In one embodiment, the filler sequence region is the FILL12 sequence region, the FILL14 sequence region, and the FILL16 sequence region. In one embodiment, the filler sequence region is the FILL12 sequence region, the FILL14 sequence region, and the FILL17 sequence region. In one embodiment, the filler sequence region is the FILL12 sequence region, the FILL14 sequence region, and the FILL18 sequence region. In one embodiment, the filler sequence region is the FILL12 sequence region, the FILL15 sequence region, and the FILL16 sequence region. In one embodiment, the filler sequence region is the FILL12 sequence region, the FILL15 sequence region, and the FILL17 sequence region. In one embodiment, the filler sequence region is the FILL12 sequence region, the FILL15 sequence region, and the FILL18 sequence region. In one embodiment, the filler sequence region is the FILL12 sequence region, the FILL16 sequence region, and the FILL17 sequence region. In one embodiment, the filler sequence region is the FILL12 sequence region, the FILL16 sequence region, and the FILL18 sequence region. In one embodiment, the filler sequence region is the FILL12 sequence region, the FILL17 sequence region, and the FILL18 sequence region. In one embodiment, the filler sequence region is the FILL13 sequence region, the FILL14 sequence region, and the FILL15 sequence region. In one embodiment, the filler sequence region is the FILL13 sequence region, the FILL14 sequence region, and the FILL16 sequence region. In one embodiment, the filler sequence region is the FILL13 sequence region, the FILL14 sequence region, and the FILL17 sequence region. In one embodiment, the filler sequence region is the FILL13 sequence region, the FILL14 sequence region, and the FILL18 sequence region. In one embodiment, the filler sequence region is the FILL13 sequence region, the FILL15 sequence region, and the FILL16 sequence region. In one embodiment, the filler sequence region is the FILL13 sequence region, the FILL15 sequence region, and the FILL17 sequence region. In one embodiment, the filler sequence region is the FILL13 sequence region, the FILL15 sequence region, and the FILL18 sequence region. In one embodiment, the filler sequence region is the FILL13 sequence region, the FILL16 sequence region, and the FILL17 sequence region. In one embodiment, the filler sequence region is the FILL13 sequence region, the FILL16 sequence region, and the FILL18 sequence region. In one embodiment, the filler sequence region is the FILL13 sequence region, the FILL17 sequence region, and the FILL18 sequence region. In one embodiment, the filler sequence region is the FILL14 sequence region, the FILL15 sequence region, and the FILL16 sequence region. In one embodiment, the filler sequence region is the FILL14 sequence region, the FILL15 sequence region, and the FILL17 sequence region. In one embodiment, the filler sequence region is the FILL14 sequence region, the FILL15 sequence region, and the FILL18 sequence region. In one embodiment, the filler sequence region is the FILL14 sequence region, the FILL16 sequence region, and the FILL17 sequence region. In one embodiment, the filler sequence region is the FILL14 sequence region, the FILL16 sequence region, and the FILL18 sequence region. In one embodiment, the filler sequence region is the FILL14 sequence region, the FILL17 sequence region, and the FILL18 sequence region. In one embodiment, the filler sequence region is the FILL15 sequence region, the FILL16 sequence region, and the FILL17 sequence region. In one embodiment, the filler sequence region is the FILL15 sequence region, the FILL16 sequence region, and the FILL18 sequence region. In one embodiment, the filler sequence region is the FILL15 sequence region, the FILL17 sequence region, and the FILL18 sequence region. In one embodiment, the filler sequence region is the FILL16 sequence region, the FILL17 sequence region, and the FILL18 sequence region.

[0705] In one embodiment, the AAV particle viral genome may comprise at least one enhancer sequence region. The enhancer sequence region(s) may, independently, have a length such as, but not limited to, 300, 301, 302, 303, 304, 305, 306, 307, 308, 309, 310, 311, 312, 313, 314, 315, 316, 317, 318, 319, 320, 321, 322, 323, 324, 325, 326, 327, 328, 329, 330, 331, 332, 333, 334, 335, 336, 337, 338, 339, 340, 341, 342, 343, 344, 345, 346, 347, 348, 349, 350, 351, 352, 353, 354, 355, 356, 357, 358, 359, 360, 361, 362, 363, 364, 365, 366, 367, 368, 369, 370, 371, 372, 373, 374, 375, 376, 377, 378, 379, 380, 381, 382, 383, 384, 385, 386, 387, 388, 389, 390, 391, 392, 393, 394, 395, 396, 397, 398, 399, and 400 nucleotides. The length of the enhancer region for the viral genome may be 300-310, 300-325, 305-315, 310-320, 315-325, 320-330, 325-335, 325-350, 330-340, 335-345, 340-350, 345-355, 350-360, 350-375, 355-365, 360-370, 365-375, 370-380, 375-385, 375-400, 380-390, 385-395, and 390-400 nucleotides. As a non-limiting example, the viral genome comprises an enhancer region that is about 303 nucleotides in length. As a non-limiting example, the viral genome comprises an enhancer region that is about 382 nucleotides in length.

[0706] In one embodiment, the AAV particle viral genome comprises at least one enhancer sequence region. Non-limiting examples of enhancer sequence regions are described in Table 20.

TABLE 20
Enhancer Sequence Regions

| Sequence Region Name | SEQ ID NO |
|---|---|
| Enhancer1 | 1814 |
| Enhancer2 | 1815 |

[0707] In one embodiment, the AAV particle viral genome comprises one enhancer sequence region. In one embodiment, the enhancer sequence regions is the Enhancer1 sequence region. In one embodiment, the enhancer sequence regions is the Enhancer2 sequence region.

[0708] In one embodiment, the AAV particle viral genome comprises two enhancer sequence regions. In one embodiment, the enhancer sequence regions are the Enhancer1 sequence region and the Enhancer 2 sequence region.

[0709] In one embodiment, the AAV particle viral genome may comprise at least one promoter sequence region. The promoter sequence region(s) may, independently, have a length such as, but not limited to, 4, 5, 6, 7, 8, 9, 10, 11, 12, 13, 14, 15, 16, 17, 18, 19, 20, 21, 22, 23, 24, 25, 26, 27, 28, 29, 30, 31, 32, 33, 34, 35, 36, 37, 38, 39, 40, 41, 42, 43, 44, 45, 46, 47, 48, 49, 50, 51, 52, 53, 54, 55, 56, 57, 58, 59, 60, 61, 62, 63, 64, 65, 66, 67, 68, 69, 70, 71, 72, 73, 74, 75, 76, 77, 78, 79, 80, 81, 82, 83, 84, 85, 86, 87, 88, 89, 90, 91, 92, 93, 94, 95, 96, 97, 98, 99, 100, 101, 102, 103, 104, 105, 106, 107, 108, 109, 110, 111, 112, 113, 114, 115, 116, 117, 118, 119, 120, 121, 122, 123, 124, 125, 126, 127, 128, 129, 130, 131, 132, 133, 134, 135, 136, 137, 138, 139, 140, 141, 142, 143, 144, 145, 146, 147, 148, 149, 150, 151, 152, 153, 154, 155, 156, 157, 158, 159, 160, 161, 162, 163, 164, 165, 166, 167, 168, 169, 170, 171, 172, 173, 174, 175, 176, 177, 178, 179, 180, 181, 182, 183, 184, 185, 186, 187, 188, 189, 190, 191, 192, 193, 194, 195, 196, 197, 198, 199, 200, 201, 202, 203, 204, 205, 206, 207, 208, 209, 210, 211, 212, 213, 214, 215, 216, 217, 218, 219, 220, 221, 222, 223, 224, 225, 226, 227, 228, 229, 230, 231, 232, 233, 234, 235, 236, 237, 238, 239, 240, 241, 242, 243, 244, 245, 246, 247, 248, 249, 250, 251, 252, 253, 254, 255, 256, 257, 258, 259, 260, 261, 262, 263, 264, 265, 266, 267, 268, 269, 270, 271, 272, 273, 274, 275, 276, 277, 278, 279, 280, 281, 282, 283, 284, 285, 286, 287, 288, 289, 290, 291, 292, 293, 294, 295, 296, 297, 298, 299, 300, 301, 302, 303, 304, 305, 306, 307, 308, 309, 310, 311, 312, 313, 314, 315, 316, 317, 318, 319, 320, 321, 322, 323, 324, 325, 326, 327, 328, 329, 330, 331, 332, 333, 334, 335, 336, 337, 338, 339, 340, 341, 342, 343, 344, 345, 346, 347, 348, 349, 350, 351, 352, 353, 354, 355, 356, 357, 358, 359, 360, 361, 362, 363, 364, 365, 366, 367, 368, 369, 370, 371, 372, 373, 374, 375, 376, 377, 378, 379, 380, 381, 382, 383, 384, 385, 386, 387, 388, 389, 390, 391, 392, 393, 394, 395, 396, 397, 398, 399, 400, 401, 402, 403, 404, 405, 406, 407, 408, 409, 410, 411, 412, 413, 414, 415, 416, 417, 418, 419, 420, 421, 422, 423, 424, 425, 426, 427, 428, 429, 430, 431, 432, 433, 434, 435, 436, 437, 438, 439, 440, 441, 442, 443, 444, 445, 446, 447, 448, 449, 450, 451, 452, 453, 454, 455, 456, 457, 458, 459, 460, 461, 462, 463, 464, 465, 466, 467, 468, 469, 470, 471, 472, 473, 474, 475, 476, 477, 478, 479, 480, 481, 482, 483, 484, 485, 486, 487, 488, 489, 490, 491, 492, 493, 494, 495, 496, 497, 498, 499, 500, 501, 502, 503, 504, 505, 506, 507, 508, 509, 510, 511, 512, 513, 514, 515, 516, 517, 518, 519, 520, 521, 522, 523, 524, 525, 526, 527, 528, 529, 530, 531, 532, 533, 534, 535, 536, 537, 538, 539, 540, 541, 542, 543, 544, 545, 546, 547, 548, 549, 550, 551, 552, 553, 554, 555, 556, 557, 558, 559, 560, 561, 562, 563, 564, 565, 566, 567, 568, 569, 570, 571, 572, 573, 574, 575, 576, 577, 578, 579, 580, 581, 582, 583, 584, 585, 586, 587, 588, 589, 590, 591, 592, 593, 594, 595, 596, 597, 598, 599, and 600 nucleotides. The length of the promoter region for the viral genome may be 4-10, 10-20, 10-50, 20-30, 30-40, 40-50, 50-60, 50-100, 60-70, 70-80, 80-90, 90-100, 100-110, 100-150, 110-120, 120-130, 130-140, 140-150, 150-160, 150-200, 160-170, 170-180, 180-190, 190-200, 200-210, 200-250, 210-220, 220-230, 230-240, 240-250, 250-260, 250-300, 260-270, 270-280, 280-290, 290-300, 300-310, 300-350, 310-320, 320-330, 330-340, 340-350, 350-360, 350-400, 360-370, 370-380, 380-390, 390-400, 400-410, 400-450, 410-420, 420-430, 430-440, 440-450, 450-460, 450-500, 460-470, 470-480, 480-490, 490-500, 500-510, 500-550, 510-520, 520-530, 530-540, 540-550, 550-560, 550-600, 560-570, 570-580, 580-590, and 590-600 nucleotides. As a non-limiting example, the viral genome comprises a promoter region that is about 4 nucleotides in length. As a non-limiting example, the viral genome comprises a promoter region that is about 17 nucleotides in length. As a non-limiting example, the viral genome comprises a promoter region that is about 204 nucleotides in length. As a non-limiting example, the viral genome comprises a promoter region that is about 219 nucleotides in length. As a non-limiting example, the viral genome comprises a promoter region that is about 260 nucleotides in length. As a non-limiting example, the viral genome comprises a promoter region that is about 303 nucleotides in length. As a non-limiting example, the viral genome comprises a promoter region that is about 382 nucleotides in length. As a non-limiting example, the viral genome comprises a promoter region that is about 588 nucleotides in length.

[0710] In one embodiment, the AAV particle viral genome comprises at least one promoter sequence region. Non-limiting examples of promoter sequence regions are described in Table 21.

TABLE 21
Promoter Sequence Regions

| Sequence Region Name | SEQ ID NO or Sequence |
|---|---|
| Promoter1 | 1816 |
| Promoter2 | 1817 |
| Promoter3 | GTTG |
| Promoter4 | 1818 |
| Promoter5 | 1819 |
| Promoter6 | 1820 |

[0711] In one embodiment, the AAV particle viral genome comprises one promoter sequence region. In one embodiment, the promoter sequence region is Promoter1. In one embodiment, the promoter sequence region is Promoter2. In one embodiment, the promoter sequence region is Promoter3. In one embodiment, the promoter sequence region is Promoter4. In one embodiment, the promoter sequence region is Promoter5. In one embodiment, the promoter sequence region is Promoter6.

[0712] In one embodiment, the AAV particle viral genome comprises two promoter sequence regions. In one embodiment, the promoter sequence region is Promoter1 sequence region, and the Promoter2 sequence region. In one embodiment, the promoter sequence region is Promoter1 sequence region, and the Promoter3 sequence region. In one embodiment, the promoter sequence region is Promoter1 sequence region, and the Promoter4 sequence region. In one embodiment, the promoter sequence region is Promoter1 sequence region, and the Promoter5 sequence region. In one embodiment, the promoter sequence region is Promoter1 sequence region, and the Promoter6 sequence region. In one embodiment, the promoter sequence region is Promoter2 sequence region, and the Promoter3 sequence region. In one embodiment, the promoter sequence region is Promoter2 sequence region, and the Promoter4 sequence region. In one embodiment, the promoter sequence region is Promoter2 sequence region, and the Promoter5 sequence region. In one embodiment, the promoter sequence region is Promoter2 sequence region, and the Promoter6 sequence region. In one embodiment, the promoter sequence region is Promoter3 sequence region, and the Promoter4 sequence region. In one embodiment, the promoter sequence region is Promoter3 sequence region, and the Promoter5 sequence region. In one embodiment, the promoter sequence region is Promoter3 sequence region, and the Promoter6 sequence region. In one embodiment, the promoter sequence region is Promoter4 sequence region, and the Promoter5 sequence region. In one embodiment, the promoter sequence region is Promoter4 sequence region, and the Promoter6 sequence region. In one embodiment, the promoter sequence region is Promoter5 sequence region, and the Promoter6 sequence region.

[0713] In one embodiment, the AAV particle viral genome may comprise at least one exon sequence region. The exon region(s) may, independently, have a length such as, but not limited to, 2, 3, 4, 5, 6, 7, 8, 9, 10, 11, 12, 13, 14, 15, 16, 17, 18, 19, 20, 21, 22, 23, 24, 25, 26, 27, 28, 29, 30, 31, 32, 33, 34, 35, 36, 37, 38, 39, 40, 41, 42, 43, 44, 45, 46, 47, 48, 49, 50, 51, 52, 53, 54, 55, 56, 57, 58, 59, 60, 61, 62, 63, 64, 65, 66, 67, 68, 69, 70, 71, 72, 73, 74, 75, 76, 77, 78, 79, 80, 81, 82, 83, 84, 85, 86, 87, 88, 89, 90, 91, 92, 93, 94, 95, 96, 97, 98, 99, 100, 101, 102, 103, 104, 105, 106, 107, 108, 109, 110, 111, 112, 113, 114, 115, 116, 117, 118, 119, 120, 121, 122, 123, 124, 125, 126, 127, 128, 129, 130, 131, 132, 133, 134, 135, 136, 137, 138, 139, 140, 141, 142, 143, 144, 145, 146, 147, 148, 149, and 150 nucleotides. The length of the exon region for the viral genome may be 2-10, 5-10, 5-15, 10-20, 10-30, 10-40, 15-20, 15-25, 20-30, 20-40, 20-50, 25-30, 25-35, 30-40, 30-50, 30-60, 35-40, 35-45, 40-50, 40-60, 40-70, 45-50, 45-55, 50-60, 50-70, 50-80, 55-60, 55-65, 60-70, 60-80, 60-90, 65-70, 65-75, 70-80, 70-90, 70-100, 75-80, 75-85, 80-90, 80-100, 80-110, 85-90, 85-95, 90-100, 90-110, 90-120, 95-100, 95-105, 100-110, 100-120, 100-130, 105-110, 105-115, 110-120, 110-130, 110-140, 115-120, 115-125, 120-130, 120-140, 120-150, 125-130, 125-135, 130-140, 130-150, 135-140, 135-145, 140-150, and 145-150 nucleotides. As a non-limiting example, the viral genome comprises an exon region that is about 53 nucleotides in length. As a non-limiting example, the viral genome comprises an exon region that is about 134 nucleotides in length.

[0714] In one embodiment, the AAV particle viral genome comprises at least one Exon sequence region. Non-limiting examples of Exon sequence regions are described in Table 22.

TABLE 22
Exon Sequence Regions

| Sequence Region Name | SEQ ID NO |
|---|---|
| Exon1 | 1821 |
| Exon2 | 1822 |

[0715] In one embodiment, the AAV particle viral genome comprises one Exon sequence region. In one embodiment, the Exon sequence regions is the Exon1 sequence region. In one embodiment, the Exon sequence regions is the Exon2 sequence region.

[0716] In one embodiment, the AAV particle viral genome comprises two Exon sequence regions. In one embodiment, the Exon sequence regions are the Exon1 sequence region and the Exon 2 sequence region.

[0717] In one embodiment, the AAV particle viral genome may comprise at least one intron sequence region. The intron region(s) may, independently, have a length such as, but not limited to, 25, 26, 27, 28, 29, 30, 31, 32, 33, 34, 35, 36, 37, 38, 39, 40, 41, 42, 43, 44, 45, 46, 47, 48, 49, 50, 51, 52, 53, 54, 55, 56, 57, 58, 59, 60, 61, 62, 63, 64, 65, 66, 67, 68, 69, 70, 71, 72, 73, 74, 75, 76, 77, 78, 79, 80, 81, 82, 83, 84, 85, 86, 87, 88, 89, 90, 91, 92, 93, 94, 95, 96, 97, 98, 99, 100, 101, 102, 103, 104, 105, 106, 107, 108, 109, 110, 111, 112, 113, 114, 115, 116, 117, 118, 119, 120, 121, 122, 123, 124, 125, 126, 127, 128, 129, 130, 131, 132, 133, 134, 135, 136, 137, 138, 139, 140, 141, 142, 143, 144, 145, 146, 147, 148, 149, 150, 151, 152, 153, 154, 155, 156, 157, 158, 159, 160, 161, 162, 163, 164, 165, 166, 167, 168, 169, 170, 171, 172, 173, 174, 175, 176, 177, 178, 179, 180, 181, 182, 183, 184, 185, 186, 187, 188, 189, 190, 191, 192, 193, 194, 195, 196, 197, 198, 199, 200, 201, 202, 203, 204, 205, 206, 207, 208, 209, 210, 211, 212, 213, 214, 215, 216, 217, 218, 219, 220, 221, 222, 223, 224, 225, 226, 227, 228, 229, 230, 231, 232, 233, 234, 235, 236, 237, 238, 239, 240, 241, 242, 243, 244, 245, 246, 247, 248, 249, 250, 251, 252, 253, 254, 255, 256, 257, 258, 259, 260, 261, 262, 263, 264, 265, 266, 267, 268, 269, 270, 271, 272, 273, 274, 275, 276, 277, 278, 279, 280, 281, 282, 283, 284, 285, 286, 287, 288, 289, 290, 291, 292, 293, 294, 295, 296, 297, 298, 299, 300, 301, 302, 303, 304, 305, 306, 307, 308, 309, 310, 311, 312, 313, 314, 315, 316, 317, 318, 319, 320, 321, 322, 323, 324, 325, 326, 327, 328, 329, 330, 331, 332, 333, 334, 335, 336, 337, 338, 339, 340, 341, 342, 343, 344, 345, 346, 347, 348, 349, and 350 nucleotides. The length of the intron region for the viral genome may be 25-35, 25-50, 35-45, 45-55, 50-75, 55-65, 65-75, 75-85, 75-100, 85-95, 95-105, 100-125, 105-115, 115-125, 125-135, 125-150, 135-145, 145-155, 150-175, 155-165, 165-175, 175-185, 175-200, 185-195, 195-205, 200-225, 205-215, 215-225, 225-235, 225-250, 235-245, 245-255, 250-275, 255-265, 265-275, 275-285, 275-300, 285-295, 295-305, 300-325, 305-315, 315-325, 325-335, 325-350, and 335-345 nucleotides. As a non-limiting example, the viral genome comprises an intron region that is about 32 nucleotides in length. As a non-limiting example, the viral genome comprises an intron region that is about 172 nucleotides in length. As a non-limiting example, the viral genome comprises an intron region that is about 201 nucleotides in length. As a non-limiting example, the viral genome comprises an intron region that is about 347 nucleotides in length.

[0718] In one embodiment, the AAV particle viral genome comprises at least one intron sequence region. Non-limiting examples of intron sequence regions are described in Table 23.

TABLE 23
Intron Sequence Regions

| Sequence Region Name | SEQ ID NO |
|---|---|
| Intron1 | 1823 |
| Intron2 | 1824 |
| Intron3 | 1825 |
| Intron4 | 1826 |

[0719] In one embodiment, the AAV particle viral genome comprises one intron sequence region. In one embodiment, the intron sequence regions is the Intron1 sequence region. In one embodiment, the intron sequence regions is the Intron2 sequence region. In one embodiment, the intron sequence regions is the Intron3 sequence region. In one embodiment, the intron sequence regions is the Intron4 sequence region.

[0720] In one embodiment, the AAV particle viral genome comprises two intron sequence regions. In one embodiment, the intron sequence regions are the Intron1 sequence region and the Intron2 sequence region. In one embodiment, the intron sequence regions are the Intron1 sequence region and the Intron3 sequence region. In one embodiment, the intron sequence regions are the Intron1 sequence region and the Intron4 sequence region. In one embodiment, the intron sequence regions are the Intron2 sequence region and the Intron3 sequence region. In one embodiment, the intron sequence regions are the Intron2 sequence region and the Intron4 sequence region. In one embodiment, the intron sequence regions are the Intron3 sequence region and the Intron4 sequence region.

[0721] In one embodiment, the AAV particle viral genome comprises three intron sequence regions. In one embodiment, the intron sequence regions are the Intron1 sequence region, the Intron2 sequence region, and the Intron3 sequence region. In one embodiment, the intron sequence regions are the Intron1 sequence region, the Intron2 sequence region, and the Intron4 sequence region. In one embodiment, the intron sequence regions are the Intron1 sequence region, the Intron3 sequence region, and the Intron4 sequence region. In one embodiment, the intron sequence regions are the Intron2 sequence region, the Intron3 sequence region, and the Intron4 sequence region.

[0722] In one embodiment, the AAV particle viral genome may comprise at least one polyadenylation signal sequence region. The polyadenylation signal region sequence region(s) may, independently, have a length such as, but not limited to, 4, 5, 6, 7, 8, 9, 10, 11, 12, 13, 14, 15, 16, 17, 18, 19, 20, 21, 22, 23, 24, 25, 26, 27, 28, 29, 30, 31, 32, 33, 34, 35, 36, 37, 38, 39, 40, 41, 42, 43, 44, 45, 46, 47, 48, 49, 50, 51, 52, 53, 54, 55, 56, 57, 58, 59, 60, 61, 62, 63, 64, 65, 66, 67, 68, 69, 70, 71, 72, 73, 74, 75, 76, 77, 78, 79, 80, 81, 82, 83, 84, 85, 86, 87, 88, 89, 90, 91, 92, 93, 94, 95, 96, 97, 98, 99, 100, 101, 102, 103, 104, 105, 106, 107, 108, 109, 110, 111, 112, 113, 114, 115, 116, 117, 118, 119, 120, 121, 122, 123, 124, 125, 126, 127, 128, 129, 130, 131, 132, 133, 134, 135, 136, 137, 138, 139, 140, 141, 142, 143, 144, 145, 146, 147, 148, 149, 150, 151, 152, 153, 154, 155, 156, 157, 158, 159, 160, 161, 162, 163, 164, 165, 166, 167, 168, 169, 170, 171, 172, 173, 174, 175, 176, 177, 178, 179, 180, 181, 182, 183, 184, 185, 186, 187, 188, 189, 190, 191, 192, 193, 194, 195, 196, 197, 198, 199, 200, 201, 202, 203, 204, 205, 206, 207, 208, 209, 210, 211, 212, 213, 214, 215, 216, 217, 218, 219, 220, 221, 222, 223, 224, 225, 226, 227, 228, 229, 230, 231, 232, 233, 234, 235, 236, 237, 238, 239, 240, 241, 242, 243, 244, 245, 246, 247, 248, 249, 250, 251, 252, 253, 254, 255, 256, 257, 258, 259, 260, 261, 262, 263, 264, 265, 266, 267, 268, 269, 270, 271, 272, 273, 274, 275, 276, 277, 278, 279, 280, 281, 282, 283, 284, 285, 286, 287, 288, 289, 290, 291, 292, 293, 294, 295, 296, 297, 298, 299, 300, 301, 302, 303, 304, 305, 306, 307, 308, 309, 310, 311, 312, 313, 314, 315, 316, 317, 318, 319, 320, 321, 322, 323, 324, 325, 326, 327, 328, 329, 330, 331, 332, 333, 334, 335, 336, 337, 338, 339, 340, 341, 342, 343, 344, 345, 346, 347, 348, 349, 350, 351, 352, 353, 354, 355, 356, 357, 358, 359, 360, 361, 362, 363, 364, 365, 366, 367, 368, 369, 370, 371, 372, 373, 374, 375, 376, 377, 378, 379, 380, 381, 382, 383, 384, 385, 386, 387, 388, 389, 390, 391, 392, 393, 394, 395, 396, 397, 398, 399, 400, 401, 402, 403, 404, 405, 406, 407, 408, 409, 410, 411, 412, 413, 414, 415, 416, 417, 418, 419, 420, 421, 422, 423, 424, 425, 426, 427, 428, 429, 430, 431, 432, 433, 434, 435, 436, 437, 438, 439, 440, 441, 442, 443, 444, 445, 446, 447, 448, 449, 450, 451, 452, 453, 454, 455, 456, 457, 458, 459, 460, 461, 462, 463, 464, 465, 466, 467, 468, 469, 470, 471, 472, 473, 474, 475, 476, 477, 478, 479, 480, 481, 482, 483, 484, 485, 486, 487, 488, 489, 490, 491, 492, 493, 494, 495, 496, 497, 498, 499, 500, 501, 502, 503, 504, 505, 506, 507, 508, 509, 510, 511, 512, 513, 514, 515, 516, 517, 518, 519, 520, 521, 522, 523, 524, 525, 526, 527, 528, 529, 530, 531, 532, 533, 534, 535, 536, 537, 538, 539, 540, 541, 542, 543, 544, 545, 546, 547, 548, 549, 550, 551, 552, 553, 554, 555, 556, 557, 558, 559, 560, 561, 562, 563, 564, 565, 566, 567, 568, 569, 570, 571, 572, 573, 574, 575, 576, 577, 578, 579, 580, 581, 582, 583, 584, 585, 586, 587, 588, 589, 590, 591, 592, 593, 594, 595, 596, 597, 598, 599, and 600 nucleotides. The length of the polyadenylation signal sequence region for the viral genome may be 4-10, 10-20, 10-50, 20-30, 30-40, 40-50, 50-60, 50-100, 60-70, 70-80, 80-90, 90-100, 100-110, 100-150, 110-120, 120-130, 130-140, 140-150, 150-160, 150-200, 160-170, 170-180, 180-190, 190-200, 200-210, 200-250, 210-220, 220-230, 230-240, 240-250, 250-260, 250-300, 260-270, 270-280, 280-290, 290-300, 300-310, 300-350, 310-320, 320-330, 330-340, 340-350, 350-360, 350-400, 360-370, 370-380, 380-390, 390-400, 400-410, 400-450, 410-420, 420-430, 430-440, 440-450, 450-460, 450-500, 460-470, 470-480, 480-490, 490-500, 500-510, 500-550, 510-520, 520-530, 530-540, 540-550, 550-560, 550-600, 560-570, 570-580, 580-590, and 590-600 nucleotides. As a non-limiting example, the viral genome comprises a polyadenylation signal sequence region that is about 127 nucleotides in length. As a non-limiting example, the viral genome comprises a polyadenylation signal sequence region that is about 225 nucleotides in length. As a non-limiting example, the viral genome comprises a polyadenylation signal sequence region that is about 476 nucleotides in length. As a non-limiting example, the viral genome comprises a polyadenylation signal sequence region that is about 477 nucleotides in length.

[0723] In one embodiment, the AAV particle viral genome comprises at least one polyadenylation (polyA) signal sequence region. Non-limiting examples of polyA signal sequence regions are described in Table 24.

TABLE 24
PolyA Signal Sequence Regions

| Sequence Region Name | SEQ ID NO |
|---|---|
| PolyA1 | 1827 |
| PolyA2 | 1828 |
| PolyA3 | 1829 |
| PolyA4 | 1830 |

[0724] In one embodiment, the AAV particle viral genome comprises one polyA signal sequence region. In one embodiment, the polyA signal sequence regions is the PolyA1 sequence region. In one embodiment, the polyA signal sequence regions is the PolyA2 sequence region. In one embodiment, the polyA signal sequence regions is the PolyA3 sequence region. In one embodiment, the polyA signal sequence regions is the PolyA4 sequence region.

[0725] In one embodiment, the AAV particle viral genome comprises more than one polyA signal sequence region.

[0726] AAV particles may be modified to enhance the efficiency of delivery. Such modified AAV particles comprising the nucleic acid sequence encoding the siRNA molecules of the present invention can be packaged efficiently and can be used to successfully infect the target cells at high frequency and with minimal toxicity.

[0727] In some embodiments, the AAV particle comprising a nucleic acid sequence encoding the siRNA molecules of the present invention may be a human serotype AAV particle. Such human AAV particle may be derived from any known serotype, e.g., from any one of serotypes AAV1-AAV11. As non-limiting examples, AAV particles may be vectors comprising an AAV1-derived genome in an AAV1-derived capsid; vectors comprising an AAV2-derived genome in an AAV2-derived capsid; vectors comprising an AAV4-derived genome in an AAV4 derived capsid; vectors comprising an AAV6-derived genome in an AAV6 derived capsid or vectors comprising an AAV9-derived genome in an AAV9 derived capsid.

[0728] In other embodiments, the AAV particle comprising a nucleic acid sequence for encoding siRNA molecules of the present invention may be a pseudotyped hybrid or chimeric AAV particle which contains sequences and/or components originating from at least two different AAV serotypes. Pseudotyped AAV particles may be vectors comprising an AAV genome derived from one AAV serotype and a capsid protein derived at least in part from a different AAV serotype. As non-limiting examples, such pseudotyped AAV particles may be vectors comprising an AAV2-derived genome in an AAV1-derived capsid; or vectors comprising an AAV2-derived genome in an AAV6-derived capsid; or vectors comprising an AAV2-derived genome in an AAV4-derived capsid; or an AAV2-derived genome in an AAV9-derived capsid. In like fashion, the present invention contemplates any hybrid or chimeric AAV particle.

[0729] In other embodiments, AAV particles comprising a nucleic acid sequence encoding the siRNA molecules of the present invention may be used to deliver siRNA molecules to the central nervous system (e.g., U.S. Pat. No. 6,180,613; the contents of which is herein incorporated by reference in its entirety).

[0730] In some aspects, the AAV particles comprising a nucleic acid sequence encoding the siRNA molecules of the present invention may further comprise a modified capsid including peptides from non-viral origin. In other aspects, the AAV particle may contain a CNS specific chimeric capsid to facilitate the delivery of encoded siRNA duplexes into the brain and the spinal cord. For example, an alignment of cap nucleotide sequences from AAV variants exhibiting CNS tropism may be constructed to identify variable region (VR) sequence and structure.

### Polycistronic AAV Particles Comprising Modulatory Polynucleotides

[0731] In one embodiment, the AAV vector comprises a nucleic acid sequence encoding more than one modulatory polynucleotide. In one embodiment, the AAV vector comprises a nucleic acid sequence encoding more than one siRNA molecule. The AAV vector may comprise a nucleic acid sequence encoding 2, 3, 4, 5, 6, 7, 8, 9 or more than 9 modulatory polynucleotides. The AAV vector may comprise a nucleic acid sequence encoding 2, 3, 4, 5, 6, 7, 8, 9 or more than 9 siRNA molecules.

[0732] When the AAV vector comprises at least one nucleic acid sequence encoding more than one modulatory polynucleotide, e.g., siRNA molecule, the AAV vector may be referred to as polycistronic. When the nucleic acid sequence of the AAV vector encodes modulatory polynucleotide molecules, e.g., siRNA molecules, targeting a single target, then the AAV vector may be referred to as a “monospecific polycistronic” AAV vector. When the nucleic acid sequence of the AAV vector encodes modulatory polynucleotide molecules, e.g., siRNA molecules, targeting more than one target, then the AAV vector may be referred to as a “multispecific polycistronic” AAV vector. When the nucleic acid sequence of the AAV vector encodes siRNA molecules targeting two targets then the AAV vector may be referred to as a “bispecific polycistronic” AAV vector.

[0733] In one embodiment, the AAV vector comprises at least one nucleic acid sequence encoding a modulatory polynucleotide, e.g., siRNA molecule, targeting a single target gene. The AAV vector may comprise 1, 2, 3, 4, 5, 6, 7, 8, 9 or more than 9 nucleic acid sequences encoding a single modulatory polynucleotide, e.g., siRNA molecule, targeting a single target gene. As a non-limiting example, the target gene is HTT. As another non-limiting example, the target gene is SOD1.

[0734] In one embodiment, the AAV vector is a monospecific polycistronic AAV vector and comprises a nucleic acid sequence encoding two modulatory polynucleotides, e.g., siRNA molecules, targeting a target gene. In one aspect, the modulatory polynucleotides, e.g., siRNA molecules, comprise the same sense strands. In another aspect, the modulatory polynucleotides, e.g., siRNA molecules, comprise different sense strands. In one aspect, the modulatory polynucleotides, e.g., siRNA molecules, comprise different sense strands which have at least 80% complementarity (e.g., 80%, 85%, 90%, 95%, 99% or more than 99%, 80-85%, 80-90%, 85-90%, 85-95%, 90-95%, 90-100%) to the same region on the target gene sequence. In one aspect, the modulatory polynucleotides, e.g., siRNA molecules, comprise different sense strands which have complementarity to different regions of the target gene sequence. As a non-limiting example, the target gene is HTT. As another non-limiting example, the target gene is SOD1.

[0735] In one embodiment, the AAV vector is a monospecific polycistronic AAV vector and comprises a nucleic acid sequence encoding three modulatory polynucleotides, e.g., siRNA molecules, targeting a target gene. In one aspect, the modulatory polynucleotides, e.g., siRNA molecules, comprise the same sense strands. In another aspect, each of the modulatory polynucleotides, e.g., siRNA molecules, comprise different sense strands. In another aspect, two of the modulatory polynucleotides, e.g., siRNA molecules, comprise the same sense strand and the third modulatory polynucleotide, e.g., siRNA molecule, comprises a different sense strand. In one aspect, each of the modulatory polynucleotides, e.g., siRNA molecules, comprise different sense strands which have at least 80% complementarity (e.g., 80%, 85%, 90%, 95%, 99% or more than 99%, 80-85%, 80-90%, 85-90%, 85-95%, 90-95%, 90-100%) to the same region on the target gene sequence. In one aspect, two of the modulatory polynucleotides, e.g., siRNA molecules, comprise different sense strands which have at least 80% complementarity (e.g., 80%, 85%, 90%, 95%, 99% or more than 99%, 80-85%, 80-90%, 85-90%, 85-95%, 90-95%, 90-100%) to the same region on the target gene sequence. In one aspect, the modulatory polynucleotides, e.g., siRNA molecules, comprise different sense strands which have complementarity to different regions of the target gene sequence. As a non-limiting example, the target gene is HTT. As another non-limiting example, the target gene is SOD1.

[0736] In one embodiment, the AAV vector is a monospecific polycistronic AAV vector and comprises a nucleic acid sequence encoding four modulatory polynucleotides, e.g., siRNA molecules, targeting a target gene. In one aspect, the modulatory polynucleotides, e.g., siRNA molecules, comprise the same sense strands. In another aspect, each of the modulatory polynucleotides, e.g., siRNA molecules, comprise different sense strands. In another aspect, two of the modulatory polynucleotides, e.g., siRNA molecules, comprise a first sense strand sequence and the other two modulatory polynucleotides, e.g., siRNA molecules, comprise a second sense strand sequence. In another aspect, three of the modulatory polynucleotides, e.g., siRNA molecules, comprise a first sense strand sequence and the other modulatory polynucleotides e.g., siRNA molecule, comprises a second sense strand sequence. In one aspect, each of the modulatory polynucleotides, e.g., siRNA molecules, comprise different sense strands which have at least 80% complementarity (e.g., 80%, 85%, 90%, 95%, 99% or more than 99%, 80-85%, 80-90%, 85-90%, 85-95%, 90-95%, 90-100%) to the same region on the target gene sequence. In one aspect, two of the modulatory polynucleotides, e.g., siRNA molecules, comprise different sense strands which have at least 80% complementarity (e.g., 80%, 85%, 90%, 95%, 99% or more than 99%, 80-85%, 80-90%, 85-90%, 85-95%, 90-95%, 90-100%) to the same region on the target gene sequence. In one aspect, the modulatory polynucleotides, e.g., siRNA molecules, comprise different sense strands which have complementarity to different regions of the target gene sequence. As a non-limiting example, the target gene is HTT. As another non-limiting example, the target gene is SOD1.

[0737] In one embodiment, the AAV particle is a bispecific polycistronic AAV particle and comprises a nucleic acid sequence encoding two modulatory polynucleotides, e.g., siRNA molecules. In one aspect, one of the modulatory polynucleotides, e.g., siRNA molecules, targets a first target gene and the other modulatory polynucleotide, e.g., siRNA molecule, targets a second target gene, and may reduce the expression of a protein and/or mRNA in at least one region of the central nervous system to treat a disease or disorder of the central nervous system. As a non-limiting example, the target genes are HTT and SOD1 and the diseases are HD and ALS.

[0738] In one embodiment, the AAV particle is a multispecific polycistronic AAV particle and comprises a nucleic acid sequence encoding two or more modulatory polynucleotides, e.g., siRNA molecules. In one aspect, one of the modulatory polynucleotides, e.g., siRNA molecules, targets a first target gene and the other modulatory polynucleotide(s), e.g., siRNA molecule(s), targets a second target gene and may reduce the expression of a protein and/or mRNA in at least one region of the central nervous system to treat a disease or disorder of the central nervous system. In one aspect, each of the modulatory polynucleotides, e.g., siRNA molecules, target a different mRNA to reduce the expression of a protein and/or mRNA in at least one region of the central nervous system to treat a disease or disorder of the central nervous system. As a non-limiting example, the target genes are HTT and SOD1 and the diseases are HD and ALS.

[0739] In one embodiment, the AAV particle may comprise modulatory polynucleotides comprising more than one molecular scaffold sequence. The AAV particle may comprise 1, 2, 3, 4, 5, 6, 7, 8, 9, or more than 9 molecular scaffold sequences.

[0740] In one embodiment, the polycistronic AAV particle viral genome comprises at least one inverted terminal repeat (ITR) sequence region, at least one enhancer sequence region, at least one promoter sequence region, two modulatory polynucleotide regions, and at least one polyadenylation signal sequence region.

[0741] In one embodiment, the polycistronic AAV particle viral genome comprises a 5′ inverted terminal repeat (ITR) sequence region and a 3′ ITR sequence region, a CMV enhancer sequence region, a CBA promoter sequence region, two modulatory polynucleotide sequence regions targeting the same gene of interest (HTT), and a rabbit globin polyadenylation signal sequence region. Non-limiting examples of an ITR to ITR sequence for use in the polycistronic AAV particles of the present invention having all of the sequence modules above are described in Table 25. In Table 25, the sequence identifier or sequence of the sequence region (Region SEQ ID NO) and the length of the sequence region (Region length) are described as well as the name and sequence identifier of the ITR to ITR sequence (e.g., VOYPC1 (SEQ ID NO: 1831)).

TABLE 25
Sequence Regions in ITR to ITR Sequence

| | |
|---|---|
| Sequence | VOYPC1 (SEQ ID NO: 1831) |

| Regions | Region SEQ ID NO | Region length |
|---|---|---|
| 5′ ITR | 1788 | 105 |
| CMV enhancer | 1814 | 382 |
| CBA Promoter | 1816 | 260 |
| Modulatory | 1595 | 158 |
| Polynucleotide | | |
| (VOYHTmiR-104.579) | | |
| Modulatory | 1595 | 158 |
| Polynucleotide | | |
| (VOYHTmiR-104.579) | | |
| Rabbit globin | 1827 | 127 |
| PolyA Signal | | |
| 3′ ITR | 1790 | 130 |

[0742] In one embodiment, the polycistronic AAV particle viral genome comprises SEQ ID NO: 1831 (VOYPC1) which comprises a 5′ inverted terminal repeat (ITR) sequence region and a 3′ ITR sequence region, a CMV enhancer sequence region, a CBA promoter sequence region, two modulatory polynucleotide regions targeting the same gene of interest (HTT), and a rabbit globin polyadenylation signal sequence region.

[0743] In one embodiment, the polycistronic AAV particle viral genome comprises at least one inverted terminal repeat (ITR) sequence region, at least one enhancer sequence region, at least one promoter sequence region, at least one intron sequence region, two modulatory polynucleotide regions, and at least one polyadenylation signal sequence region.

[0744] In one embodiment, the polycistronic AAV particle viral genome comprises a 5′ inverted terminal repeat (ITR) sequence region and a 3′ ITR sequence region, a CMV enhancer sequence region, a CBA promoter sequence region, a SV40 intron sequence region, two modulatory polynucleotide sequence regions targeting the same gene of interest (HTT), and a rabbit globin polyadenylation signal sequence region. Non-limiting examples of an ITR to ITR sequence for use in the polycistronic AAV particles of the present invention having all of the sequence modules above are described in Tables 26 and 27. In Table 26 and 27, the sequence identifier or sequence of the sequence region (Region SEQ ID NO) and the length of the sequence region (Region length) are described as well as the name and sequence identifier of the ITR to ITR sequence (e.g., VOYPC2 (SEQ ID NO: 1832)).

TABLE 26
Sequence Regions in ITR to ITR Sequences

| | VOYPC2 | | VOYPC3 | | VOYPC4 | | VOYPC5 | |
|---|---|---|---|---|---|---|---|---|
| | (SEQ ID NO: 1832) | | (SEQ ID NO: 1833) | | (SEQ ID NO: 1834) | | (SEQ ID NO: 1835) | |
| Sequence | Region | Region | Region | Region | Region | Region | Region | Region |
| Regions | SEQ ID NO | length | SEQ ID NO | length | SEQ ID NO | length | SEQ ID NO | length |
| 5′ ITR | 1788 | 105 | 1788 | 105 | 1788 | 105 | 1788 | 105 |
| CMV enhancer | 1814 | 382 | 1814 | 382 | 1814 | 382 | 1814 | 382 |
| CBA Promoter | 1816 | 260 | 1816 | 260 | 1816 | 260 | 1816 | 260 |
| SV40 Intron | 1823 | 172 | 1823 | 172 | 1823 | 172 | 1823 | 172 |
| Modulatory | 1589 | 158 | — | — | 1589 | 158 | — | — |
| Polynucleotide | | | | | | | | |
| (VOYHTmiR-104.016) | | | | | | | | |
| Modulatory | — | — | 1599 | 260 | — | — | 1599 | 260 |
| Polynucleotide | | | | | | | | |
| (VOYHTmiR-127.579) | | | | | | | | |
| Modulatory | 1589 | 158 | 1589 | 158 | — | — | — | — |
| Polynucleotide | | | | | | | | |
| (VOYHTmiR-104.016) | | | | | | | | |
| Modulatory | — | — | — | — | 1599 | 260 | 1599 | 260 |
| Polynucleotide | | | | | | | | |
| (VOYHTmiR-127.579) | | | | | | | | |
| Rabbit globin | 1827 | 127 | 1827 | 127 | 1827 | 127 | 1827 | 127 |
| PolyA Signal | | | | | | | | |
| 3′ ITR | 1790 | 130 | 1790 | 130 | 1790 | 130 | 1790 | 130 |

TABLE 27
Sequence Regions in ITR to ITR Sequences

| | VOYPC6 (SEQ ID NO: 1836) | | VOYPC7 (SEQ ID NO: 1837) | | VOYPC8 (SEQ ID NO: 1838) | |
|---|---|---|---|---|---|---|
| Sequence | Region | Region | Region | Region | Region | Region |
| Regions | SEQ ID NO | length | SEQ ID NO | length | SEQ ID NO | length |
| 5′ ITR | 1788 | 105 | 1788 | 105 | 1788 | 105 |
| CMV enhancer | 1814 | 382 | 1814 | 382 | 1814 | 382 |
| CBA Promoter | 1816 | 260 | 1816 | 260 | 1816 | 260 |
| SV40 Intron | 1826 | 201 | 1826 | 201 | 1826 | 201 |
| Modulatory | 1593 | 260 | — | — | 1593 | 260 |
| Polynucleotide | | | | | | |
| (VOYHTmiR-127.016) | | | | | | |
| Modulatory | — | — | 1595 | 158 | — | — |
| Polynucleotide | | | | | | |
| (VOYHTmiR-104.579) | | | | | | |
| Modulatory | 1593 | 260 | 1593 | 260 | — | — |
| Polynucleotide | | | | | | |
| (VOYHTmiR-127.016) | | | | | | |
| Modulatory | — | — | — | — | 1595 | 158 |
| Polynucleotide | | | | | | |
| (VOYHTmiR-104.579) | | | | | | |
| Rabbit globin | 1827 | 127 | 1827 | 127 | 1827 | 127 |
| PolyA Signal | | | | | | |
| 3′ ITR | 1790 | 130 | 1790 | 130 | 1790 | 130 |

[0745] In one embodiment, the polycistronic AAV particle viral genome comprises SEQ ID NO: 1832 (VOYPC2) which comprises a 5′ inverted terminal repeat (ITR) sequence region and a 3′ ITR sequence region, a CMV enhancer sequence region, a CBA promoter sequence region, a SV40 intron sequence region, two modulatory polynucleotide regions targeting the same gene of interest (HTT), and a rabbit globin polyadenylation signal sequence region.

[0746] In one embodiment, the polycistronic AAV particle viral genome comprises SEQ ID NO: 1833 (VOYPC3) which comprises a 5′ inverted terminal repeat (ITR) sequence region and a 3′ ITR sequence region, a CMV enhancer sequence region, a CBA promoter sequence region, a SV40 intron sequence region, two modulatory polynucleotide regions targeting the same gene of interest (HTT), and a rabbit globin polyadenylation signal sequence region.

[0747] In one embodiment, the polycistronic AAV particle viral genome comprises SEQ ID NO: 1834 (VOYPC4) which comprises a 5′ inverted terminal repeat (ITR) sequence region and a 3′ ITR sequence region, a CMV enhancer sequence region, a CBA promoter sequence region, a SV40 intron sequence region, two modulatory polynucleotide regions targeting the same gene of interest (HTT), and a rabbit globin polyadenylation signal sequence region.

[0748] In one embodiment, the polycistronic AAV particle viral genome comprises SEQ ID NO: 1835 (VOYPC5) which comprises a 5′ inverted terminal repeat (ITR) sequence region and a 3′ ITR sequence region, a CMV enhancer sequence region, a CBA promoter sequence region, a SV40 intron sequence region, two modulatory polynucleotide regions targeting the same gene of interest (HTT), and a rabbit globin polyadenylation signal sequence region.

[0749] In one embodiment, the polycistronic AAV particle viral genome comprises SEQ ID NO: 1836 (VOYPC6) which comprises a 5′ inverted terminal repeat (ITR) sequence region and a 3′ ITR sequence region, a CMV enhancer sequence region, a CBA promoter sequence region, a SV40 intron sequence region, two modulatory polynucleotide regions targeting the same gene of interest (HTT), and a rabbit globin polyadenylation signal sequence region.

[0750] In one embodiment, the polycistronic AAV particle viral genome comprises SEQ ID NO: 1837 (VOYPC7) which comprises a 5′ inverted terminal repeat (ITR) sequence region and a 3′ ITR sequence region, a CMV enhancer sequence region, a CBA promoter sequence region, a SV40 intron sequence region, two modulatory polynucleotide regions targeting the same gene of interest (HTT), and a rabbit globin polyadenylation signal sequence region.

[0751] In one embodiment, the polycistronic AAV particle viral genome comprises SEQ ID NO: 1838 (VOYPC8) which comprises a 5′ inverted terminal repeat (ITR) sequence region and a 3′ ITR sequence region, a CMV enhancer sequence region, a CBA promoter sequence region, a SV40 intron sequence region, two modulatory polynucleotide regions targeting the same gene of interest (HTT), and a rabbit globin polyadenylation signal sequence region

[0752] In one embodiment, the polycistronic AAV particle viral genome comprises at least one inverted terminal repeat (ITR) sequence region, at least one promoter sequence region, two modulatory polynucleotide regions, and at least one polyadenylation signal sequence region.

[0753] In one embodiment, the polycistronic AAV particle viral genome comprises at least one inverted terminal repeat (ITR) sequence region, at least one promoter sequence region, and two modulatory polynucleotide regions.

[0754] In one embodiment, the polycistronic AAV particle viral genome comprises a 5′ inverted terminal repeat (ITR) sequence region and a 3′ ITR sequence region a CBA promoter sequence region, a H1 promoter sequence region, and two modulatory polynucleotide sequence regions targeting the same gene of interest (HTT). Non-limiting examples of an ITR to ITR sequence for use in the polycistronic AAV particles of the present invention having all of the sequence modules above are described in Table 28. In Table 28, the sequence identifier or sequence of the sequence region (Region SEQ ID NO) and the length of the sequence region (Region length) are described as well as the name and sequence identifier of the ITR to ITR sequence (e.g., VOYPC1 (SEQ ID NO: 1831)).

TABLE 28
Sequence Regions in ITR to ITR Sequences

| | VOYPC9 | | VOYPC10 | | VOYPC11 | | VOYPC12 | |
|---|---|---|---|---|---|---|---|---|
| | (SEQ ID NO: 1839) | | (SEQ ID NO: 1840) | | (SEQ ID NO: 1841) | | (SEQ ID NO: 1842) | |
| Sequence | Region | Region | Region | Region | Region | Region | Region | Region |
| Regions | SEQ ID NO | length | SEQ ID NO | length | SEQ ID NO | length | SEQ ID NO | length |
| 5′ ITR | 1788 | 105 | 1788 | 105 | 1788 | 105 | 1788 | 105 |
| CBA Promoter | 1819 | 219 | 1819 | 219 | 1819 | 219 | 1819 | 219 |
| Modulatory | 1589 | 158 | — | — | — | — | 1589 | 158 |
| Polynucleotide | | | | | | | | |
| (VOYHTmiR-104.016) | | | | | | | | |
| Modulatory | — | — | 1599 | 260 | 1599 | 260 | — | — |
| Polynucleotide | | | | | | | | |
| (VOYHTmiR-127.579) | | | | | | | | |
| H1 Promoter | 1819 | 219 | 1819 | 219 | 1819 | 219 | 1819 | 219 |
| Modulatory | 1589 | 158 | — | — | 1589 | 158 | — | — |
| Polynucleotide | | | | | | | | |
| (VOYHTmiR-104.016) | | | | | | | | |
| Modulatory | — | — | 1599 | 260 | — | — | 1599 | 260 |
| Polynucleotide | | | | | | | | |
| (VOYHTmiR-127.579) | | | | | | | | |
| 3′ ITR | 1790 | 130 | 1790 | 130 | 1790 | 130 | 1790 | 130 |

[0755] In one embodiment, the polycistronic AAV particle viral genome comprises a Pol III promoter. In one embodiment, the polycistronic AAV particle viral genome comprises a type 3 Pol III promoter. In one embodiment, the polycistronic AAV particle viral genome comprises a H1 promoter. In one embodiment, the polycistronic AAV particle viral genome comprises a U6 promoter. In one embodiment, the polycistronic AAV particle viral genome comprises a U3 promoter. In one embodiment, the polycistronic AAV particle viral genome comprises a U7 promoter. In one embodiment, the polycistronic AAV particle viral genome comprises a 7SK promoter. In one embodiment, the polycistronic AAV particle viral genome comprises an MRP promoter. In one embodiment, the polycistronic AAV particle viral genome comprises a Pol II promoter. In one embodiment, the polycistronic AAV particle viral genome comprises a truncated Pol II promoter.

[0756] In one embodiment, the polycistronic AAV particle viral genome comprises SEQ ID NO: 1839 (VOYPC9) which comprises a 5′ inverted terminal repeat (ITR) sequence region and a 3′ ITR sequence region, a CBA promoter sequence region, a H1 promoter sequence region, and two modulatory polynucleotide regions targeting the same gene of interest (HTT).

[0757] In one embodiment, the polycistronic AAV particle viral genome comprises SEQ ID NO: 1840 (VOYPC10) which comprises a 5′ inverted terminal repeat (ITR) sequence region and a 3′ ITR sequence region, a CBA promoter sequence region, a H1 promoter sequence region, and two modulatory polynucleotide regions targeting the same gene of interest (HTT).

[0758] In one embodiment, the polycistronic AAV particle viral genome comprises SEQ ID NO: 1841 (VOYPC11) which comprises a 5′ inverted terminal repeat (ITR) sequence region and a 3′ ITR sequence region, a CBA promoter sequence region, a H1 promoter sequence region, and two modulatory polynucleotide regions targeting the same gene of interest (HTT).

[0759] In one embodiment, the polycistronic AAV particle viral genome comprises SEQ ID NO: 1842 (VOYPC12) which comprises a 5′ inverted terminal repeat (ITR) sequence region and a 3′ ITR sequence region, a CBA promoter sequence region, a H1 promoter sequence region, and two modulatory polynucleotide regions targeting the same gene of interest (HTT).

[0760] In one embodiment, the polycistronic AAV particle viral genome comprises a 5′ inverted terminal repeat (ITR) sequence region and a 3′ ITR sequence region, two H1 promoter sequence regions, two modulatory polynucleotide sequence regions targeting the same gene of interest, and two H1 terminator sequences, where each modulatory polynucleotide sequence region is driven by its own Pol III promoter, for example, type 3 Pol III promoter, e.g., H1 promoter, and followed by its own promoter terminator sequence, e.g., H1 terminator sequence. Non-limiting examples of an ITR to ITR sequence for use in the polycistronic AAV particles of the present invention having these sequence modules are described in Table 29. In Table 29, the sequence identifier or sequence of the sequence region (Region SEQ ID NO) and the length of the sequence region (Region length) are described as well as the name and sequence identifier of the ITR to ITR sequence (e.g., VOYPC59 (SEQ ID NO: 2682))

TABLE 29
Sequence Regions in ITR to ITR Sequences

| | VOYPC59 | | VOYPC60 | | VOYPC61 | | VOYPC62 | |
|---|---|---|---|---|---|---|---|---|
| | (SEQ ID NO: 2682) | | (SEQ ID NO: 2683) | | (SEQ ID NO: 2684) | | (SEQ ID NO: 2685) | |
| Sequence | Region | Region | Region | Region | Region | Region | Region | Region |
| Regions | SEQ ID NO | length | SEQ ID NO | length | SEQ ID NO | length | SEQ ID NO | length |
| 5′ ITR | 1788 | 105 | 1788 | 105 | 1788 | 105 | 1788 | 105 |
| H1 Promoter | 1819 | 219 | 1819 | 219 | | | | |
| Modulatory | 1589 | 158 | 1589 | 158 | | | | |
| Polynucleotide | | | | | | | | |
| (VOYHTmiR-104.016) | | | | | | | | |
| H1 Terminator | 2681 | 5 | 2681 | 5 | | | | |
| H1 Promoter | | | 1819 | 219 | 1819 | 219 | 1819 | 219 |
| Modulatory | | | 1599 | 260 | 1599 | 260 | 1599 | 260 |
| Polynucleotide | | | | | | | | |
| (VOYHTmiR-127.579) | | | | | | | | |
| H1 Terminator | | | 2681 | 5 | 2681 | 5 | 2681 | 5 |
| H1 Promoter | 1819 | 219 | | | 1819 | 219 | | |
| Modulatory | 1589 | 158 | | | 1589 | 158 | | |
| Polynucleotide | | | | | | | | |
| (VOYHTmiR-104.016) | | | | | | | | |
| H1 Terminator | 2681 | 5 | | | 2681 | 5 | | |
| H1 Promoter | | | | | | | 1819 | 219 |
| Modulatory | | | | | | | 1599 | 260 |
| Polynucleotide | | | | | | | | |
| (VOYHTmiR-127.579) | | | | | | | | |
| H1 Terminator | | | | | | | 2681 | 5 |
| 3′ ITR | 1790 | 130 | 1790 | 130 | 1790 | 130 | 1790 | 130 |

[0761] In one embodiment, the polycistronic AAV particle viral genome comprises SEQ ID NO: 2682 (VOYPC59) which comprises a 5′ inverted terminal repeat (ITR) sequence region and a 3′ ITR sequence region, two H1 promoter sequence regions, two modulatory polynucleotide regions targeting the same gene of interest (HTT), and two H1 terminator sequence regions, where each modulatory polynucleotide region is driven by its own H1 promoter and followed by its own H1 terminator.

[0762] In one embodiment, the polycistronic AAV particle viral genome comprises SEQ ID NO: 2683 (VOYPC60) which comprises a 5′ inverted terminal repeat (ITR) sequence region and a 3′ ITR sequence region, two H1 promoter sequence regions, two modulatory polynucleotide regions targeting the same gene of interest (HTT), and two H1 terminator sequence regions, where each modulatory polynucleotide region is driven by its own H1 promoter and followed by its own H1 terminator.

[0763] In one embodiment, the polycistronic AAV particle viral genome comprises SEQ ID NO: 2684 (VOYPC61) which comprises a 5′ inverted terminal repeat (ITR) sequence region and a 3′ ITR sequence region, two H1 promoter sequence regions, two modulatory polynucleotide regions targeting the same gene of interest (HTT), and two H1 terminator sequence regions, where each modulatory polynucleotide region is driven by its own H1 promoter and followed by its own H1 terminator.

[0764] In one embodiment, the polycistronic AAV particle viral genome comprises SEQ ID NO: 2685 (VOYPC62) which comprises a 5′ inverted terminal repeat (ITR) sequence region and a 3′ ITR sequence region, two H1 promoter sequence regions, two modulatory polynucleotide regions targeting the same gene of interest (HTT), and two H1 terminator sequence regions, where each modulatory polynucleotide region is driven by its own H1 promoter and followed by its own H1 terminator.

[0765] In one embodiment, the polycistronic AAV particle viral genome comprises two promoter sequence regions, two modulatory polynucleotide regions and at least one polyadenylation sequence region.

[0766] In one embodiment, the polycistronic AAV particle viral genome comprises a CMV promoter sequence region, a T7 primer binding site, two modulatory polynucleotide sequence regions targeting the same gene of interest (HTT) and a polyadenylation sequence region. Non-limiting examples of sequences for use in the polycistronic AAV particles of the present invention having all of the sequence modules above are described in Tables 30 and 31. In Tables 30 and 31, the sequence identifier or sequence of the sequence region (Region SEQ ID NO) and the length of the sequence region (Region length) are described as well as the name of the sequence (e.g., VOYPC13).

TABLE 30
Sequence Regions

| | VOYPC13 | | VOYPC14 | | VOYPC15 | | VOYPC16 | |
|---|---|---|---|---|---|---|---|---|
| | (SEQ ID NO: 2686) | | (SEQ ID NO: 2687) | | (SEQ ID NO: 2688) | | (SEQ ID NO: 2689) | |
| Sequence | Region | Region | Region | Region | Region | Region | Region | Region |
| Regions | SEQ ID NO | length | SEQ ID NO | length | SEQ ID NO | length | SEQ ID NO | length |
| CMV Promoter | 1817 | 588 | 1817 | 588 | 1817 | 588 | 1817 | 588 |
| T7 Primer | 1820 | 17 | 1820 | 17 | 1820 | 17 | 1820 | 17 |
| Binding Site | | | | | | | | |
| Modulatory | 1589 | 158 | — | — | 1589 | 158 | — | — |
| Polynucleotide | | | | | | | | |
| (VOYHTmiR-104.016) | | | | | | | | |
| Modulatory | — | — | 1599 | 260 | 1599 | 260 | 1599 | 260 |
| Polynucleotide | | | | | | | | |
| (VOYHTmiR-127.579) | | | | | | | | |
| Modulatory | 1589 | 158 | 1589 | 158 | — | — | — | — |
| Polynucleotide | | | | | | | | |
| (VOYHTmiR-104.016) | | | | | | | | |
| Modulatory | — | — | — | — | — | — | 1599 | 260 |
| Polynucleotide | | | | | | | | |
| (VOYHTmiR-127.579) | | | | | | | | |
| PolyA | 1828 | 225 | 1828 | 225 | 1828 | 225 | 1828 | 225 |

TABLE 31
Sequence Regions

| | VOYPC17 | | VOYPC18 | | VOYPC19 | | VOYPC20 | |
|---|---|---|---|---|---|---|---|---|
| Sequence | Region | Region | Region | Region | Region | Region | Region | Region |
| Regions | SEQ ID NO | length | SEQ ID NO | length | SEQ ID NO | length | SEQ ID NO | length |
| CMV | 1817 | 588 | 1817 | 588 | 1817 | 588 | 1817 | 588 |
| Promoter | | | | | | | | |
| T7 Primer | 1820 | 17 | 1820 | 17 | 1820 | 17 | 1820 | 17 |
| Binding Site | | | | | | | | |
| Modulatory | 1595 | 158 | — | — | 1595 | 158 | — | — |
| Polynucleotide | | | | | | | | |
| (VOYHTmiR-104.579) | | | | | | | | |
| Modulatory | — | — | 1593 | 260 | 1593 | 260 | 1593 | 260 |
| Polynucleotide | | | | | | | | |
| (VOYHTmiR-127.016) | | | | | | | | |
| Modulatory | 1595 | 158 | — | — | — | — | 1595 | 158 |
| Polynucleotide | | | | | | | | |
| (VOYHTmiR-104.579) | | | | | | | | |
| Modulatory | — | — | 1593 | 260 | — | — | — | — |
| Polynucleotide | | | | | | | | |
| (VOYHTmiR-127.016) | | | | | | | | |
| PolyA | 1828 | 225 | 1828 | 225 | 1828 | 225 | 1828 | 225 |

[0767] In one embodiment, the polycistronic AAV particle viral genome comprises the sequence modules described in VOYPC13 which comprises a CMV promoter sequence region, a T7 primer binding site, two modulatory polynucleotide regions targeting the same gene of interest (HTT), and a polyadenylation sequence region.

[0768] In one embodiment, the polycistronic AAV particle viral genome comprises the sequence modules described in VOYPC14 which comprises a CMV promoter sequence region, a T7 primer binding site, two modulatory polynucleotide regions targeting the same gene of interest (HTT), and a polyadenylation sequence region.

[0769] In one embodiment, the polycistronic AAV particle viral genome comprises the sequence modules described in VOYPC15 which comprises a CMV promoter sequence region, a T7 primer binding site, two modulatory polynucleotide regions targeting the same gene of interest (HTT), and a polyadenylation sequence region.

[0770] In one embodiment, the polycistronic AAV particle viral genome comprises the sequence modules described in VOYPC16 which comprises a CMV promoter sequence region, a T7 primer binding site, two modulatory polynucleotide regions targeting the same gene of interest (HTT), and a polyadenylation sequence region.

[0771] In one embodiment, the polycistronic AAV particle viral genome comprises the sequence modules described in VOYPC17 which comprises a CMV promoter sequence region, a T7 primer binding site, two modulatory polynucleotide regions targeting the same gene of interest (HTT), and a polyadenylation sequence region.

[0772] In one embodiment, the polycistronic AAV particle viral genome comprises the sequence modules described in VOYPC18 which comprises a CMV promoter sequence region, a T7 primer binding site, two modulatory polynucleotide regions targeting the same gene of interest (HTT), and a polyadenylation sequence region.

[0773] In one embodiment, the polycistronic AAV particle viral genome comprises the sequence modules described in VOYPC19 which comprises a CMV promoter sequence region, a T7 primer binding site, two modulatory polynucleotide regions targeting the same gene of interest (HTT), and a polyadenylation sequence region.

[0774] In one embodiment, the polycistronic AAV particle viral genome comprises the sequence modules described in VOYPC20 which comprises a CMV promoter sequence region, a T7 primer binding site, two modulatory polynucleotide regions targeting the same gene of interest (HTT), and a polyadenylation sequence region.

[0775] In one embodiment, the polycistronic AAV particle viral genome comprises a CMV promoter sequence region, a T7 primer binding site, and two modulatory polynucleotide sequence regions targeting different genes of interest (HTT and SOD1) and a polyadenylation sequence region. Non-limiting examples of sequences for use in the polycistronic AAV particles of the present invention having all of the sequence modules above are described in Table 32. In Table 32, the sequence identifier or sequence of the sequence region (Region SEQ ID NO) and the length of the sequence region (Region length) are described as well as the name of the sequence (e.g., VOYPC25).

TABLE 32
Sequence Regions

| | VOYPC25 | | VOYPC26 | |
|---|---|---|---|---|
| Sequence | Region | Region | Region | Region |
| Regions | SEQ ID NO | length | SEQ ID NO | length |
| CMV Promoter | 1817 | 588 | 1817 | 588 |
| T7 Primer | 1820 | 17 | 1820 | 17 |
| Binding Site | | | | |
| Modulatory | 1699 | 158 | 1599 | 260 |
| Polynucleotide | | | | |
| (VOYSOD1miR-104) | | | | |
| Modulatory | 1599 | 260 | — | — |
| Polynucleotide | | | | |
| (VOYHTmiR-127.579) | | | | |
| Modulatory | — | — | 1699 | 158 |
| Polynucleotide | | | | |
| (VOYSOD1miR-104) | | | | |
| PolyA | 1828 | 225 | 1828 | 225 |

In one embodiment, the polycistronic AAV particle viral genome comprises the sequence modules described in VOYPC25 which comprises a CMV promoter sequence region, a T7 primer binding site, two modulatory polynucleotide regions targeting the two different genes of interest (HTT and SOD1), and a polyadenylation sequence region.

[0776] In one embodiment, the polycistronic AAV particle viral genome comprises the sequence modules described in VOYPC26 which comprises a CMV promoter sequence region, a T7 primer binding site, two modulatory polynucleotide regions targeting the two different genes of interest (HTT and SOD1), and a polyadenylation sequence region.

[0777] In one embodiment, the polycistronic AAV particle viral genome comprises three promoter sequence regions, two modulatory polynucleotide regions and at least one polyadenylation sequence region.

[0778] In one embodiment, the polycistronic AAV particle viral genome comprises a VTGT region, two H1 promoter sequence region, and two modulatory polynucleotide sequence regions targeting the same gene of interest (HTT). Non-limiting examples of sequences for use in the polycistronic AAV particles of the present invention having all of the sequence modules above are described in Table 33. In Table 33, the sequence identifier or sequence of the sequence region (Region SEQ ID NO) and the length of the sequence region (Region length) are described as well as the name of the sequence (e.g., VOYPC21).

TABLE 33
Sequence Regions

| | VOYPC21 | | VOYPC22 | | VOYPC23 | | VOYPC24 | |
|---|---|---|---|---|---|---|---|---|
| Sequence | Region | Region | Region | Region | Region | Region | Region | Region |
| Regions | SEQ ID NO | length | SEQ ID NO | length | SEQ ID NO | length | SEQ ID NO | length |
| GTTG | — | 4 | — | 4 | — | 4 | — | 4 |
| H1 Promoter | 1819 | 219 | 1819 | 219 | 1819 | 219 | 1819 | 219 |
| Modulatory | 1599 | 260 | 1599 | 260 | — | — | — | — |
| Polynucleotide | | | | | | | | |
| (VOYHTmiR-127.579) | | | | | | | | |
| Modulatory | — | — | — | — | 1589 | 158 | 1589 | 158 |
| Polynucleotide | | | | | | | | |
| (VOYHTmiR-104.016) | | | | | | | | |
| H1 promoter | 1819 | 219 | 1819 | 219 | 1819 | 219 | 1819 | 219 |
| Modulatory | 1599 | 260 | | | 1599 | 260 | — | — |
| Polynucleotide | | | | | | | | |
| (VOYHTmiR-127.579) | | | | | | | | |
| Modulatory | — | — | 1589 | 158 | — | — | 1589 | 158 |
| Polynucleotide | | | | | | | | |
| (VOYHTmiR-104.016) | | | | | | | | |

[0779] In one embodiment, the polycistronic AAV particle viral genome comprises the sequence modules described in VOYPC21 which comprises a GTTG region, two H1 promoter sequence regions, and two modulatory polynucleotide regions targeting the same gene of interest (HTT).

[0780] In one embodiment, the polycistronic AAV particle viral genome comprises the sequence modules described in VOYPC22 which comprises a GTTG region, two H1 promoter sequence regions, and two modulatory polynucleotide regions targeting the same gene of interest (HTT).

[0781] In one embodiment, the polycistronic AAV particle viral genome comprises the sequence modules described in VOYPC23 which comprises a GTTG region, two H1 promoter sequence regions, and two modulatory polynucleotide regions targeting the same gene of interest (HTT).

[0782] In one embodiment, the polycistronic AAV particle viral genome comprises the sequence modules described in VOYPC24 which comprises a GTTG region, two H1 promoter sequence regions, and two modulatory polynucleotide regions targeting the same gene of interest (HTT).

[0783] In one embodiment, the polycistronic AAV particle viral genome comprises at least one inverted terminal repeat (ITR) sequence region, at least one enhancer sequence region, at least one promoter sequence region, at least one intron sequence region, three modulatory polynucleotide regions, and at least one polyadenylation signal sequence region.

[0784] In one embodiment, the polycistronic AAV particle viral genome comprises a 5′ inverted terminal repeat (ITR) sequence region and a 3′ ITR sequence region, a CMV enhancer sequence region, a GTTG region, SV40 intron sequence region, three modulatory polynucleotide sequence regions targeting the same gene of interest (HTT), and a rabbit globin polyadenylation signal sequence region. Non-limiting examples of an ITR to ITR sequence for use in the polycistronic AAV particles of the present invention having all of the sequence modules above are described in Table 34. In Table 34, the sequence identifier or sequence of the sequence region (Region SEQ ID NO) and the length of the sequence region (Region length) are described as well as the name and sequence identifier of the ITR to ITR sequence (e.g., VOYPC27 (SEQ ID NO: 1843)).

TABLE 34
Sequence Regions in ITR to ITR Sequence

| | VOYPC27 | | VOYPC28 | |
|---|---|---|---|---|
| | (SEQ ID NO: 1843) | | (SEQ ID NO: 1844) | |
| Sequence | Region | Region | Region | Region |
| Regions | SEQ ID NO | length | SEQ ID NO | length |
| 5′ ITR | 1788 | 105 | 1788 | 105 |
| CMV enhancer | 1814 | 382 | 1814 | 382 |
| CBA Promoter | 1816 | 260 | 1816 | 260 |
| SV40 intron | 1826 | 201 | 1826 | 201 |
| Modulatory | 1599 | 260 | 1599 | 260 |
| Polynucleotide | | | | |
| (VOYHTmiR-127.579) | | | | |
| Modulatory | 1589 | 158 | 1589 | 158 |
| Polynucleotide | | | | |
| (VOYHTmiR-104.016) | | | | |
| Modulatory | 1589 | 158 | — | — |
| Polynucleotide | | | | |
| (VOYHTmiR-104.016) | | | | |
| Modulatory | — | — | 1599 | 260 |
| Polynucleotide | | | | |
| (VOYHTmiR-127.579) | | | | |
| Rabbit globin | 1827 | 127 | 1827 | 127 |
| PolyA Signal | | | | |
| 3′ ITR | 1790 | 130 | 1790 | 130 |

[0785] In one embodiment, the polycistronic AAV particle viral genome comprises SEQ ID NO: 1843 (VOYPC27) which comprises a 5′ inverted terminal repeat (ITR) sequence region and a 3′ ITR sequence region, a CMV enhancer sequence region, a CBA promoter sequence region, a SV40 intron sequence region, three modulatory polynucleotide regions targeting the same gene of interest (HTT), and a rabbit globin polyadenylation signal sequence region.

[0786] In one embodiment, the polycistronic AAV particle viral genome comprises SEQ ID NO: 1844 (VOYPC28) which comprises a 5′ inverted terminal repeat (ITR) sequence region and a 3′ ITR sequence region, a CMV enhancer sequence region, a CBA promoter sequence region, a SV40 intron sequence region, three modulatory polynucleotide regions targeting the same gene of interest (HTT), and a rabbit globin polyadenylation signal sequence region.

[0787] In one embodiment, the polycistronic AAV particle viral genome comprises at least one inverted terminal repeat (ITR) sequence region, at least one promoter sequence region, and three modulatory polynucleotide regions.

[0788] In one embodiment, the polycistronic AAV particle viral genome comprises a 5′ inverted terminal repeat (ITR) sequence region and a 3′ ITR sequence region, three H1 promoter sequence regions, and three modulatory polynucleotide sequence regions targeting the same gene of interest (HTT). Non-limiting examples of an ITR to ITR sequence for use in the polycistronic AAV particles of the present invention having all of the sequence modules above are described in Tables 35 and 36. In Tables 35 and 36, the sequence identifier or sequence of the sequence region (Region SEQ ID NO) and the length of the sequence region (Region length) are described as well as the name and sequence identifier of the ITR to ITR sequence (e.g., VOYPC29 (SEQ ID NO: 1845)).

TABLE 35
Sequence Regions in ITR to ITR Sequence

| | VOYPC29 (SEQ ID NO: 1845) | | VOYPC31 (SEQ ID NO: 1847) | | VOYPC32 (SEQ ID NO: 1848) | |
|---|---|---|---|---|---|---|
| Sequence | Region | Region | Region | Region | Region | Region |
| Regions | SEQ ID NO | length | SEQ ID NO | length | SEQ ID NO | length |
| 5′ ITR | 1788 | 105 | 1788 | 105 | 1788 | 105 |
| H1 Promoter | 1819 | 219 | 1819 | 219 | 1819 | 219 |
| Modulatory | 1599 | 260 | 1599 | 260 | 1599 | 260 |
| Polynucleotide | | | | | | |
| (VOYHTmiR-127.579) | | | | | | |
| H1 Terminator | 2681 | 5 | 2681 | 5 | 2681 | 5 |
| H1 Promoter | 1819 | 219 | 1819 | 219 | 1819 | 219 |
| Modulatory | 1589 | 158 | — | — | — | — |
| Polynucleotide | | | | | | |
| (VOYHTmiR-104.016) | | | | | | |
| Modulatory | — | — | 1599 | 260 | 1599 | 260 |
| Polynucleotide | | | | | | |
| (VOYHTmiR-127.579) | | | | | | |
| H1 Terminator | 2681 | 5 | 2681 | 5 | 2681 | 5 |
| H1 Promoter | 1819 | 219 | 1819 | 219 | 1819 | 219 |
| Modulatory | 1599 | 260 | 1599 | 260 | — | — |
| Polynucleotide | | | | | | |
| (VOYHTmiR-127.579) | | | | | | |
| Modulatory | — | — | — | | 1589 | 158 |
| Polynucleotide | | | | | | |
| (VOYHTmiR-104.016) | | | | | | |
| H1 Terminator | 2681 | 5 | 2681 | 5 | 2681 | 5 |
| 3′ ITR | 1790 | 130 | 1790 | 130 | 1790 | 130 |

TABLE 36
Sequence Regions in ITR to ITR Sequence

| | VOYPC30 (SEQ ID NO: 1846) | | VOYPC33 (SEQ ID NO: 1849) | | VOYPC34 (SEQ ID NO: 1850) | |
|---|---|---|---|---|---|---|
| Sequence | Region | Region | Region | Region | Region | Region |
| Regions | SEQ ID NO | length | SEQ ID NO | length | SEQ ID NO | length |
| 5′ ITR | 1788 | 105 | 1788 | 105 | 1788 | 105 |
| H1 Promoter | 1819 | 219 | 1819 | 219 | 1819 | 219 |
| Modulatory | 1589 | 158 | 1589 | 158 | 1589 | 158 |
| Polynucleotide | | | | | | |
| (VOYHTmiR-104.016) | | | | | | |
| H1 Terminator | 2681 | 5 | 2681 | 5 | 2681 | 5 |
| H1 Promoter | 1819 | 219 | 1819 | 219 | 1819 | 219 |
| Modulatory | 1599 | 260 | — | — | — | — |
| Polynucleotide | | | | | | |
| (VOYHTmiR-127.579) | | | | | | |
| Modulatory | — | — | 1589 | 158 | 1589 | 158 |
| Polynucleotide | | | | | | |
| (VOYHTmiR-104.016) | | | | | | |
| H1 Terminator | 2681 | 5 | 2681 | 5 | 2681 | 5 |
| H1 Promoter | 1819 | 219 | 1819 | 219 | 1819 | 219 |
| Modulatory | | | — | — | 1599 | 260 |
| Polynucleotide | | | | | | |
| (VOYHTmiR-127.579) | | | | | | |
| Modulatory | 1589 | 158 | 1589 | 158 | | |
| Polynucleotide | | | | | | |
| (VOYHTmiR-104.016) | | | | | | |
| H1 Terminator | 2681 | 5 | 2681 | 5 | 2681 | 5 |
| 3′ ITR | 1790 | 130 | 1790 | 130 | 1790 | 130 |

[0789] In one embodiment, the polycistronic AAV particle viral genome comprises SEQ ID NO: 1845 (VOYPC29) which comprises a 5′ inverted terminal repeat (ITR) sequence region and a 3′ ITR sequence region, three H1 promoter sequence regions, three modulatory polynucleotide regions targeting the same gene of interest (HTT), and three H1 terminator sequence regions, where each modulatory polynucleotide region is driven by its own H1 promoter and followed by its own H1 terminator.

[0790] In one embodiment, the polycistronic AAV particle viral genome comprises SEQ ID NO: 1846 (VOYPC30) which comprises a 5′ inverted terminal repeat (ITR) sequence region and a 3′ ITR sequence region, three H1 promoter sequence regions, three modulatory polynucleotide regions targeting the same gene of interest (HTT), and three H1 terminator sequence regions, and three H1 terminator sequence regions, where each modulatory polynucleotide region is driven by its own H1 promoter and followed by its own H1 terminator.

[0791] In one embodiment, the polycistronic AAV particle viral genome comprises SEQ ID NO: 1847 (VOYPC31) which comprises a 5′ inverted terminal repeat (ITR) sequence region and a 3′ ITR sequence region, three H1 promoter sequence regions, three modulatory polynucleotide regions targeting the same gene of interest (HTT), and three H1 terminator sequence regions, where each modulatory polynucleotide region is driven by its own H1 promoter and followed by its own H1 terminator.

[0792] In one embodiment, the polycistronic AAV particle viral genome comprises SEQ ID NO: 1848 (VOYPC32) which comprises a 5′ inverted terminal repeat (ITR) sequence region and a 3′ ITR sequence region, three H1 promoter sequence regions, three modulatory polynucleotide regions targeting the same gene of interest (HTT), and three H1 terminator sequence regions, where each modulatory polynucleotide region is driven by its own H1 promoter and followed by its own H1 terminator.

[0793] In one embodiment, the polycistronic AAV particle viral genome comprises SEQ ID NO: 1849 (VOYPC33) which comprises a 5′ inverted terminal repeat (ITR) sequence region and a 3′ ITR sequence region, three H1 promoter sequence regions, three modulatory polynucleotide regions targeting the same gene of interest (HTT), and three H1 terminator sequence regions, where each modulatory polynucleotide region is driven by its own H1 promoter and followed by its own H1 terminator.

[0794] In one embodiment, the polycistronic AAV particle viral genome comprises SEQ ID NO: 1850 (VOYPC34) which comprises a 5′ inverted terminal repeat (ITR) sequence region and a 3′ ITR sequence region, three H1 promoter sequence regions, three modulatory polynucleotide regions targeting the same gene of interest (HTT), and three H1 terminator sequence regions, where each modulatory polynucleotide region is driven by its own H1 promoter and followed by its own H1 terminator.

[0795] In one embodiment, the polycistronic AAV particle viral genome comprises two promoter sequence regions, three modulatory polynucleotide regions and at least one polyadenylation sequence region.

[0796] In one embodiment, the polycistronic AAV particle viral genome comprises a CMV promoter sequence region, a T7 primer binding site, three modulatory polynucleotide sequence regions targeting the same gene of interest (HTT) and a polyadenylation sequence region. Non-limiting examples of sequences for use in the polycistronic AAV particles of the present invention having all of the sequence modules above are described in Table 37. In Table 37, the sequence identifier or sequence of the sequence region (Region SEQ ID NO) and the length of the sequence region (Region length) are described as well as the name of the sequence (e.g., VOYPC35).

TABLE 37
Sequence Regions

| | VOYPC35 | | VOYPC36 | |
|---|---|---|---|---|
| Sequence | Region | Region | Region | Region |
| Regions | SEQ ID NO | length | SEQ ID NO | length |
| CMV Promoter | 1817 | 588 | 1817 | 588 |
| T7 Primer | 1820 | 17 | 1820 | 17 |
| Binding Site | | | | |
| Modulatory | 1599 | 260 | 1599 | 260 |
| Polynucleotide | | | | |
| (VOYHTmiR-127.579) | | | | |
| Modulatory | 1589 | 158 | 1589 | 158 |
| Polynucleotide | | | | |
| (VOYHTmiR-104.016) | | | | |
| Modulatory | 1589 | 158 | — | — |
| Polynucleotide | | | | |
| (VOYHTmiR-104.016) | | | | |
| Modulatory | — | — | 1599 | 260 |
| Polynucleotide | | | | |
| (VOYHTmiR-127.579) | | | | |
| PolyA | 1828 | 225 | 1828 | 225 |

[0797] In one embodiment, the polycistronic AAV particle viral genome comprises the sequence modules described in VOYPC35 which comprises a CMV promoter sequence region, a T7 primer binding site, three modulatory polynucleotide regions targeting the same gene of interest (HTT), and a polyadenylation sequence region.

[0798] In one embodiment, the polycistronic AAV particle viral genome comprises three promoter sequence regions, and three modulatory polynucleotide regions.

[0799] In one embodiment, the polycistronic AAV particle viral genome comprises a GTTG region, two H1 promoter sequence regions, and three modulatory polynucleotide sequence regions targeting the same gene of interest (HTT). Non-limiting examples of sequences for use in the polycistronic AAV particles of the present invention having all of the sequence modules above are described in Tables 38 and 39. In Tables 38 and 39, the sequence identifier or sequence of the sequence region (Region SEQ ID NO) and the length of the sequence region (Region length) are described as well as the name of the sequence (e.g., VOYPC37).

TABLE 38
Sequence Regions

| | VOYPC37 | | VOYPC38 | | VOYPC41 | |
|---|---|---|---|---|---|---|
| Sequence | Region | Region | Region | Region | Region | Region |
| Regions | SEQ ID NO | length | SEQ ID NO | length | SEQ ID NO | length |
| GTTG | — | 4 | — | 4 | — | 4 |
| H1 Promoter | 1819 | 219 | 1819 | 219 | 1819 | 219 |
| Modulatory | 1599 | 260 | 1599 | 260 | 1599 | 260 |
| Polynucleotide | | | | | | |
| (VOYHTmiR-127.579) | | | | | | |
| H1 promoter | 1819 | 219 | 1819 | 219 | 1819 | 219 |
| Modulatory | 1599 | 260 | 1599 | 260 | — | — |
| Polynucleotide | | | | | | |
| (VOYHTmiR-127.579) | | | | | | |
| Modulatory | — | — | — | — | 1589 | 158 |
| Polynucleotide | | | | | | |
| (VOYHTmiR-104.016) | | | | | | |
| H1 promoter | 1819 | 219 | 1819 | 219 | 1819 | 219 |
| Modulatory | 1599 | 260 | — | — | 1599 | 260 |
| Polynucleotide | | | | | | |
| (VOYHTmiR-127.579) | | | | | | |
| Modulatory | — | — | 1589 | 158 | — | — |
| Polynucleotide | | | | | | |
| (VOYHTmiR-104.016) | | | | | | |

TABLE 39
Sequence Regions

| | VOYPC39 | | VOYPC40 | | VOYPC42 | |
|---|---|---|---|---|---|---|
| Sequence | Region | Region | Region | Region | Region | Region |
| Regions | SEQ ID NO | length | SEQ ID NO | length | SEQ ID NO | length |
| GTTG | — | 4 | — | 4 | — | 4 |
| H1 Promoter | 1819 | 219 | 1819 | 219 | 1819 | 219 |
| Modulatory | 1589 | 158 | 1589 | 158 | 1589 | 158 |
| Polynucleotide | | | | | | |
| (VOYHTmiR-104.016) | | | | | | |
| H1 promoter | 1819 | 219 | 1819 | 219 | 1819 | 219 |
| Modulatory | 1589 | 158 | 1589 | 158 | — | — |
| Polynucleotide | | | | | | |
| (VOYHTmiR-104.016) | | | | | | |
| Modulatory | — | — | — | — | 1599 | 260 |
| Polynucleotide | | | | | | |
| (VOYHTmiR-127.579) | | | | | | |
| H1 promoter | 1819 | 219 | 1819 | 219 | 1819 | 219 |
| Modulatory | — | — | 1599 | 260 | — | — |
| Polynucleotide | | | | | | |
| (VOYHTmiR-127.579) | | | | | | |
| Modulatory | 1589 | 158 | — | — | 1589 | 158 |
| Polynucleotide | | | | | | |
| (VOYHTmiR-104.016) | | | | | | |

[0800] In one embodiment, the polycistronic AAV particle viral genome comprises the sequence modules described in VOYPC37 which comprises a GTTG region, three H1 promoter sequence region, and three modulatory polynucleotide regions targeting the same gene of interest (HTT).

[0801] In one embodiment, the polycistronic AAV particle viral genome comprises the sequence modules described in VOYPC38 which comprises a GTTG region, three H1 promoter sequence region, and three modulatory polynucleotide regions targeting the same gene of interest (HTT).

[0802] In one embodiment, the polycistronic AAV particle viral genome comprises the sequence modules described in VOYPC39 which comprises a GTTG, three H1 promoter sequence region, and three modulatory polynucleotide regions targeting the same gene of interest (HTT).

[0803] In one embodiment, the polycistronic AAV particle viral genome comprises the sequence modules described in VOYPC40 which comprises a GTTG region, three H1 promoter sequence region, and three modulatory polynucleotide regions targeting the same gene of interest (HTT).

[0804] In one embodiment, the polycistronic AAV particle viral genome comprises the sequence modules described in VOYPC41 which comprises a GTTG region, three H1 promoter sequence region, and three modulatory polynucleotide regions targeting the same gene of interest (HTT).

[0805] In one embodiment, the polycistronic AAV particle viral genome comprises the sequence modules described in VOYPC42 which comprises a GTTG region, three H1 promoter sequence region, and three modulatory polynucleotide regions targeting the same gene of interest (HTT).

[0806] In one embodiment, the polycistronic AAV particle viral genome comprises at least one inverted terminal repeat (ITR) sequence region, at least one promoter sequence region, and four modulatory polynucleotide regions.

[0807] In one embodiment, the polycistronic AAV particle viral genome comprises a 5′ inverted terminal repeat (ITR) sequence region and a 3′ ITR sequence region, four H1 promoter sequence regions, four modulatory polynucleotide sequence regions targeting the same gene of interest (HTT), and four H1 terminator sequence regions, where each modulatory polynucleotide region is driven by its own H1 promoter and followed by its own H1 terminator.

[0808] Non-limiting examples of an ITR to ITR sequence for use in the polycistronic AAV particles of the present invention having all of the sequence modules above are described in Tables 40 and 41. In Tables 40 and 41, the sequence identifier or sequence of the sequence region (Region SEQ ID NO) and the length of the sequence region (Region length) are described as well as the name and sequence identifier of the ITR to ITR sequence (e.g., VOYPC43 (SEQ ID NO: 1851)).

TABLE 40
Sequence Regions in ITR to ITR Sequence

| | VOYPC43 (SEQ ID NO: 1851) | | VOYPC44 (SEQ ID NO: 1852) | | VOYPC45 (SEQ ID NO: 1853) | |
|---|---|---|---|---|---|---|
| Sequence | Region | Region | Region | Region | Region | Region |
| Regions | SEQ ID NO | length | SEQ ID NO | length | SEQ ID NO | length |
| 5′ ITR | 1788 | 105 | 1788 | 105 | 1788 | 105 |
| H1 promoter | 1819 | 219 | 1819 | 219 | 1819 | 219 |
| Modulatory | 1599 | 260 | 1599 | 260 | 1599 | 260 |
| Polynucleotide | | | | | | |
| (VOYHTmiR-127.579) | | | | | | |
| H1 Terminator | 2681 | 5 | 2681 | 5 | 2681 | 5 |
| H1 promoter | 1819 | 219 | 1819 | 219 | 1819 | 219 |
| Modulatory | 1599 | 260 | — | — | — | — |
| Polynucleotide | | | | | | |
| (VOYHTmiR-127.579) | | | | | | |
| Modulatory | — | — | 1589 | 158 | 1589 | 158 |
| Polynucleotide | | | | | | |
| (VOYHTmiR-104.016) | | | | | | |
| H1 Terminator | 2681 | 5 | 2681 | 5 | 2681 | 5 |
| H1 promoter | 1819 | 219 | 1819 | 219 | 1819 | 219 |
| Modulatory | 1599 | 260 | 1599 | 260 | — | — |
| Polynucleotide | | | | | | |
| (VOYHTmiR-127.579) | | | | | | |
| Modulatory | — | — | — | — | 1589 | 158 |
| Polynucleotide | | | | | | |
| (VOYHTmiR-104.016) | | | | | | |
| H1 Terminator | 2681 | 5 | 2681 | 5 | 2681 | 5 |
| H1 promoter | 1819 | 219 | 1819 | 219 | 1819 | 219 |
| Modulatory | 1599 | 260 | — | — | 1599 | 260 |
| Polynucleotide | | | | | | |
| (VOYHTmiR-127.579) | | | | | | |
| Modulatory | — | — | 1589 | 158 | — | — |
| Polynucleotide | | | | | | |
| (VOYHTmiR-104.016) | | | | | | |
| H1 Terminator | 2681 | 5 | 2681 | 5 | 2681 | 5 |
| 3′ ITR | 1790 | 130 | 1790 | 130 | 1790 | 130 |

TABLE 41
Sequence Regions in ITR to ITR Sequence

| | VOYPC46 (SEQ ID NO: 1854) | | VOYPC47 (SEQ ID NO: 1855) | | VOYPC48 (SEQ ID NO: 1856) | |
|---|---|---|---|---|---|---|
| Sequence | Region | Region | Region | Region | Region | Region |
| Regions | SEQ ID NO | length | SEQ ID NO | length | SEQ ID NO | length |
| 5′ ITR | 1788 | 105 | 1788 | 105 | 1788 | 105 |
| H1 promoter | 1819 | 219 | 1819 | 219 | 1819 | 219 |
| Modulatory | 1589 | 158 | 1589 | 158 | 1589 | 158 |
| Polynucleotide | | | | | | |
| (VOYHTmiR-104.016) | | | | | | |
| H1 Terminator | 2681 | 5 | 2681 | 5 | 2681 | 5 |
| H1 promoter | 1819 | 219 | 1819 | 219 | 1819 | 219 |
| Modulatory | 1599 | 260 | — | — | 1599 | 260 |
| Polynucleotide | | | | | | |
| (VOYHTmiR-127.579) | | | | | | |
| Modulatory | — | — | 1589 | 158 | — | — |
| Polynucleotide | | | | | | |
| (VOYHTmiR-104.016) | | | | | | |
| H1 Terminator | 2681 | 5 | 2681 | 5 | 2681 | 5 |
| H1 promoter | 1819 | 219 | 1819 | 219 | 1819 | 219 |
| Modulatory | 1599 | 260 | — | — | — | — |
| Polynucleotide | | | | | | |
| (VOYHTmiR-127.579) | | | | | | |
| Modulatory | — | — | 1589 | 158 | 1589 | 158 |
| Polynucleotide | | | | | | |
| (VOYHTmiR-104.016) | | | | | | |
| H1 Terminator | 2681 | 5 | 2681 | 5 | 2681 | 5 |
| H1 promoter | 1819 | 219 | 1819 | 219 | 1819 | 219 |
| Modulatory | — | — | — | — | 1599 | 260 |
| Polynucleotide | | | | | | |
| (VOYHTmiR-127.579) | | | | | | |
| Modulatory | 1589 | 158 | 1589 | 158 | — | — |
| Polynucleotide | | | | | | |
| (VOYHTmiR-104.016) | | | | | | |
| H1 Terminator | 2681 | 5 | 2681 | 5 | 2681 | 5 |
| 3′ ITR | 1790 | 130 | 1790 | 130 | 1790 | 130 |

[0809] In one embodiment, the polycistronic AAV particle viral genome comprises SEQ ID NO: 1851 (VOYPC43) which comprises a 5′ inverted terminal repeat (ITR) sequence region and a 3′ ITR sequence region, four H1 promoter sequence regions, four modulatory polynucleotide regions targeting the same gene of interest (HTT), and four H1 terminator sequence regions, where each modulatory polynucleotide region is driven by its own H1 promoter and followed by its own H1 terminator.

[0810] In one embodiment, the polycistronic AAV particle viral genome comprises SEQ ID NO: 1852 (VOYPC44) which comprises a 5′ inverted terminal repeat (ITR) sequence region and a 3′ ITR sequence region, four H1 promoter sequence regions, four modulatory polynucleotide regions targeting the same gene of interest (HTT), and four H1 terminator sequence regions, where each modulatory polynucleotide region is driven by its own H1 promoter and followed by its own H1 terminator.

[0811] In one embodiment, the polycistronic AAV particle viral genome comprises SEQ ID NO: 1853 (VOYPC45) which comprises a 5′ inverted terminal repeat (ITR) sequence region and a 3′ ITR sequence region, four H1 promoter sequence regions, four modulatory polynucleotide regions targeting the same gene of interest (HTT), and four H1 terminator sequence regions, where each modulatory polynucleotide region is driven by its own H1 promoter and followed by its own H1 terminator.

[0812] In one embodiment, the polycistronic AAV particle viral genome comprises SEQ ID NO: 1854 (VOYPC46) which comprises a 5′ inverted terminal repeat (ITR) sequence region and a 3′ ITR sequence region, four H1 promoter sequence regions, four modulatory polynucleotide regions targeting the same gene of interest (HTT), and four H1 terminator sequence regions, where each modulatory polynucleotide region is driven by its own H1 promoter and followed by its own H1 terminator.

[0813] In one embodiment, the polycistronic AAV particle viral genome comprises SEQ ID NO: 1855 (VOYPC47) which comprises a 5′ inverted terminal repeat (ITR) sequence region and a 3′ ITR sequence region, four H1 promoter sequence regions, four modulatory polynucleotide regions targeting the same gene of interest (HTT), and four H1 terminator sequence regions, where each modulatory polynucleotide region is driven by its own H1 promoter and followed by its own H1 terminator.

[0814] In one embodiment, the polycistronic AAV particle viral genome comprises SEQ ID NO: 1856 (VOYPC48) which comprises a 5′ inverted terminal repeat (ITR) sequence region and a 3′ ITR sequence region, four H1 promoter sequence regions, four modulatory polynucleotide regions targeting the same gene of interest (HTT), and four H1 terminator sequence regions, where each modulatory polynucleotide region is driven by its own H1 promoter and followed by its own H1 terminator.

[0815] In one embodiment, the polycistronic AAV particle viral genome comprises at least one inverted terminal repeat (ITR) sequence region, at least one enhancer sequence region, at least one intron sequence region, at least one promoter sequence region, and four modulatory polynucleotide regions.

[0816] In one embodiment, the polycistronic AAV particle viral genome comprises a 5′ inverted terminal repeat (ITR) sequence region and a 3′ ITR sequence region, a CMV enhancer sequence region, four H1 promoter sequence regions, and four modulatory polynucleotide sequence regions targeting the same gene of interest (HTT). Non-limiting examples of an ITR to ITR sequence for use in the polycistronic AAV particles of the present invention having all of the sequence modules above are described in Table 42. In Table 42, the sequence identifier or sequence of the sequence region (Region SEQ ID NO) and the length of the sequence region (Region length) are described as well as the name and sequence identifier of the ITR to ITR sequence (e.g., VOYPC49 (SEQ ID NO: 1857)).

TABLE 42
Sequence Regions in ITR to ITR Sequence

| | VOYPC49 | | VOYPC50 | |
|---|---|---|---|---|
| | (SEQ ID NO: 1857) | | (SEQ ID NO: 1858) | |
| Sequence | Region | Region | Region | Region |
| Regions | SEQ ID NO | length | SEQ ID NO | length |
| 5′ ITR | 1788 | 105 | 1788 | 105 |
| CMV enhancer | 1814 | 382 | 1814 | 382 |
| CBA Promoter | 1816 | 260 | 1816 | 260 |
| SV40 intron | 1826 | 201 | 1826 | 201 |
| Modulatory | 1599 | 260 | 1599 | 260 |
| Polynucleotide | | | | |
| (VOYHTmiR-127.579) | | | | |
| Modulatory | 1589 | 158 | 1589 | 158 |
| Polynucleotide | | | | |
| (VOYHTmiR-104.016) | | | | |
| Modulatory | 1599 | 260 | — | — |
| Polynucleotide | | | | |
| (VOYHTmiR-127.579) | | | | |
| Modulatory | — | — | 1589 | 158 |
| Polynucleotide | | | | |
| (VOYHTmiR-104.016) | | | | |
| Modulatory | — | — | 1599 | 260 |
| Polynucleotide | | | | |
| (VOYHTmiR-127.579) | | | | |
| Modulatory | 1589 | 158 | — | — |
| Polynucleotide | | | | |
| (VOYHTmiR-104.016) | | | | |
| PolyA | 1827 | 127 | 1827 | 127 |
| 3′ ITR | 1790 | 130 | 1790 | 130 |

[0817] In one embodiment, the polycistronic AAV particle viral genome comprises SEQ ID NO: 1857 (VOYPC49) which comprises a 5′ inverted terminal repeat (ITR) sequence region and a 3′ ITR sequence region, a CMV enhancer, a SV40 intron, four modulatory polynucleotide regions targeting the same gene of interest (HTT), and a polyadenylation sequence region.

[0818] In one embodiment, the polycistronic AAV particle viral genome comprises SEQ ID NO: 1858 (VOYPC50) which comprises a 5′ inverted terminal repeat (ITR) sequence region and a 3′ ITR sequence region, a CMV enhancer, a SV40 intron, four modulatory polynucleotide regions targeting the same gene of interest (HTT), and a polyadenylation sequence region.

[0819] In one embodiment, the polycistronic AAV particle viral genome comprises two promoter sequence regions, four modulatory polynucleotide regions and at least one polyadenylation sequence region.

[0820] In one embodiment, the polycistronic AAV particle viral genome comprises a CMV promoter sequence region, a T7 primer binding site region, four modulatory polynucleotide sequence regions targeting the same gene of interest (HTT) and a polyadenylation sequence region. Non-limiting examples of sequences for use in the polycistronic AAV particles of the present invention having all of the sequence modules above are described in Table 43. In Table 43, the sequence identifier or sequence of the sequence region (Region SEQ ID NO) and the length of the sequence region (Region length) are described as well as the name of the sequence (e.g., VOYPC51).

TABLE 43
Sequence Regions

| | VOYPC51 | | VOYPC52 | |
|---|---|---|---|---|
| Sequence | Region | Region | Region | Region |
| Regions | SEQ ID NO | length | SEQ ID NO | length |
| CMV Promoter | 1817 | 588 | 1817 | 588 |
| T7 Primer | 1820 | 17 | 1820 | 17 |
| binding site | | | | |
| Modulatory | 1599 | 260 | 1599 | 260 |
| Polynucleotide | | | | |
| (VOYHTmiR-127.579) | | | | |
| Modulatory | 1589 | 158 | 1589 | 158 |
| Polynucleotide | | | | |
| (VOYHTmiR-104.016) | | | | |
| Modulatory | — | — | 1589 | 158 |
| Polynucleotide | | | | |
| (VOYHTmiR-104.016) | | | | |
| Modulatory | 1599 | 260 | — | — |
| Polynucleotide | | | | |
| (VOYHTmiR-127.579) | | | | |
| Modulatory | 1589 | 158 | — | — |
| Polynucleotide | | | | |
| (VOYHTmiR-104.016) | | | | |
| Modulatory | — | — | 1599 | 260 |
| Polynucleotide | | | | |
| (VOYHTmiR-127.579) | | | | |
| PolyA | 1828 | 225 | 1828 | 225 |

[0821] In one embodiment, the polycistronic AAV particle viral genome comprises the sequence modules described in VOYPC51 which comprises a CMV promoter sequence region, a T7 primer binding site region, four modulatory polynucleotide regions targeting the same gene of interest (HTT), and a polyadenylation sequence region.

[0822] In one embodiment, the polycistronic AAV particle viral genome comprises the sequence modules described in VOYPC52 which comprises a CMV promoter sequence region, a T7 primer binding site region, four modulatory polynucleotide regions targeting the same gene of interest (HTT), and a polyadenylation sequence region.

[0823] In one embodiment, the polycistronic AAV particle viral genome comprises five promoter sequence regions and four modulatory polynucleotide regions.

[0824] In one embodiment, the polycistronic AAV particle viral genome comprises a GTTG region, four H1 promoter sequence regions, and four modulatory polynucleotide sequence regions targeting the same gene of interest (HTT). Non-limiting examples of sequences for use in the polycistronic AAV particles of the present invention having all of the sequence modules above are described in Tables 44 and 45. In Tables 44 and 45, the sequence identifier or sequence of the sequence region (Region SEQ ID NO) and the length of the sequence region (Region length) are described as well as the name of the sequence (e.g., VOYPC53).

TABLE 44
Sequence Regions

| | VOYPC53 | | VOYPC54 | | VOYPC55 | |
|---|---|---|---|---|---|---|
| Sequence | Region | Region | Region | Region | Region | Region |
| Regions | SEQ ID NO | length | SEQ ID NO | length | SEQ ID NO | length |
| GTTG | — | 4 | — | 4 | — | 4 |
| H1 Promoter | 1819 | 219 | 1819 | 219 | 1819 | 219 |
| Modulatory | 1599 | 260 | 1599 | 260 | 1599 | 260 |
| Polynucleotide | | | | | | |
| (VOYHTmiR-127.579) | | | | | | |
| H1 promoter | 1819 | 219 | 1819 | 219 | 1819 | 219 |
| Modulatory | 1599 | 260 | — | — | — | — |
| Polynucleotide | | | | | | |
| (VOYHTmiR-127.579) | | | | | | |
| Modulatory | — | — | 1589 | 158 | 1589 | 158 |
| Polynucleotide | | | | | | |
| (VOYHTmiR-104.016) | | | | | | |
| H1 promoter | 1819 | 219 | 1819 | 219 | 1819 | 219 |
| Modulatory | 1599 | 260 | 1599 | 260 | — | — |
| Polynucleotide | | | | | | |
| (VOYHTmiR-127.579) | | | | | | |
| Modulatory | — | — | — | — | 1589 | 158 |
| Polynucleotide | | | | | | |
| (VOYHTmiR-104.016) | | | | | | |
| Hl promoter | 1819 | 219 | 1819 | 219 | 1819 | 219 |
| Modulatory | 1599 | 260 | — | — | 1599 | 260 |
| Polynucleotide | | | | | | |
| (VOYHTmiR-127.579) | | | | | | |
| Modulatory | — | — | 1589 | 158 | — | — |
| Polynucleotide | | | | | | |
| (VOYHTmiR-104.016) | | | | | | |

TABLE 45
Sequence Regions

| | VOYPC56 | | VOYPC57 | | VOYPC58 | |
|---|---|---|---|---|---|---|
| Sequence | Region | Region | Region | Region | Region | Region |
| Regions | SEQ ID NO | length | SEQ ID NO | length | SEQ ID NO | length |
| GTTG | — | 4 | — | 4 | — | 4 |
| H1 Promoter | 1819 | 219 | 1819 | 219 | 1819 | 219 |
| Modulatory | 1589 | 158 | 1589 | 158 | 1589 | 158 |
| Polynucleotide | | | | | | |
| (VOYHTmiR-104.016) | | | | | | |
| H1 promoter | 1819 | 219 | 1819 | 219 | 1819 | 219 |
| Modulatory | 1599 | 260 | 1599 | 260 | — | — |
| Polynucleotide | | | | | | |
| (VOYHTmiR-127.579) | | | | | | |
| Modulatory | — | — | — | — | 1589 | 158 |
| Polynucleotide | | | | | | |
| (VOYHTmiR-104.016) | | | | | | |
| H1 promoter | 1819 | 219 | 1819 | 219 | 1819 | 219 |
| Modulatory | — | — | 1599 | 260 | — | — |
| Polynucleotide | | | | | | |
| (VOYHTmiR-127.579) | | | | | | |
| Modulatory | 1589 | 158 | — | — | 1589 | 158 |
| Polynucleotide | | | | | | |
| (VOYHTmiR-104.016) | | | | | | |
| H1 promoter | 1819 | 219 | 1819 | 219 | 1819 | 219 |
| Modulatory | 1599 | 260 | — | — | — | — |
| Polynucleotide | | | | | | |
| (VOYHTmiR-127.579) | | | | | | |
| Modulatory | — | — | 1589 | 158 | 1589 | 158 |
| Polynucleotide | | | | | | |
| (VOYHTmiR-104.016) | | | | | | |

[0825] In one embodiment, the polycistronic AAV particle viral genome comprises the sequence modules described in VOYPC53 which comprises a GTTG region, four H1 promoter sequence regions, and four modulatory polynucleotide regions targeting the same gene of interest (HTT).

[0826] In one embodiment, the polycistronic AAV particle viral genome comprises the sequence modules described in VOYPC54 which comprises a GTTG region, four H1 promoter sequence regions, and four modulatory polynucleotide regions targeting the same gene of interest (HTT).

[0827] In one embodiment, the polycistronic AAV particle viral genome comprises the sequence modules described in VOYPC55 which comprises a GTTG region, four H1 promoter sequence regions, and four modulatory polynucleotide regions targeting the same gene of interest (HTT).

[0828] In one embodiment, the polycistronic AAV particle viral genome comprises the sequence modules described in VOYPC56 which comprises a GTTG region, four H1 promoter sequence regions, and four modulatory polynucleotide regions targeting the same gene of interest (HTT).

[0829] In one embodiment, the polycistronic AAV particle viral genome comprises the sequence modules described in VOYPC57 which comprises a GTTG region, four H1 promoter sequence regions, and four modulatory polynucleotide regions targeting the same gene of interest (HTT).

[0830] In one embodiment, the polycistronic AAV particle viral genome comprises the sequence modules described in VOYPC58 which comprises a GTTG region, four H1 promoter sequence regions, and four modulatory polynucleotide regions targeting the same gene of interest (HTT).

### Viral Production

[0831] The present disclosure provides a method for the generation of parvoviral particles, e.g. AAV particles, by viral genome replication in a viral replication cell comprising contacting the viral replication cell with an AAV polynucleotide or AAV genome.

[0832] The present disclosure provides a method for producing an AAV particle having enhanced (increased, improved) transduction efficiency comprising the steps of: 1) co-transfecting competent bacterial cells with a bacmid vector and either a viral construct vector and/or AAV payload construct vector, 2) isolating the resultant viral construct expression vector and AAV payload construct expression vector and separately transfecting viral replication cells, 3) isolating and purifying resultant payload and viral construct particles comprising viral construct expression vector or AAV payload construct expression vector, 4) co-infecting a viral replication cell with both the AAV payload and viral construct particles comprising viral construct expression vector or AAV payload construct expression vector, 5) harvesting and purifying the viral particle comprising a parvoviral genome.

[0833] In one embodiment, the present invention provides a method for producing an AAV particle comprising the steps of 1) simultaneously co-transfecting mammalian cells, such as, but not limited to HEK293 cells, with a payload region, a construct expressing rep and cap genes and a helper construct, 2) harvesting and purifying the AAV particle comprising a viral genome.

### Cells

[0834] The present disclosure provides a cell comprising an AAV polynucleotide and/or AAV genome.

[0835] Viral production disclosed herein describes processes and methods for producing AAV particles that contact a target cell to deliver a payload construct, e.g. a recombinant viral construct, which comprises a polynucleotide sequence encoding a payload molecule.

[0836] In one embodiment, the AAV particles may be produced in a viral replication cell that comprises an insect cell.

[0837] Growing conditions for insect cells in culture, and production of heterologous products in insect cells in culture are well-known in the art, see U.S. Pat. No. 6,204,059, the contents of which are herein incorporated by reference in their entirety.

[0838] Any insect cell which allows for replication of parvovirus and which can be maintained in culture can be used in accordance with the present invention. Cell lines may be used from Spodoptera frugiperda, including, but not limited to the Sf9 or Sf21 cell lines, Drosophila cell lines, or mosquito cell lines, such as Aedes albopictus derived cell lines. Use of insect cells for expression of heterologous proteins is well documented, as are methods of introducing nucleic acids, such as vectors, e.g., insect-cell compatible vectors, into such cells and methods of maintaining such cells in culture. See, for example, Methods in Molecular Biology, ed. Richard, Humana Press, N J (1995); O'Reilly et al., Baculovirus Expression Vectors, A Laboratory Manual, Oxford Univ. Press (1994); Samulski et al., J. Vir. 63:3822-8 (1989); Kajigaya et al., Proc. Nat'l. Acad. Sci. USA 88: 4646-50 (1991); Ruffing et al., J. Vir. 66:6922-30 (1992); Kimbauer et al., Vir. 219:37-44 (1996); Zhao et al., Vir. 272:382-93 (2000); and Samulski et al., U.S. Pat. No. 6,204,059, the contents of each of which is herein incorporated by reference in its entirety.

[0839] The viral replication cell may be selected from any biological organism, including prokaryotic (e.g., bacterial) cells, and eukaryotic cells, including, insect cells, yeast cells and mammalian cells. Viral replication cells may comprise mammalian cells such as A549, WEH1, 3T3, 10T1/2, BHK, MDCK, COS 1, COS 7, BSC 1, BSC 40, BMT 10, VERO. W138, HeLa, HEK293, Saos, C2C12, L cells, HT1080, HepG2 and primary fibroblast, hepatocyte and myoblast cells derived from mammals. Viral replication cells comprise cells derived from mammalian species including, but not limited to, human, monkey, mouse, rat, rabbit, and hamster or cell type, including but not limited to fibroblast, hepatocyte, tumor cell, cell line transformed cell, etc.

### Small Scale Production of AAV Particles

[0840] Viral production disclosed herein describes processes and methods for producing AAV particles that contact a target cell to deliver a payload, e.g. a recombinant viral construct, which comprises a polynucleotide sequence encoding a payload.

[0841] In one embodiment, the AAV particles may be produced in a viral replication cell that comprises a mammalian cell.

[0842] Viral replication cells commonly used for production of recombinant AAV particles include, but are not limited to 293 cells, COS cells, HeLa cells, KB cells, and other mammalian cell lines as described in U.S. Pat. Nos. 6,156,303, 5,387,484, 5,741,683, 5,691,176, and 5,688,676; U.S. patent application 2002/0081721, and International Patent Applications WO 00/47757, WO 00/24916, and WO 96/17947, the contents of each of which are herein incorporated by reference in their entireties.

[0843] In one embodiment, AAV particles are produced in mammalian-cells wherein all three VP proteins are expressed at a stoichiometry approaching 1:1:10 (VP1:VP2:VP3). The regulatory mechanisms that allow this controlled level of expression include the production of two mRNAs, one for VP1, and the other for VP2 and VP3, produced by differential splicing.

[0844] In another embodiment, AAV particles are produced in mammalian cells using a triple transfection method wherein a payload construct, parvoviral Rep and parvoviral Cap and a helper construct are comprised within three different constructs. The triple transfection method of the three components of AAV particle production may be utilized to produce small lots of virus for assays including transduction efficiency, target tissue (tropism) evaluation, and stability.

### Baculovirus

[0845] Particle production disclosed herein describes processes and methods for producing AAV particles that contact a target cell to deliver a payload construct which comprises a polynucleotide sequence encoding a payload.

[0846] Briefly, the viral construct vector and the AAV payload construct vector are each incorporated by a transposon donor/acceptor system into a bacmid, also known as a baculovirus plasmid, by standard molecular biology techniques known and performed by a person skilled in the art. Transfection of separate viral replication cell populations produces two baculoviruses, one that comprises the viral construct expression vector, and another that comprises the AAV payload construct expression vector. The two baculoviruses may be used to infect a single viral replication cell population for production of AAV particles.

[0847] Baculovirus expression vectors for producing viral particles in insect cells, including but not limited to Spodoptera frugiperda (Sf9) cells, provide high titers of viral particle product. Recombinant baculovirus encoding the viral construct expression vector and AAV payload construct expression vector initiates a productive infection of viral replicating cells. Infectious baculovirus particles released from the primary infection secondarily infect additional cells in the culture, exponentially infecting the entire cell culture population in a number of infection cycles that is a function of the initial multiplicity of infection, see Urabe, M. et al., J Virol. 2006 February; 80 (4):1874-85, the contents of which are herein incorporated by reference in their entirety.

[0848] Production of AAV particles with baculovirus in an insect cell system may address known baculovirus genetic and physical instability. In one embodiment, the production system addresses baculovirus instability over multiple passages by utilizing a titerless infected-cells preservation and scale-up system. Small scale seed cultures of viral producing cells are transfected with viral expression constructs encoding the structural, non-structural, components of the viral particle. Baculovirus-infected viral producing cells are harvested into aliquots that may be cryopreserved in liquid nitrogen; the aliquots retain viability and infectivity for infection of large scale viral producing cell culture Wasilko D J et al., Protein Expr Purif. 2009 June; 65(2):122-32, the contents of which are herein incorporated by reference in their entirety.

[0849] A genetically stable baculovirus may be used to produce source of the one or more of the components for producing AAV particles in invertebrate cells. In one embodiment, defective baculovirus expression vectors may be maintained episomally in insect cells. In such an embodiment the bacmid vector is engineered with replication control elements, including but not limited to promoters, enhancers, and/or cell-cycle regulated replication elements.

[0850] In one embodiment, baculoviruses may be engineered with a (non-) selectable marker for recombination into the chitinase/cathepsin locus. The chia/v-cath locus is non-essential for propagating baculovirus in tissue culture, and the V-cath (EC 3.4.22.50) is a cysteine endoprotease that is most active on Arg-Arg dipeptide containing substrates. The Arg-Arg dipeptide is present in densovirus and parvovirus capsid structural proteins but infrequently occurs in dependovirus VP1.

[0851] In one embodiment, stable viral replication cells permissive for baculovirus infection are engineered with at least one stable integrated copy of any of the elements necessary for AAV replication and viral particle production including, but not limited to, the entire AAV genome, Rep and Cap genes, Rep genes, Cap genes, each Rep protein as a separate transcription cassette, each VP protein as a separate transcription cassette, the AAP (assembly activation protein), or at least one of the baculovirus helper genes with native or non-native promoters.

### Large-Scale Production

[0852] In some embodiments, AAV particle production may be modified to increase the scale of production. Large scale viral production methods according to the present disclosure may include any of those taught in U.S. Pat. Nos. 5,756,283, 6,258,595, 6,261,551, 6,270,996, 6,281,010, 6,365,394, 6,475,769, 6,482,634, 6,485,966, 6,943,019, 6,953,690, 7,022,519, 7,238,526, 7,291,498 and 7,491,508 or International Publication Nos. WO1996039530, WO1998010088, WO1999014354, WO1999015685, WO1999047691, WO2000055342, WO2000075353 and WO2001023597, the contents of each of which are herein incorporated by reference in their entirety. Methods of increasing viral particle production scale typically comprise increasing the number of viral replication cells. In some embodiments, viral replication cells comprise adherent cells. To increase the scale of viral particle production by adherent viral replication cells, larger cell culture surfaces are required. In some cases, large-scale production methods comprise the use of roller bottles to increase cell culture surfaces. Other cell culture substrates with increased surface areas are known in the art. Examples of additional adherent cell culture products with increased surface areas include, but are not limited to CELLSTACK®, CELLCUBE® (Corning Corp., Corning, N.Y.) and NUNC™ CELL FACTORY™ (Thermo Scientific, Waltham, Mass.) In some cases, large-scale adherent cell surfaces may comprise from about 1,000 cm² to about 100,000 cm². In some cases, large-scale adherent cell cultures may comprise from about 10⁷ to about 10⁹ cells, from about 10⁸ to about 10¹⁰ cells, from about 10⁹ to about 10¹² cells or at least 10¹² cells. In some cases, large-scale adherent cultures may produce from about 10⁹ to about 10¹², from about 10¹⁰ to about 10¹³, from about 10¹¹ to about 10¹⁴, from about 10¹² to about 10¹⁵ or at least 10¹⁵ viral particles.

[0853] In some embodiments, large-scale viral production methods of the present disclosure may comprise the use of suspension cell cultures. Suspension cell culture allows for significantly increased numbers of cells. Typically, the number of adherent cells that can be grown on about 10-50 cm² of surface area can be grown in about 1 cm³ volume in suspension.

[0854] Transfection of replication cells in large-scale culture formats may be carried out according to any methods known in the art. For large-scale adherent cell cultures, transfection methods may include, but are not limited to the use of inorganic compounds (e.g. calcium phosphate), organic compounds [e.g. polyethyleneimine (PEI)] or the use of non-chemical methods (e.g. electroporation.) With cells grown in suspension, transfection methods may include, but are not limited to the use of calcium phosphate and the use of PEI. In some cases, transfection of large scale suspension cultures may be carried out according to the section entitled “Transfection Procedure” described in Feng, L. et al., 2008. Biotechnol Appl. Biochem. 50:121-32, the contents of which are herein incorporated by reference in their entirety. According to such embodiments, PEI-DNA complexes may be formed for introduction of plasmids to be transfected. In some cases, cells being transfected with PEI-DNA complexes may be ‘shocked’ prior to transfection. This comprises lowering cell culture temperatures to 4° C. for a period of about 1 hour. In some cases, cell cultures may be shocked for a period of from about 10 minutes to about 5 hours. In some cases, cell cultures may be shocked at a temperature of from about 0° C. to about 20° C.

[0855] In some cases, transfections may include one or more vectors for expression of an RNA effector molecule to reduce expression of nucleic acids from one or more AAV payload construct. Such methods may enhance the production of viral particles by reducing cellular resources wasted on expressing payload constructs. In some cases, such methods may be carried according to those taught in US Publication No. US2014/0099666, the contents of which are herein incorporated by reference in their entirety.

### Bioreactors

[0856] In some embodiments, cell culture bioreactors may be used for large scale viral production. In some cases, bioreactors comprise stirred tank reactors. Such reactors generally comprise a vessel, typically cylindrical in shape, with a stirrer (e.g. impeller.) In some embodiments, such bioreactor vessels may be placed within a water jacket to control vessel temperature and/or to minimize effects from ambient temperature changes. Bioreactor vessel volume may range in size from about 500 ml to about 2 L, from about 1 L to about 5 L, from about 2.5 L to about 20 L, from about 10 L to about 50 L, from about 25 L to about 100 L, from about 75 L to about 500 L, from about 250 L to about 2,000 L, from about 1,000 L to about 10,000 L, from about 5,000 L to about 50,000 L or at least 50,000 L. Vessel bottoms may be rounded or flat. In some cases, animal cell cultures may be maintained in bioreactors with rounded vessel bottoms.

[0857] In some cases, bioreactor vessels may be warmed through the use of a thermocirculator. Thermocirculators pump heated water around water jackets. In some cases, heated water may be pumped through pipes (e.g. coiled pipes) that are present within bioreactor vessels. In some cases, warm air may be circulated around bioreactors, including, but not limited to air space directly above culture medium. Additionally, pH and CO₂ levels may be maintained to optimize cell viability.

[0858] In some cases, bioreactors may comprise hollow-fiber reactors. Hollow-fiber bioreactors may support the culture of both anchorage dependent and anchorage independent cells. Further bioreactors may include, but are not limited to packed-bed or fixed-bed bioreactors. Such bioreactors may comprise vessels with glass beads for adherent cell attachment. Further packed-bed reactors may comprise ceramic beads.

[0859] In some cases, viral particles are produced through the use of a disposable bioreactor. In some embodiments, such bioreactors may include WAVE™ disposable bioreactors.

[0860] In some embodiments, AAV particle production in animal cell bioreactor cultures may be carried out according to the methods taught in U.S. Pat. Nos. 5,064,764, 6,194,191, 6,566,118, 8,137,948 or US Patent Application No. US2011/0229971, the contents of each of which are herein incorporated by reference in their entirety.

### Cell Lysis

[0861] Cells of the invention, including, but not limited to viral production cells, may be subjected to cell lysis according to any methods known in the art. Cell lysis may be carried out to obtain one or more agents (e.g. viral particles) present within any cells of the invention. In some embodiments, cell lysis may be carried out according to any of the methods listed in U.S. Pat. Nos. 7,326,555, 7,579,181, 7,048,920, 6,410,300, 6,436,394, 7,732,129, 7,510,875, 7,445,930, 6,726,907, 6,194,191, 7,125,706, 6,995,006, 6,676,935, 7,968,333, 5,756,283, 6,258,595, 6,261,551, 6,270,996, 6,281,010, 6,365,394, 6,475,769, 6,482,634, 6,485,966, 6,943,019, 6,953,690, 7,022,519, 7,238,526, 7,291,498 and 7,491,508 or International Publication Nos. WO1996039530, WO1998010088, WO1999014354, WO1999015685, WO1999047691, WO2000055342, WO2000075353 and WO2001023597, the contents of each of which are herein incorporated by reference in their entirety. Cell lysis methods may be chemical or mechanical. Chemical cell lysis typically comprises contacting one or more cells with one or more lysis agent. Mechanical lysis typically comprises subjecting one or more cells to one or more lysis condition and/or one or more lysis force.

[0862] In some embodiments, chemical lysis may be used to lyse cells. As used herein, the term “lysis agent” refers to any agent that may aid in the disruption of a cell. In some cases, lysis agents are introduced in solutions, termed lysis solutions or lysis buffers. As used herein, the term “lysis solution” refers to a solution (typically aqueous) comprising one or more lysis agent. In addition to lysis agents, lysis solutions may include one or more buffering agents, solubilizing agents, surfactants, preservatives, cryoprotectants, enzymes, enzyme inhibitors and/or chelators. Lysis buffers are lysis solutions comprising one or more buffering agent. Additional components of lysis solutions may include one or more solubilizing agent. As used herein, the term “solubilizing agent” refers to a compound that enhances the solubility of one or more components of a solution and/or the solubility of one or more entities to which solutions are applied. In some cases, solubilizing agents enhance protein solubility. In some cases, solubilizing agents are selected based on their ability to enhance protein solubility while maintaining protein conformation and/or activity.

[0863] Exemplary lysis agents may include any of those described in U.S. Pat. Nos. 8,685,734, 7,901,921, 7,732,129, 7,223,585, 7,125,706, 8,236,495, 8,110,351, 7,419,956, 7,300,797, 6,699,706 and 6,143,567, the contents of each of which are herein incorporated by reference in their entirety. In some cases, lysis agents may be selected from lysis salts, amphoteric agents, cationic agents, ionic detergents and non-ionic detergents. Lysis salts may include, but are not limited to sodium chloride (NaCl) and potassium chloride (KCl.) Further lysis salts may include any of those described in U.S. Pat. Nos. 8,614,101, 7,326,555, 7,579,181, 7,048,920, 6,410,300, 6,436,394, 7,732,129, 7,510,875, 7,445,930, 6,726,907, 6,194,191, 7,125,706, 6,995,006, 6,676,935 and 7,968,333, the contents of each of which are herein incorporated by reference in their entirety. Concentrations of salts may be increased or decreased to obtain an effective concentration for rupture of cell membranes. Amphoteric agents, as referred to herein, are compounds capable of reacting as an acid or a base. Amphoteric agents may include, but are not limited to lysophosphatidylcholine, 3-((3-Cholamidopropyl) dimethylammonium)-1-propanesulfonate (CHAPS), ZWITTERGENT® and the like. Cationic agents may include, but are not limited to cetyltrimethylammonium bromide (C (16) TAB) and Benzalkonium chloride. Lysis agents comprising detergents may include ionic detergents or non-ionic detergents. Detergents may function to break apart or dissolve cell structures including, but not limited to cell membranes, cell walls, lipids, carbohydrates, lipoproteins and glycoproteins. Exemplary ionic detergents include any of those taught in U.S. Pat. Nos. 7,625,570 and 6,593,123 or US Publication No. US2014/0087361, the contents of each of which are herein incorporated by reference in their entirety. Some ionic detergents may include, but are not limited to sodium dodecyl sulfate (SDS), cholate and deoxycholate. In some cases, ionic detergents may be included in lysis solutions as a solubilizing agent. Non-ionic detergents may include, but are not limited to octylglucoside, digitonin, lubrol, C12E8, TWEEN®-20, TWEEN®-80, Triton X-100 and Noniodet P-40. Non-ionic detergents are typically weaker lysis agents, but may be included as solubilizing agents for solubilizing cellular and/or viral proteins. Further lysis agents may include enzymes and urea. In some cases, one or more lysis agents may be combined in a lysis solution in order to enhance one or more of cell lysis and protein solubility. In some cases, enzyme inhibitors may be included in lysis solutions in order to prevent proteolysis that may be triggered by cell membrane disruption.

[0864] In some embodiments, mechanical cell lysis is carried out. Mechanical cell lysis methods may include the use of one or more lysis condition and/or one or more lysis force. As used herein, the term “lysis condition” refers to a state or circumstance that promotes cellular disruption. Lysis conditions may comprise certain temperatures, pressures, osmotic purity, salinity and the like. In some cases, lysis conditions comprise increased or decreased temperatures. According to some embodiments, lysis conditions comprise changes in temperature to promote cellular disruption. Cell lysis carried out according to such embodiments may include freeze-thaw lysis. As used herein, the term “freeze-thaw lysis” refers to cellular lysis in which a cell solution is subjected to one or more freeze-thaw cycle. According to freeze-thaw lysis methods, cells in solution are frozen to induce a mechanical disruption of cellular membranes caused by the formation and expansion of ice crystals. Cell solutions used according freeze-thaw lysis methods, may further comprise one or more lysis agents, solubilizing agents, buffering agents, cryoprotectants, surfactants, preservatives, enzymes, enzyme inhibitors and/or chelators. Once cell solutions subjected to freezing are thawed, such components may enhance the recovery of desired cellular products. In some cases, one or more cryoprotectants are included in cell solutions undergoing freeze-thaw lysis. As used herein, the term “cryoprotectant” refers to an agent used to protect one or more substance from damage due to freezing. Cryoprotectants may include any of those taught in US Publication No. US2013/0323302 or U.S. Pat. Nos. 6,503,888, 6,180,613, 7,888,096, 7,091,030, the contents of each of which are herein incorporated by reference in their entirety. In some cases, cryoprotectants may include, but are not limited to dimethyl sulfoxide, 1,2-propanediol, 2,3-butanediol, formamide, glycerol, ethylene glycol, 1,3-propanediol and n-dimethyl formamide, polyvinylpyrrolidone, hydroxyethyl starch, agarose, dextrans, inositol, glucose, hydroxyethylstarch, lactose, sorbitol, methyl glucose, sucrose and urea. In some embodiments, freeze-thaw lysis may be carried out according to any of the methods described in U.S. Pat. No. 7,704,721, the contents of which are herein incorporated by reference in their entirety.

[0865] As used herein, the term “lysis force” refers to a physical activity used to disrupt a cell. Lysis forces may include, but are not limited to mechanical forces, sonic forces, gravitational forces, optical forces, electrical forces and the like. Cell lysis carried out by mechanical force is referred to herein as “mechanical lysis.” Mechanical forces that may be used according to mechanical lysis may include high shear fluid forces. According to such methods of mechanical lysis, a microfluidizer may be used. Microfluidizers typically comprise an inlet reservoir where cell solutions may be applied. Cell solutions may then be pumped into an interaction chamber via a pump (e.g. high-pressure pump) at high speed and/or pressure to produce shear fluid forces. Resulting lysates may then be collected in one or more output reservoir. Pump speed and/or pressure may be adjusted to modulate cell lysis and enhance recovery of products (e.g. viral particles.) Other mechanical lysis methods may include physical disruption of cells by scraping.

[0866] Cell lysis methods may be selected based on the cell culture format of cells to be lysed. For example, with adherent cell cultures, some chemical and mechanical lysis methods may be used. Such mechanical lysis methods may include freeze-thaw lysis or scraping. In another example, chemical lysis of adherent cell cultures may be carried out through incubation with lysis solutions comprising surfactant, such as Triton-X-100. In some cases, cell lysates generated from adherent cell cultures may be treated with one more nuclease to lower the viscosity of the lysates caused by liberated DNA.

[0867] In one embodiment, a method for harvesting AAV particles without lysis may be used for efficient and scalable AAV particle production. In a non-limiting example, AAV particles may be produced by culturing an AAV particle lacking a heparin binding site, thereby allowing the AAV particle to pass into the supernatant, in a cell culture, collecting supernatant from the culture; and isolating the AAV particle from the supernatant, as described in US Patent Application 20090275107, the contents of which are incorporated herein by reference in their entirety.

### Clarification

[0868] Cell lysates comprising viral particles may be subjected to clarification. Clarification refers to initial steps taken in purification of viral particles from cell lysates. Clarification serves to prepare lysates for further purification by removing larger, insoluble debris. Clarification steps may include, but are not limited to centrifugation and filtration. During clarification, centrifugation may be carried out at low speeds to remove larger debris only. Similarly, filtration may be carried out using filters with larger pore sizes so that only larger debris is removed. In some cases, tangential flow filtration may be used during clarification. Objectives of viral clarification include high throughput processing of cell lysates and to optimize ultimate viral recovery. Advantages of including a clarification step include scalability for processing of larger volumes of lysate. In some embodiments, clarification may be carried out according to any of the methods presented in U.S. Pat. Nos. 8,524,446, 5,756,283, 6,258,595, 6,261,551, 6,270,996, 6,281,010, 6,365,394, 6,475,769, 6,482,634, 6,485,966, 6,943,019, 6,953,690, 7,022,519, 7,238,526, 7,291,498, 7,491,508, US Publication Nos. US2013/0045186, US2011/0263027, US2011/0151434, US2003/0138772, and International Publication Nos. WO2002012455, WO1996039530, WO1998010088, WO1999014354, WO1999015685, WO1999047691, WO2000055342, WO2000075353 and WO2001023597, the contents of each of which are herein incorporated by reference in their entirety.

[0869] Methods of cell lysate clarification by filtration are well understood in the art and may be carried out according to a variety of available methods including, but not limited to passive filtration and flow filtration. Filters used may comprise a variety of materials and pore sizes. For example, cell lysate filters may comprise pore sizes of from about 1 μM to about 5 from about 0.5 μM to about 2 from about 0.1 μM to about 1 from about 0.05 μM to about 0.05 μM and from about 0.001 μM to about 0.1 Exemplary pore sizes for cell lysate filters may include, but are not limited to, 2.0, 1.9, 1.8, 1.7, 1.6, 1.5, 1.4, 1.3, 1.2, 1.1, 1, 0.9, 0.8, 0.7, 0.6, 0.5, 0.4, 0.3, 0.2, 0.1, 0.95, 0.9, 0.85, 0.8, 0.75, 0.7, 0.65, 0.6, 0.55, 0.5, 0.45, 0.4, 0.35, 0.3, 0.25, 0.2, 0.15, 0.1, 0.05, 0.22, 0.21, 0.20, 0.19, 0.18, 0.17, 0.16, 0.15, 0.14, 0.13, 0.12, 0.11, 0.1, 0.09, 0.08, 0.07, 0.06, 0.05, 0.04, 0.03, 0.02, 0.01, 0.02, 0.019, 0.018, 0.017, 0.016, 0.015, 0.014, 0.013, 0.012, 0.011, 0.01, 0.009, 0.008, 0.007, 0.006, 0.005, 0.004, 0.003, 0.002, 0.001 and 0.001 In one embodiment, clarification may comprise filtration through a filter with 2.0 μM pore size to remove large debris, followed by passage through a filter with 0.45 μM pore size to remove intact cells.

[0870] Filter materials may be composed of a variety of materials. Such materials may include, but are not limited to polymeric materials and metal materials (e.g. sintered metal and pored aluminum.) Exemplary materials may include, but are not limited to nylon, cellulose materials (e.g. cellulose acetate), polyvinylidene fluoride (PVDF), polyethersulfone, polyamide, polysulfone, polypropylene, and polyethylene terephthalate. In some cases, filters useful for clarification of cell lysates may include, but are not limited to ULTIPLEAT PROFILE™ filters (Pall Corporation, Port Washington, N.Y.), SUPOR™ membrane filters (Pall Corporation, Port Washington, N.Y.)

[0871] In some cases, flow filtration may be carried out to increase filtration speed and/or effectiveness. In some cases, flow filtration may comprise vacuum filtration. According to such methods, a vacuum is created on the side of the filter opposite that of cell lysate to be filtered. In some cases, cell lysates may be passed through filters by centrifugal forces. In some cases, a pump is used to force cell lysate through clarification filters. Flow rate of cell lysate through one or more filters may be modulated by adjusting one of channel size and/or fluid pressure.

[0872] According to some embodiments, cell lysates may be clarified by centrifugation. Centrifugation may be used to pellet insoluble particles in the lysate. During clarification, centrifugation strength [expressed in terms of gravitational units (g), which represents multiples of standard gravitational force] may be lower than in subsequent purification steps. In some cases, centrifugation may be carried out on cell lysates at from about 200 g to about 800 g, from about 500 g to about 1500 g, from about 1000 g to about 5000 g, from about 1200 g to about 10000 g or from about 8000 g to about 15000 g. In some embodiments, cell lysate centrifugation is carried out at 8000 g for 15 minutes. In some cases, density gradient centrifugation may be carried out in order to partition particulates in the cell lysate by sedimentation rate. Gradients used according to methods of the present disclosure may include, but are not limited to cesium chloride gradients and iodixanol step gradients.

### Purification: Chromatography

[0873] In some cases, AAV particles may be purified from clarified cell lysates by one or more methods of chromatography. Chromatography refers to any number of methods known in the art for separating out one or more elements from a mixture. Such methods may include, but are not limited to ion exchange chromatography (e.g. cation exchange chromatography and anion exchange chromatography), immunoaffinity chromatography and size-exclusion chromatography. In some embodiments, methods of viral chromatography may include any of those taught in U.S. Pat. Nos. 5,756,283, 6,258,595, 6,261,551, 6,270,996, 6,281,010, 6,365,394, 6,475,769, 6,482,634, 6,485,966, 6,943,019, 6,953,690, 7,022,519, 7,238,526, 7,291,498 and 7,491,508 or International Publication Nos. WO1996039530, WO1998010088, WO1999014354, WO1999015685, WO1999047691, WO2000055342, WO2000075353 and WO2001023597, the contents of each of which are herein incorporated by reference in their entirety.

[0874] In some embodiments, ion exchange chromatography may be used to isolate viral particles. Ion exchange chromatography is used to bind viral particles based on charge-charge interactions between capsid proteins and charged sites present on a stationary phase, typically a column through which viral preparations (e.g. clarified lysates) are passed. After application of viral preparations, bound viral particles may then be eluted by applying an elution solution to disrupt the charge-charge interactions. Elution solutions may be optimized by adjusting salt concentration and/or pH to enhance recovery of bound viral particles. Depending on the charge of viral capsids being isolated, cation or anion exchange chromatography methods may be selected. Methods of ion exchange chromatography may include, but are not limited to any of those taught in U.S. Pat. Nos. 7,419,817, 6,143,548, 7,094,604, 6,593,123, 7,015,026 and 8,137,948, the contents of each of which are herein incorporated by reference in their entirety.

[0875] In some embodiments, immunoaffinity chromatography may be used. Immunoaffinity chromatography is a form of chromatography that utilizes one or more immune compounds (e.g. antibodies or antibody-related structures) to retain viral particles. Immune compounds may bind specifically to one or more structures on viral particle surfaces, including, but not limited to one or more viral coat protein. In some cases, immune compounds may be specific for a particular viral variant. In some cases, immune compounds may bind to multiple viral variants. In some embodiments, immune compounds may include recombinant single-chain antibodies. Such recombinant single chain antibodies may include those described in Smith, R. H. et al., 2009. Mol. Ther. 17(11):1888-96, the contents of which are herein incorporated by reference in their entirety. Such immune compounds are capable of binding to several AAV capsid variants, including, but not limited to AAV1, AAV2, AAV6 and AAV8.

[0876] In some embodiments, size-exclusion chromatography (SEC) may be used. SEC may comprise the use of a gel to separate particles according to size. In viral particle purification, SEC filtration is sometimes referred to as “polishing.” In some cases, SEC may be carried out to generate a final product that is near-homogenous. Such final products may in some cases be used in pre-clinical studies and/or clinical studies (Kotin, R. M. 2011. Human Molecular Genetics. 20(1):R2-R6, the contents of which are herein incorporated by reference in their entirety.) In some cases, SEC may be carried out according to any of the methods taught in U.S. Pat. Nos. 6,143,548, 7,015,026, 8,476,418, 6,410,300, 8,476,418, 7,419,817, 7,094,604, 6,593,123, and 8,137,948, the contents of each of which are herein incorporated by reference in their entirety.

[0877] In one embodiment, the compositions comprising at least one AAV particle may be isolated or purified using the methods described in U.S. Pat. No. 6,146,874, the contents of which are herein incorporated by reference in its entirety.

[0878] In one embodiment, the compositions comprising at least one AAV particle may be isolated or purified using the methods described in U.S. Pat. No. 6,660,514, the contents of which are herein incorporated by reference in its entirety.

[0879] In one embodiment, the compositions comprising at least one AAV particle may be isolated or purified using the methods described in U.S. Pat. No. 8,283,151, the contents of which are herein incorporated by reference in its entirety.

[0880] In one embodiment, the compositions comprising at least one AAV particle may be isolated or purified using the methods described in U.S. Pat. No. 8,524,446, the contents of which are herein incorporated by reference in its entirety.

### II. Formulation and Delivery

### Pharmaceutical Compositions and Formulation

[0881] In addition to the pharmaceutical compositions (AAV particles comprising a modulatory polynucleotide sequence encoding the siRNA molecules), provided herein are pharmaceutical compositions which are suitable for administration to humans, it will be understood by the skilled artisan that such compositions are generally suitable for administration to any other animal, e.g., to non-human animals, e.g. non-human mammals. Modification of pharmaceutical compositions suitable for administration to humans in order to render the compositions suitable for administration to various animals is well understood, and the ordinarily skilled veterinary pharmacologist can design and/or perform such modification with merely ordinary, if any, experimentation. Subjects to which administration of the pharmaceutical compositions is contemplated include, but are not limited to, humans and/or other primates; mammals, including commercially relevant mammals such as cattle, pigs, horses, sheep, cats, dogs, mice, and/or rats; and/or birds, including commercially relevant birds such as poultry, chickens, ducks, geese, and/or turkeys.

[0882] In some embodiments, compositions are administered to humans, human patients or subjects. For the purposes of the present disclosure, the phrase “active ingredient” generally refers either to the synthetic siRNA duplexes, the modulatory polynucleotide encoding the siRNA duplex, or the AAV particle comprising a modulatory polynucleotide encoding the siRNA duplex described herein.

[0883] Formulations of the pharmaceutical compositions described herein may be prepared by any method known or hereafter developed in the art of pharmacology. In general, such preparatory methods include the step of bringing the active ingredient into association with an excipient and/or one or more other accessory ingredients, and then, if necessary and/or desirable, dividing, shaping and/or packaging the product into a desired single- or multi-dose unit.

[0884] Relative amounts of the active ingredient, the pharmaceutically acceptable excipient, and/or any additional ingredients in a pharmaceutical composition in accordance with the invention will vary, depending upon the identity, size, and/or condition of the subject treated and further depending upon the route by which the composition is to be administered.

[0885] The AAV particles comprising the modulatory polynucleotide sequence encoding the siRNA molecules of the present invention can be formulated using one or more excipients to: (1) increase stability; (2) increase cell transfection or transduction; (3) permit the sustained or delayed release; or (4) alter the biodistribution (e.g., target the AAV particle to specific tissues or cell types such as brain and neurons).

[0886] Formulations of the present invention can include, without limitation, saline, lipidoids, liposomes, lipid nanoparticles, polymers, lipoplexes, core-shell nanoparticles, peptides, proteins, cells transfected with AAV particles (e.g., for transplantation into a subject), nanoparticle mimics and combinations thereof. Further, the AAV particles of the present invention may be formulated using self-assembled nucleic acid nanoparticles.

[0887] Formulations of the pharmaceutical compositions described herein may be prepared by any method known or hereafter developed in the art of pharmacology. In general, such preparatory methods include the step of associating the active ingredient with an excipient and/or one or more other accessory ingredients.

[0888] A pharmaceutical composition in accordance with the present disclosure may be prepared, packaged, and/or sold in bulk, as a single unit dose, and/or as a plurality of single unit doses. As used herein, a “unit dose” refers to a discrete amount of the pharmaceutical composition comprising a predetermined amount of the active ingredient. The amount of the active ingredient is generally equal to the dosage of the active ingredient which would be administered to a subject and/or a convenient fraction of such a dosage such as, for example, one-half or one-third of such a dosage.

[0889] Relative amounts of the active ingredient, the pharmaceutically acceptable excipient, and/or any additional ingredients in a pharmaceutical composition in accordance with the present disclosure may vary, depending upon the identity, size, and/or condition of the subject being treated and further depending upon the route by which the composition is to be administered. For example, the composition may comprise between 0.1% and 99% (w/w) of the active ingredient. By way of example, the composition may comprise between 0.1% and 100%, e.g., between 0.5 and 50%, between 1-30%, between 5-80%, at least 80% (w/w) active ingredient.

[0890] In some embodiments, a pharmaceutically acceptable excipient may be at least 95%, at least 96%, at least 97%, at least 98%, at least 99%, or 100% pure. In some embodiments, an excipient is approved for use for humans and for veterinary use. In some embodiments, an excipient may be approved by United States Food and Drug Administration. In some embodiments, an excipient may be of pharmaceutical grade. In some embodiments, an excipient may meet the standards of the United States Pharmacopoeia (USP), the European Pharmacopoeia (EP), the British Pharmacopoeia, and/or the International Pharmacopoeia.

[0891] Excipients, which, as used herein, includes, but is not limited to, any and all solvents, dispersion media, diluents, or other liquid vehicles, dispersion or suspension aids, surface active agents, isotonic agents, thickening or emulsifying agents, preservatives, and the like, as suited to the particular dosage form desired. Various excipients for formulating pharmaceutical compositions and techniques for preparing the composition are known in the art (see Remington: The Science and Practice of Pharmacy, 21^{st} Edition, A. R. Gennaro, Lippincott, Williams & Wilkins, Baltimore, Md., 2006; incorporated herein by reference in its entirety). The use of a conventional excipient medium may be contemplated within the scope of the present disclosure, except insofar as any conventional excipient medium may be incompatible with a substance or its derivatives, such as by producing any undesirable biological effect or otherwise interacting in a deleterious manner with any other component(s) of the pharmaceutical composition.

[0892] Exemplary diluents include, but are not limited to, calcium carbonate, sodium carbonate, calcium phosphate, dicalcium phosphate, calcium sulfate, calcium hydrogen phosphate, sodium phosphate lactose, sucrose, cellulose, microcrystalline cellulose, kaolin, mannitol, sorbitol, inositol, sodium chloride, dry starch, cornstarch, powdered sugar, etc., and/or combinations thereof.

[0893] In some embodiments, the formulations may comprise at least one inactive ingredient. As used herein, the term “inactive ingredient” refers to one or more inactive agents included in formulations. In some embodiments, all, none or some of the inactive ingredients which may be used in the formulations of the present invention may be approved by the US Food and Drug Administration (FDA).

[0894] Formulations of vectors comprising the nucleic acid sequence for the siRNA molecules of the present invention may include cations or anions. In one embodiment, the formulations include metal cations such as, but not limited to, Zn2+, Ca2+, Cu2+, Mg+ and combinations thereof.

[0895] As used herein, “pharmaceutically acceptable salts” refers to derivatives of the disclosed compounds wherein the parent compound is modified by converting an existing acid or base moiety to its salt form (e.g., by reacting the free base group with a suitable organic acid). Examples of pharmaceutically acceptable salts include, but are not limited to, mineral or organic acid salts of basic residues such as amines; alkali or organic salts of acidic residues such as carboxylic acids; and the like. Representative acid addition salts include acetate, acetic acid, adipate, alginate, ascorbate, aspartate, benzenesulfonate, benzene sulfonic acid, benzoate, bisulfate, borate, butyrate, camphorate, camphorsulfonate, citrate, cyclopentanepropionate, digluconate, dodecylsulfate, ethanesulfonate, fumarate, glucoheptonate, glycerophosphate, hemisulfate, heptonate, hexanoate, hydrobromide, hydrochloride, hydroiodide, 2-hydroxy-ethanesulfonate, lactobionate, lactate, laurate, lauryl sulfate, malate, maleate, malonate, methanesulfonate, 2-naphthalenesulfonate, nicotinate, nitrate, oleate, oxalate, palmitate, pamoate, pectinate, persulfate, 3-phenylpropionate, phosphate, picrate, pivalate, propionate, stearate, succinate, sulfate, tartrate, thiocyanate, toluenesulfonate, undecanoate, valerate salts, and the like. Representative alkali or alkaline earth metal salts include sodium, lithium, potassium, calcium, magnesium, and the like, as well as nontoxic ammonium, quaternary ammonium, and amine cations, including, but not limited to ammonium, tetramethylammonium, tetraethylammonium, methylamine, dimethylamine, trimethylamine, triethylamine, ethylamine, and the like. The pharmaceutically acceptable salts of the present disclosure include the conventional non-toxic salts of the parent compound formed, for example, from non-toxic inorganic or organic acids. The pharmaceutically acceptable salts of the present disclosure can be synthesized from the parent compound which contains a basic or acidic moiety by conventional chemical methods. Generally, such salts can be prepared by reacting the free acid or base forms of these compounds with a stoichiometric amount of the appropriate base or acid in water or in an organic solvent, or in a mixture of the two; generally, nonaqueous media like ether, ethyl acetate, ethanol, isopropanol, or acetonitrile are preferred. Lists of suitable salts are found in Remington's Pharmaceutical Sciences, 17^{th} ed., Mack Publishing Company, Easton, Pa., 1985, p. 1418, Pharmaceutical Salts: Properties, Selection, and Use, P. H. Stahl and C. G. Wermuth (eds.), Wiley-VCH, 2008, and Berge et al., Journal of Pharmaceutical Science, 66, 1-19 (1977); the content of each of which is incorporated herein by reference in their entirety.

[0896] The term “pharmaceutically acceptable solvate,” as used herein, means a compound of the invention wherein molecules of a suitable solvent are incorporated in the crystal lattice. A suitable solvent is physiologically tolerable at the dosage administered. For example, solvates may be prepared by crystallization, recrystallization, or precipitation from a solution that includes organic solvents, water, or a mixture thereof. Examples of suitable solvents are ethanol, water (for example, mono-, di-, and tri-hydrates), N-methylpyrrolidinone (NMP), dimethyl sulfoxide (DMSO), N,N′-dimethylformamide (DMF), N,N′-dimethylacetamide (DMAC), 1,3-dimethyl-2-imidazolidinone (DMEU), 1,3-dimethyl-3,4,5,6-tetrahydro-2-(1H)-pyrimidinone (DMPU), acetonitrile (ACN), propylene glycol, ethyl acetate, benzyl alcohol, 2-pyrrolidone, benzyl benzoate, and the like. When water is the solvent, the solvate is referred to as a “hydrate.”

[0897] According to the present invention, the AAV particle comprising the modulatory polynucleotide sequence encoding for the siRNA molecules may be formulated for CNS delivery. Agents that cross the brain blood barrier may be used. For example, some cell penetrating peptides that can target siRNA molecules to the brain blood barrier endothelium may be used to formulate the siRNA duplexes targeting the gene of interest.

### Inactive Ingredients

[0898] In some embodiments, formulations may comprise at least one excipient which is an inactive ingredient. As used herein, the term “inactive ingredient” refers to one or more inactive agents included in formulations. In some embodiments, all, none or some of the inactive ingredients which may be used in the formulations of the present disclosure may be approved by the US Food and Drug Administration (FDA).

[0899] Formulations of AAV particles described herein may include cations or anions. In one embodiment, the formulations include metal cations such as, but not limited to, Zn2+, Ca2+, Cu2+, Mg+ and combinations thereof. As a non-limiting example, formulations may include polymers and compositions described herein complexed with a metal cation (See e.g., U.S. Pat. Nos. 6,265,389 and 6,555,525, each of which is herein incorporated by reference in its entirety).

### Delivery

[0900] In one embodiment, the AAV particles described herein may be administered or delivered using the methods for the delivery of AAV virions described in European Patent Application No. EP1857552, the contents of which are herein incorporated by reference in its entirety.

[0901] In one embodiment, the AAV particles described herein may be administered or delivered using the methods for delivering proteins using AAV particles described in European Patent Application No. EP2678433, the contents of which are herein incorporated by reference in its entirety.

[0902] In one embodiment, the AAV particle described herein may be administered or delivered using the methods for delivering DNA molecules using AAV particles described in U.S. Pat. No. 5,858,351, the contents of which are herein incorporated by reference in its entirety.

[0903] In one embodiment, the AAV particle described herein may be administered or delivered using the methods for delivering DNA to the bloodstream described in U.S. Pat. No. 6,211,163, the contents of which are herein incorporated by reference in its entirety.

[0904] In one embodiment, the AAV particle described herein may be administered or delivered using the methods for delivering AAV virions described in U.S. Pat. No. 6,325,998, the contents of which are herein incorporated by reference in its entirety.

[0905] In one embodiment, the AAV particle described herein may be administered or delivered using the methods for delivering a payload to the central nervous system described in U.S. Pat. No. 7,588,757, the contents of which are herein incorporated by reference in its entirety.

[0906] In one embodiment, the AAV particle described herein may be administered or delivered using the methods for delivering a payload described in U.S. Pat. No. 8,283,151, the contents of which are herein incorporated by reference in its entirety.

[0907] In one embodiment, the AAV particle described herein may be administered or delivered using the methods for delivering a payload using a glutamic acid decarboxylase (GAD) delivery vector described in International Patent Publication No. WO2001089583, the contents of which are herein incorporated by reference in its entirety.

[0908] In one embodiment, the AAV particle described herein may be administered or delivered using the methods for delivering a payload to neural cells described in International Patent Publication No. WO2012057363, the contents of which are herein incorporated by reference in its entirety.

### Delivery to Cells

[0909] The present disclosure provides a method of delivering to a cell or tissue any of the above-described AAV polynucleotides or AAV genomes, comprising contacting the cell or tissue with said AAV polynucleotide or AAV genomes or contacting the cell or tissue with a particle comprising said AAV polynucleotide or AAV genome, or contacting the cell or tissue with any of the described compositions, including pharmaceutical compositions. The method of delivering the AAV polynucleotide or AAV genome to a cell or tissue can be accomplished in vitro, ex vivo, or in vivo.

Introduction into Cells—Synthetic dsRNA

[0910] To ensure the chemical and biological stability of siRNA molecules (e.g., siRNA duplexes and dsRNA), it is important to deliver siRNA molecules inside the target cells. In some embodiments, the cells may include, but are not limited to, cells of mammalian origin, cells of human origins, embryonic stem cells, induced pluripotent stem cells, neural stem cells, and neural progenitor cells.

[0911] Nucleic acids, including siRNA, carry a net negative charge on the sugar-phosphate backbone under normal physiological conditions. In order to enter the cell, a siRNA molecule must come into contact with a lipid bilayer of the cell membrane, whose head groups are also negatively charged.

[0912] The siRNA duplexes can be complexed with a carrier that allows them to traverse cell membranes such as package particles to facilitate cellular uptake of the siRNA. The package particles may include, but are not limited to, liposomes, nanoparticles, cationic lipids, polyethylenimine derivatives, dendrimers, carbon nanotubes and the combination of carbon-made nanoparticles with dendrimers. Lipids may be cationic lipids and/or neutral lipids. In addition to well established lipophilic complexes between siRNA molecules and cationic carriers, siRNA molecules can be conjugated to a hydrophobic moiety, such as cholesterol (e.g., U.S. Patent Publication No. 20110110937; the content of which is herein incorporated by reference in its entirety). This delivery method holds a potential of improving in vitro cellular uptake and in vivo pharmacological properties of siRNA molecules. The siRNA molecules of the present invention may also be conjugated to certain cationic cell-penetrating peptides (CPPs), such as MPG, transportan or penetratin covalently or non-covalently (e.g., U.S. Patent Publication No. 20110086425; the content of which is herein incorporated by reference in its entirety).

Introduction into Cells—AAV Particles

[0913] The siRNA molecules (e.g., siRNA duplexes) of the present invention may be introduced into cells using any of a variety of approaches such as, but not limited to, AAV particles. These AAV particles are engineered and optimized to facilitate the entry of siRNA molecule into cells that are not readily amendable to transfection. Also, some synthetic AAV particles possess an ability to integrate the shRNA into the cell genome, thereby leading to stable siRNA expression and long-term knockdown of a target gene. In this manner, AAV particles are engineered as vehicles for specific delivery while lacking the deleterious replication and/or integration features found in wild-type virus.

[0914] In some embodiments, the siRNA molecules of the present invention are introduced into a cell by contacting the cell with an AAV particle comprising a modulatory polynucleotide sequence encoding a siRNA molecule, and a lipophilic carrier. In other embodiments, the siRNA molecule is introduced into a cell by transfecting or infecting the cell with an AAV particle comprising a nucleic acid sequence capable of producing the siRNA molecule when transcribed in the cell. In some embodiments, the siRNA molecule is introduced into a cell by injecting into the cell an AAV particle comprising a nucleic acid sequence capable of producing the siRNA molecule when transcribed in the cell.

[0915] In some embodiments, prior to transfection, an AAV particle comprising a nucleic acid sequence encoding the siRNA molecules of the present invention may be transfected into cells.

[0916] In other embodiments, the AAV particles comprising the nucleic acid sequence encoding the siRNA molecules of the present invention may be delivered into cells by electroporation (e.g. U.S. Patent Publication No. 20050014264; the content of which is herein incorporated by reference in its entirety).

[0917] Other methods for introducing AAV particles comprising the nucleic acid sequence encoding the siRNA molecules described herein may include photochemical internalization as described in U. S. Patent publication No. 20120264807; the content of which is herein incorporated by reference in its entirety.

[0918] In some embodiments, the formulations described herein may contain at least one AAV particle comprising the nucleic acid sequence encoding the siRNA molecules described herein. In one embodiment, the siRNA molecules may target the gene of interest at one target site. In another embodiment, the formulation comprises a plurality of AAV particles, each AAV particle comprising a nucleic acid sequence encoding a siRNA molecule targeting the gene of interest at a different target site. The gene of interest may be targeted at 2, 3, 4, 5 or more than 5 sites.

[0919] In one embodiment, the AAV particles from any relevant species, such as, but not limited to, human, dog, mouse, rat or monkey may be introduced into cells.

[0920] In one embodiment, the AAV particles may be introduced into cells which are relevant to the disease to be treated. As a non-limiting example, the disease is HD and the target cells are neurons and astrocytes. As another non-limiting example, the disease is HD and the target cells are medium spiny neurons, cortical neurons and astrocytes.

[0921] In one embodiment, the AAV particles may be introduced into cells which are relevant to the disease to be treated. As a non-limiting example, the disease is ALS and the target cells are neurons and astrocytes. As another non-limiting example, the disease is ALS and the target cells are medium spiny neurons, cortical neurons and astrocytes.

[0922] In one embodiment, the AAV particles may be introduced into cells which have a high level of endogenous expression of the target sequence.

[0923] In another embodiment, the AAV particles may be introduced into cells which have a low level of endogenous expression of the target sequence.

[0924] In one embodiment, the cells may be those which have a high efficiency of AAV transduction.

### Delivery to Subjects

[0925] The present disclosure additionally provides a method of delivering to a subject, including a mammalian subject, any of the above-described AAV polynucleotides or AAV genomes comprising administering to the subject said AAV polynucleotide or AAV genome, or administering to the subject a particle comprising said AAV polynucleotide or AAV genome, or administering to the subject any of the described compositions, including pharmaceutical compositions.

[0926] The pharmaceutical compositions of AAV particles described herein may be characterized by one or more of bioavailability, therapeutic window and/or volume of distribution.

### III. Administration and Dosing

### Administration

[0927] The AAV particles comprising a nucleic acid sequence encoding the siRNA molecules of the present invention may be administered by any route which results in a therapeutically effective outcome. These include, but are not limited to, within the parenchyma of an organ such as, but not limited to, a brain (e.g., intraparenchymal), corpus striatum (intrastriatal), enteral (into the intestine), gastroenteral, epidural, oral (by way of the mouth), transdermal, peridural, intracerebral (into the cerebrum), intracerebroventricular (into the cerebral ventricles), subpial (under the pia), epicutaneous (application onto the skin), intradermal, (into the skin itself), subcutaneous (under the skin), nasal administration (through the nose), intravenous (into a vein), intravenous bolus, intravenous drip, intraarterial (into an artery), intramuscular (into a muscle), intracardiac (into the heart), intraosseous infusion (into the bone marrow), intrathecal (into the spinal canal), intraganglionic (into the ganglion), intraperitoneal, (infusion or injection into the peritoneum), intravesical infusion, intravitreal, (through the eye), intracavernous injection (into a pathologic cavity) intracavitary (into the base of the penis), intravaginal administration, intrauterine, extra-amniotic administration, transdermal (diffusion through the intact skin for systemic distribution), transmucosal (diffusion through a mucous membrane), transvaginal, insufflation (snorting), sublingual, sublabial, enema, eye drops (onto the conjunctiva), in ear drops, auricular (in or by way of the ear), buccal (directed toward the cheek), conjunctival, cutaneous, dental (to a tooth or teeth), electro-osmosis, endocervical, endosinusial, endotracheal, extracorporeal, hemodialysis, infiltration, interstitial, intra-abdominal, intra-amniotic, intra-articular, intrabiliary, intrabronchial, intrabursal, intracartilaginous (within a cartilage), intracaudal (within the cauda equine), intracisternal (within the cisterna magna cerebellomedularis), intracorneal (within the cornea), dental intracornal, intracoronary (within the coronary arteries), intracorporus cavernosum (within the dilatable spaces of the corporus cavernosa of the penis), intradiscal (within a disc), intraductal (within a duct of a gland), intraduodenal (within the duodenum), intradural (within or beneath the dura), intraepidermal (to the epidermis), intraesophageal (to the esophagus), intragastric (within the stomach), intragingival (within the gingivae), intraileal (within the distal portion of the small intestine), intralesional (within or introduced directly to a localized lesion), intraluminal (within a lumen of a tube), intralymphatic (within the lymph), intramedullary (within the marrow cavity of a bone), intrameningeal (within the meninges), intraocular (within the eye), intraovarian (within the ovary), intrapericardial (within the pericardium), intrapleural (within the pleura), intraprostatic (within the prostate gland), intrapulmonary (within the lungs or its bronchi), intrasinal (within the nasal or periorbital sinuses), intraspinal (within the vertebral column), intrasynovial (within the synovial cavity of a joint), intratendinous (within a tendon), intratesticular (within the testicle), intrathecal (within the cerebrospinal fluid at any level of the cerebrospinal axis), intrathoracic (within the thorax), intratubular (within the tubules of an organ), intratumor (within a tumor), intratympanic (within the aurus media), intravascular (within a vessel or vessels), intraventricular (within a ventricle), iontophoresis (by means of electric current where ions of soluble salts migrate into the tissues of the body), irrigation (to bathe or flush open wounds or body cavities), laryngeal (directly upon the larynx), nasogastric (through the nose and into the stomach), occlusive dressing technique (topical route administration which is then covered by a dressing which occludes the area), ophthalmic (to the external eye), oropharyngeal (directly to the mouth and pharynx), parenteral, percutaneous, periarticular, peridural, perineural, periodontal, rectal, respiratory (within the respiratory tract by inhaling orally or nasally for local or systemic effect), retrobulbar (behind the pons or behind the eyeball), soft tissue, subarachnoid, subconjunctival, submucosal, topical, transplacental (through or across the placenta), transtracheal (through the wall of the trachea), transtympanic (across or through the tympanic cavity), ureteral (to the ureter), urethral (to the urethra), vaginal, caudal block, diagnostic, nerve block, biliary perfusion, cardiac perfusion, photopheresis or spinal.

[0928] In specific embodiments, compositions of AAV particles comprising a nucleic acid sequence encoding the siRNA molecules of the present invention may be administered in a way which facilitates the vectors or siRNA molecule to enter the central nervous system and penetrate into medium spiny and/or cortical neurons and/or astrocytes.

[0929] In some embodiments, the AAV particles comprising a nucleic acid sequence encoding the siRNA molecules of the present invention may be administered by intramuscular injection.

[0930] In one embodiment, the AAV particles comprising a nucleic acid sequence encoding the siRNA molecules of the present invention may be administered via intraparenchymal injection.

[0931] In one embodiment, the AAV particles comprising a nucleic acid sequence encoding the siRNA molecules of the present invention may be administered via intraparenchymal injection and intrathecal injection.

[0932] In one embodiment, the AAV particles comprising a nucleic acid sequence encoding the siRNA molecules of the present invention may be administered via intrastriatal injection.

[0933] In one embodiment, the AAV particles comprising a nucleic acid sequence encoding the siRNA molecules of the present invention may be administered via intrastriatal injection and another route of administration described herein.

[0934] In some embodiments, AAV particles that express siRNA duplexes of the present invention may be administered to a subject by peripheral injections (e.g., intravenous) and/or intranasal delivery. It was disclosed in the art that the peripheral administration of AAV particles for siRNA duplexes can be transported to the central nervous system, for example, to the neurons (e.g., U.S. Patent Publication Nos. 20100240739; and 20100130594; the content of each of which is incorporated herein by reference in their entirety).

[0935] In other embodiments, compositions comprising at least one AAV particle comprising a nucleic acid sequence encoding the siRNA molecules of the present invention may be administered to a subject by intracranial delivery (See, e.g., U.S. Pat. No. 8,119,611; the content of which is incorporated herein by reference in its entirety).

[0936] The AAV particle comprising a nucleic acid sequence encoding the siRNA molecules of the present invention may be administered in any suitable form, either as a liquid solution or suspension, as a solid form suitable for liquid solution or suspension in a liquid solution. The siRNA duplexes may be formulated with any appropriate and pharmaceutically acceptable excipient.

[0937] The AAV particle comprising a nucleic acid sequence encoding the siRNA molecules of the present invention may be administered in a “therapeutically effective” amount, i.e., an amount that is sufficient to alleviate and/or prevent at least one symptom associated with the disease, or provide improvement in the condition of the subject.

[0938] In one embodiment, the AAV particle may be administered to the CNS in a therapeutically effective amount to improve function and/or survival for a subject with Huntington's Disease (HD). As a non-limiting example, the vector may be administered by direct infusion into the striatum.

[0939] In one embodiment, the AAV particle may be administered to a subject (e.g., to the CNS of a subject via intrathecal administration) in a therapeutically effective amount for the siRNA duplexes or dsRNA to target the medium spiny neurons, cortical neurons and/or astrocytes. As a non-limiting example, the siRNA duplexes or dsRNA may target HTT and reduce the expression of HTT protein or mRNA. As another non-limiting example, the siRNA duplexes or dsRNA target HTT and can suppress HTT and reduce HTT mediated toxicity. The reduction of HTT protein and/or mRNA as well as HTT mediated toxicity may be accomplished with almost no enhanced inflammation.

[0940] In one embodiment, the AAV particle may be administered to a subject (e.g., to the CNS of a subject) in a therapeutically effective amount to slow the functional decline of a subject (e.g., determined using a known evaluation method such as the unified Huntington's disease rating scale (UHDRS)). As a non-limiting example, the vector may be administered via intraparenchymal injection.

[0941] In one embodiment, the AAV particle may be administered to the cisterna magna in a therapeutically effective amount to transduce medium spiny neurons, cortical neurons and/or astrocytes. As a non-limiting example, the vector may be administered intrathecally.

[0942] In one embodiment, the AAV particle may be administered using intrathecal infusion in a therapeutically effective amount to transduce medium spiny neurons, cortical neurons and/or astrocytes. As a non-limiting example, the vector may be administered intrathecally.

[0943] In one embodiment, the AAV particle may be administered to the cisterna magna in a therapeutically effective amount to transduce medium spiny neurons, cortical neurons and/or astrocytes. As a non-limiting example, the vector may be administered by intraparenchymal injection.

[0944] In one embodiment, the AAV particle comprising a modulatory polynucleotide may be formulated. As a non-limiting example the baricity and/or osmolality of the formulation may be optimized to ensure optimal drug distribution in the central nervous system or a region or component of the central nervous system.

[0945] In one embodiment, the AAV particle comprising a modulatory polynucleotide may be delivered to a subject via a single route administration.

[0946] In one embodiment, the AAV particle comprising a modulatory polynucleotide may be delivered to a subject via a multi-site route of administration. A subject may be administered the AAV particle comprising a modulatory polynucleotide at 2, 3, 4, 5 or more than 5 sites.

[0947] In one embodiment, a subject may be administered the AAV particle comprising a modulatory polynucleotide described herein using a bolus injection.

[0948] In one embodiment, a subject may be administered the AAV particle comprising a modulatory polynucleotide described herein using sustained delivery over a period of minutes, hours or days. The infusion rate may be changed depending on the subject, distribution, formulation or another delivery parameter.

[0949] In one embodiment, the AAV particle described herein is administered via putamen and caudate infusion. As a non-limiting example, the dual infusion provides a broad striatal distribution as well as a frontal and temporal cortical distribution.

[0950] In one embodiment, the AAV particle is AAV-DJ8 which is administered via unilateral putamen infusion. As a non-limiting example, the distribution of the administered AAV-DJ8 is similar to the distribution of AAV1 delivered via unilateral putamen infusion.

[0951] In one embodiment, the AAV particle described herein is administered via intrathecal (IT) infusion at C1. The infusion may be for 1, 2, 3, 4, 6, 7, 8, 9, 10, 11, 12, 13, 14, 15 or more than 15 hours.

[0952] In one embodiment, the selection of subjects for administration of the AAV particle described herein and/or the effectiveness of the dose, route of administration and/or volume of administration may be evaluated using imaging of the perivascular spaces (PVS) which are also known as Virchow-Robin spaces. PVS surround the arterioles and venules as they perforate brain parenchyma and are filled with cerebrospinal fluid (CSF)/interstitial fluid. PVS are common in the midbrain, basal ganglia, and centrum semiovale. While not wishing to be bound by theory, PVS may play a role in the normal clearance of metabolites and have been associated with worse cognition and several disease states including Parkinson's disease. PVS are usually are normal in size but they can increase in size in a number of disease states. Potter et al. (Cerebrovasc Dis. 2015 January; 39(4): 224-231; the contents of which are herein incorporated by reference in its entirety) developed a grading method where they studied a full range of PVS and rated basal ganglia, centrum semiovale and midbrain PVS. They used the frequency and range of PVS used by Mac and Lullich et al. (J Neurol Neurosurg Psychiatry. 2004 November; 75(11):1519-23; the contents of which are herein incorporated by reference in its entirety) and Potter et al. gave 5 ratings to basal ganglia and centrum semiovale PVS: 0 (none), 1 (1-10), 2 (11-20), 3 (21-40) and 4 (>40) and 2 ratings to midbrain PVS: 0 (non visible) or 1 (visible). The user guide for the rating system by Potter et al. can be found at: www.sbirc.ed.ac.uk/documents/epvs-rating-scale-user-guide.pdf.

### Dosing

[0953] The pharmaceutical compositions of the present invention may be administered to a subject using any amount effective for reducing, preventing and/or treating a disease and/or disorder. The exact amount required will vary from subject to subject, depending on the species, age, and general condition of the subject, the severity of the disease, the particular composition, its mode of administration, its mode of activity, and the like.

[0954] The compositions of the present invention are typically formulated in unit dosage form for ease of administration and uniformity of dosage. It will be understood, however, that the total daily usage of the compositions of the present invention may be decided by the attending physician within the scope of sound medical judgment. The specific therapeutic effectiveness for any particular patient will depend upon a variety of factors including the disorder being treated and the severity of the disorder; the activity of the specific compound employed; the specific composition employed; the age, body weight, general health, sex and diet of the patient; the time of administration, route of administration, and rate of excretion of the siRNA duplexes employed; the duration of the treatment; drugs used in combination or coincidental with the specific compound employed; and like factors well known in the medical arts. \

[0955] In one embodiment, the age and sex of a subject may be used to determine the dose of the compositions of the present invention. As a non-limiting example, a subject who is older may receive a larger dose (e.g., 5-10%, 10-20%, 15-30%, 20-50%, 25-50% or at least 1%, 2%, 3%, 4%, 5%, 10%, 20%, 30%, 40%, 50%, 60%, 70%, 80%, 90% or more than 90% more) of the composition as compared to a younger subject. As another non-limiting example, a subject who is younger may receive a larger dose (e.g., 5-10%, 10-20%, 15-30%, 20-50%, 25-50% or at least 1%, 2%, 3%, 4%, 5%, 10%, 20%, 30%, 40%, 50%, 60%, 70%, 80%, 90% or more than 90% more) of the composition as compared to an older subject. As yet another non-limiting example, a subject who is female may receive a larger dose (e.g., 5-10%, 10-20%, 15-30%, 20-50%, 25-50% or at least 1%, 2%, 3%, 4%, 5%, 10%, 20%, 30%, 40%, 50%, 60%, 70%, 80%, 90% or more than 90% more) of the composition as compared to a male subject. As yet another non-limiting example, a subject who is male may receive a larger dose (e.g., 5-10%, 10-20%, 15-30%, 20-50%, 25-50% or at least 1%, 2%, 3%, 4%, 5%, 10%, 20%, 30%, 40%, 50%, 60%, 70%, 80%, 90% or more than 90% more) of the composition as compared to a female subject

[0956] In some specific embodiments, the doses of AAV particles for delivering siRNA duplexes of the present invention may be adapted depending on the disease condition, the subject and the treatment strategy.

[0957] In one embodiment, delivery of the compositions in accordance with the present invention to cells comprises a rate of delivery defined by [VG/hour=mL/hour*VG/mL] wherein VG is viral genomes, VG/mL is composition concentration, and mL/hour is rate of prolonged delivery.

[0958] In one embodiment, delivery of compositions in accordance with the present invention to cells may comprise a total concentration per subject between about 1×10⁶ VG and about 1×10¹⁶ VG. In some embodiments, delivery may comprise a composition concentration of about 1×10⁶, 2×10⁶, 3×10⁶, 4×10⁶, 5×10⁶, 6×10⁶, 7×10⁶, 8×10⁶, 9×10⁶, 1×10⁷, 2×10⁷, 3×10⁷, 4×10⁷, 5×10⁷, 6×10⁷, 7×10⁷, 8×10⁷, 9×10⁷, 1×10⁸, 2×10⁸, 3×10⁸, 4×10⁸, 5×10⁸, 6×10⁸, 7×10⁸, 8×10⁸, 9×10⁸, 1×10⁹, 2×10⁹, 3×10⁹, 4×10⁹, 5×10⁹, 6×10⁹, 7×10⁹, 8×10⁹, 9×10⁹, 1×10¹⁰, 2×10¹⁰, 3×10¹⁰, 4×10¹⁰, 5×10¹⁰, 6×10¹⁰, 7×10¹⁰, 8×10¹⁰, 9×10¹⁰, 1×10¹¹, 1.1×10¹¹, 1.2×10¹¹, 1.3×10¹¹, 1.4×10¹¹, 1.5×10¹¹, 1.6×10¹¹, 1.7×10¹¹, 1.8×10¹¹, 1.9×10¹¹, 2×10¹¹, 2.1×10¹¹, 2.2×10¹¹, 2.3×10¹¹, 2.4×10¹¹, 2.5×10¹¹, 2.6×10¹¹, 2.7×10¹¹, 2.8×10¹¹, 2.9×10¹¹, 3×10¹¹, 4×10¹¹, 5×10¹¹, 6×10¹¹, 7×10¹¹, 7.1×10¹¹, 7.2×10¹¹, 7.3×10¹¹, 7.4×10¹¹, 7.5×10¹¹, 7.6×10¹¹, 7.7×10¹¹, 7.8×10¹¹, 7.9×10¹¹, 8×10¹¹, 9×10¹¹, 1×10¹², 1.1×10¹², 1.2×10¹², 1.3×10¹², 1.4×10¹², 1.5×10¹², 1.6×10¹², 1.7×10¹², 1.8×10¹², 1.9×10¹², 2×10¹², 2.1×10¹², 2.2×10¹², 2.3×10¹², 2.4×10¹², 2.5×10¹², 2.6×10¹², 2.7×10¹², 2.8×10¹², 2.9×10¹², 3×10¹², 3.1×10¹², 3.2×10¹², 3.3×10¹², 3.4×10¹², 3.5×10¹², 3.6×10¹², 3.7×10¹², 3.8×10¹², 3.9×10¹², 4×10¹², 4.1×10¹², 4.2×10¹², 4.3×10¹², 4.4×10¹², 4.5×10¹², 4.6×10¹², 4.7×10¹², 4.8×10¹², 4.9×10¹², 5×10¹², 6×10¹², 6.1×10¹², 6.2×10¹², 6.3×10¹², 6.4×10¹², 6.5×10¹², 6.6×10¹², 6.7×10¹², 6.8×10¹², 6.9×10¹², 7×10¹², 8×10¹², 8.1×10¹², 8.2×10¹², 8.3×10¹², 8.4×10¹², 8.5×10¹², 8.6×10¹², 8.7×10¹², 8.8×10¹², 8.9×10¹², 9×10¹², 1×10¹³, 1.1×10¹³, 1.2×10¹³, 1.3×10¹³, 1.4×10¹³, 1.5×10¹³, 1.6×10¹³, 1.7×10¹³, 1.8×10¹³, 1.9×10¹³, 2×10¹³, 3×10¹³, 4×10¹³, 5×10¹³, 6×10¹³, 6.7×10¹³, 7×10¹³, 8×10¹³, 9×10¹³, 1×10¹⁴, 2×10¹⁴, 3×10¹⁴, 4×10¹⁴, 5×10¹⁴, 6×10¹⁴, 7×10¹⁴, 8×10¹⁴, 9×10¹⁴, 1×10¹⁵, 2×10¹⁵, 3×10¹⁵, 4×10¹⁵, 5×10¹⁵, 6×10¹⁵, 7×10¹⁵, 8×10¹⁵, 9×10¹⁵, or 1×10¹⁶ VG/subject.

[0959] In one embodiment, delivery of compositions in accordance with the present invention to cells may comprise a total concentration per subject between about 1×10⁶ VG/kg and about 1×10¹⁶ VG/kg. In some embodiments, delivery may comprise a composition concentration of about 1×10⁶, 2×10⁶, 3×10⁶, 4×10⁶, 5×10⁶, 6×10⁶, 7×10⁶, 8×10⁶, 9×10⁶, 1×10⁷, 2×10⁷, 3×10⁷, 4×10⁷, 5×10⁷, 6×10⁷, 7×10⁷, 8×10⁷, 9×10⁷, 1×10⁸, 2×10⁸, 3×10⁸, 4×10⁸, 5×10⁸, 6×10⁸, 7×10⁸, 8×10⁸, 9×10⁸, 1×10⁹, 2×10⁹, 3×10⁹, 4×10⁹, 5×10⁹, 6×10⁹, 7×10⁹, 8×10⁹, 9×10⁹, 1×10¹⁰, 2×10¹⁰, 3×10¹⁰, 4×10¹⁰, 5×10¹⁰, 6×10¹⁰, 7×10¹⁰, 8×10¹⁰, 9×10¹⁰, 1×10¹¹, 1.1×10¹¹, 1.2×10¹¹, 1.3×10¹¹, 1.4×10¹¹, 1.5×10¹¹, 1.6×10¹¹, 1.7×10¹¹, 1.8×10¹¹, 1.9×10¹¹, 2×10¹¹, 2.1×10¹¹, 2.2×10¹¹, 2.3×10¹¹, 2.4×10¹¹, 2.5×10¹¹, 2.6×10¹¹, 2.7×10¹¹, 2.8×10¹¹, 2.9×10¹¹, 3×10¹¹, 4×10¹¹, 5×10¹¹, 6×10¹¹, 7×10¹¹, 7.1×10¹¹, 7.2×10¹¹, 7.3×10¹¹, 7.4×10¹¹, 7.5×10¹¹, 7.6×10¹¹, 7.7×10¹¹, 7.8×10¹¹, 7.9×10¹¹, 8×10¹¹, 9×10¹¹, 1×10¹², 1.1×10¹², 1.2×10¹², 1.3×10¹², 1.4×10¹², 1.5×10¹², 1.6×10¹², 1.7×10¹², 1.8×10¹², 1.9×10¹², 2×10¹², 2.1×10¹², 2.2×10¹², 2.3×10¹², 2.4×10¹², 2.5×10¹², 2.6×10¹², 2.7×10¹², 2.8×10¹², 2.9×10¹², 3×10¹², 3.1×10¹², 3.2×10¹², 3.3×10¹², 3.4×10¹², 3.5×10¹², 3.6×10¹², 3.7×10¹², 3.8×10¹², 3.9×10¹², 4×10¹², 4.1×10¹², 4.2×10¹², 4.3×10¹², 4.4×10¹², 4.5×10¹², 4.6×10¹², 4.7×10¹², 4.8×10¹², 4.9×10¹², 5×10¹², 6×10¹², 6.1×10¹², 6.2×10¹², 6.3×10¹², 6.4×10¹², 6.5×10¹², 6.6×10¹², 6.7×10¹², 6.8×10¹², 6.9×10¹², 7×10¹², 8×10¹², 8.1×10¹², 8.2×10¹², 8.3×10¹², 8.4×10¹², 8.5×10¹², 8.6×10¹², 8.7×10¹², 8.8×10¹², 8.9×10¹², 9×10¹², 1×10¹³, 1.1×10¹³, 1.2×10¹³, 1.3×10¹³, 1.4×10¹³, 1.5×10¹³, 1.6×10¹³, 1.7×10¹³, 1.8×10¹³, 1.9×10¹³, 2×10¹³, 3×10¹³, 4×10¹³, 5×10¹³, 6×10¹³, 6.7×10¹³, 7×10¹³, 8×10¹³, 9×10¹³, 1×10¹⁴, 2×10¹⁴, 3×10¹⁴, 4×10¹⁴, 5×10¹⁴, 6×10¹⁴, 7×10¹⁴, 8×10¹⁴, 9×10¹⁴, 1×10¹⁵, 2×10¹⁵, 3×10¹⁵, 4×10¹⁵, 5×10¹⁵, 6×10¹⁵, 7×10¹⁵, 8×10¹⁵, 9×10¹⁵, or 1×10¹⁶ VG/kg.

[0960] In one embodiment, about 10⁵ to 10⁶ viral genome (unit) may be administered per dose.

[0961] In one embodiment, delivery of the compositions in accordance with the present invention to cells may comprise a total concentration between about 1×10⁶ VG/mL and about 1×10¹⁶ VG/mL. In some embodiments, delivery may comprise a composition concentration of about 1×10⁶, 2×10⁶, 3×10⁶, 4×10⁶, 5×10⁶, 6×10⁶, 7×10⁶, 8×10⁶, 9×10⁶, 1×10⁷, 2×10⁷, 3×10⁷, 4×10⁷, 5×10⁷, 6×10⁷, 7×10⁷, 8×10⁷, 9×10⁷, 1×10⁸, 2×10⁸, 3×10⁸, 4×10⁸, 5×10⁸, 6×10⁸, 7×10⁸, 8×10⁸, 9×10⁸, 1×10⁹, 2×10⁹, 3×10⁹, 4×10⁹, 5×10⁹, 6×10⁹, 7×10⁹, 8×10⁹, 9×10⁹, 1×10¹⁰, 2×10¹⁰, 3×10¹⁰, 4×10¹⁰, 5×10¹⁰, 6×10¹⁰, 7×10¹⁰, 8×10¹⁰, 9×10¹⁰, 1×10¹¹, 1.1×10¹¹, 1.2×10¹¹, 1.3×10¹¹, 1.4×10¹¹, 1.5×10¹¹, 1.6×10¹¹, 1.7×10¹¹, 1.8×10¹¹, 1.9×10¹¹, 2×10¹¹, 3×10¹¹, 4×10¹¹, 5×10¹¹, 6×10¹¹, 7×10¹¹, 8×10¹¹, 9×10¹¹, 1×10¹², 1.1×10¹², 1.2×10¹², 1.3×10¹², 1.4×10¹², 1.5×10¹², 1.6×10¹², 1.7×10¹², 1.8×10¹², 1.9×10¹², 2×10¹², 2.1×10¹², 2.2×10¹², 2.3×10¹², 2.4×10¹², 2.5×10¹², 2.6×10¹², 2.7×10¹², 2.8×10¹², 2.9×10¹², 3×10¹², 3.1×10¹², 3.2×10¹², 3.3×10¹², 3.4×10¹², 3.5×10¹², 3.6×10¹², 3.7×10¹², 3.8×10¹², 3.9×10¹², 4×10¹², 4.1×10¹², 4.2×10¹², 4.3×10¹², 4.4×10¹², 4.5×10¹², 4.6×10¹², 4.7×10¹², 4.8×10¹², 4.9×10¹², 5×10¹², 6×10¹², 6.1×10¹², 6.2×10¹², 6.3×10¹², 6.4×10¹², 6.5×10¹², 6.6×10¹², 6.7×10¹², 6.8×10¹², 6.9×10¹², 7×10¹², 8×10¹², 9×10¹², 1×10¹³, 1.1×10¹³, 1.2×10¹³, 1.3×10¹³, 1.4×10¹³, 1.5×10¹³, 1.6×10¹³, 1.7×10¹³, 1.8×10¹³, 1.9×10¹³, 2×10¹³, 3×10¹³, 4×10¹³, 5×10¹³, 6×10¹³, 6.7×10¹³, 7×10¹³, 8×10¹³, 9×10¹³, 1×10¹⁴, 2×10¹⁴, 3×10¹⁴, 4×10¹⁴, 5×10¹⁴, 6×10¹⁴, 7×10¹⁴, 8×10¹⁴, 9×10¹⁴, 1×10¹⁵, 2×10¹⁵, 3×10¹⁵, 4×10¹⁵, 5×10¹⁵, 6×10¹⁵, 7×10¹⁵, 8×10¹⁵, 9×10¹⁵, or 1×10¹⁶ VG/mL.

[0962] In certain embodiments, the desired siRNA duplex dosage may be delivered using multiple administrations (e.g., two, three, four, five, six, seven, eight, nine, ten, eleven, twelve, thirteen, fourteen, or more administrations). When multiple administrations are employed, split dosing regimens such as those described herein may be used. As used herein, a “split dose” is the division of single unit dose or total daily dose into two or more doses, e.g., two or more administrations of the single unit dose. As used herein, a “single unit dose” is a dose of any modulatory polynucleotide therapeutic administered in one dose/at one time/single route/single point of contact, i.e., single administration event. As used herein, a “total daily dose” is an amount given or prescribed in a 24 hour period. It may be administered as a single unit dose. In one embodiment, the AAV particles comprising the modulatory polynucleotides of the present invention are administered to a subject in split doses. They may be formulated in buffer only or in a formulation described herein.

[0963] In one embodiment, the dose, concentration and/or volume of the composition described herein may be adjusted depending on the contribution of the caudate or putamen to cortical and subcortical distribution after administration. The administration may be intracerebroventricular, intraputamenal, intrathalamic, intraparenchymal, subpial, and/or intrathecal administration.

[0964] In one embodiment, the dose, concentration and/or volume of the composition described herein may be adjusted depending on the cortical and neuraxial distribution following administration by intracerebroventricular, intraputamenal, intrathalamic, intraparenchymal, subpial, and/or intrathecal delivery.

### IV. Methods and Uses of the Compositions of the Invention

### Huntington's Disease (HD)

[0965] Huntington's Disease (HD) is a monogenic fatal neurodegenerative disease characterized by progressive chorea, neuropsychiatric and cognitive dysfunction. Huntington's disease is known to be caused by an autosomal dominant triplet (CAG) repeat expansion in the huntingtin (HTT) gene, which encodes poly-glutamine at the N-terminus of the HTT protein. This repeat expansion results in a toxic gain of function of HTT and ultimately leads to striatal neurodegeneration which progresses to widespread brain atrophy. Medium spiny neurons of the striatum appear to be especially vulnerable in HD with up to 95% loss, whereas interneurons are largely spared.

[0966] Huntington's Disease has a profound impact on quality of life. Symptoms typically appear between the ages of 35-44 and life expectancy subsequent to onset is 10-25 years. In a small percentage of the HD population (˜6%), disease onset occurs prior to the age of 21 with appearance of an akinetic-rigid syndrome. These cases tend to progress faster than those of the later onset variety and have been classified as juvenile or Westphal variant HD. It is estimated that approximately 35,000-70,000 patients are currently suffering from HD in the US and Europe. Currently, only symptomatic relief and supportive therapies are available for treatment of HD, with a cure yet to be identified. Ultimately, individuals with HD succumb to pneumonia, heart failure or other complications such as physical injury from falls.

[0967] While not wishing to be bound by theory, the function of the wild type HTT protein may serve as a scaffold to coordinate complexes of other proteins. HTT is a very large protein (67 exons, 3144 amino acids, ˜350 kDa) that undergoes extensive post-translational modification and has numerous sites for interaction with other proteins, particularly at its N-terminus (coincidently the region that carries the repeats in HD). HTT localizes primarily to the cytoplasm but has been shown to shuttle into the nucleus where it may regulate gene transcription. It has also been suggested that HTT has a role in vesicular transport and regulating RNA trafficking.

[0968] As a non-limiting example, the HTT nucleic acid sequence is SEQ ID NO: 1163 (NCBI NM_002111.7).

[0969] The mechanisms by which CAG-expanded HTT disrupts normal HTT function and results in neurotoxicity were initially thought to be a disease of haploinsufficiency, this theory was disproven when terminal deletion of the HTT gene in man did not lead to development of HD, suggesting that fully expressed HTT protein is not critical to survival. However, conditional knockout of HTT in mouse led to neurodegeneration, indicating that some amount of HTT is necessary for cell survival. Huntingtin protein is expressed in all cells, though its concentration is highest in the brain where large aggregates of abnormal HTT are found in neuronal nuclei. In the brains of HD patients, HTT aggregates into abnormal nuclear inclusions. It is now believed that it is this process of misfolding and aggregating along with the associated protein intermediates (i.e. the soluble species and toxic N-terminal fragments) that result in neurotoxicity. In fact, HD belongs to a family of nine additional human genetic disorders all of which are characterized by CAG-expanded genes and resultant polyglutamine (poly-Q) protein products with subsequent formation of intraneuronal aggregates. Interestingly, in all of these diseases the length of the expansion correlates with both age of onset and rate of disease progression, with longer expansions linked to greater severity of disease.

[0970] Hypotheses on the molecular mechanisms underlying the neurotoxicity of CAG-expanded HTT and its resultant aggregates have been wide ranging, but include, caspase activation, dysregulation of transcriptional pathways, increased production of reactive oxygen species, mitochondrial dysfunction, disrupted axonal transport and/or inhibition of protein degradation systems within the cell. CAG-expanded HTT may not only have a toxic gain of function, but also exert a dominant negative effect by interfering with the normal function of other cellular proteins and processes. HTT has also been implicated in non-cell autonomous neurotoxicity, whereby a cell hosting HTT spreads the HTT to other neurons nearby.

[0971] In one embodiment, a subject has fully penetrant HD where the HTT gene has 41 or more CAG repeats (e.g., 41, 42, 43, 44, 45, 46, 47, 48, 49, 50, 51, 52, 53, 54, 55, 56, 57, 58, 59, 60, 61, 62, 63, 64, 65, 66, 67, 68, 69, 70, 71, 72, 73, 74, 75, 76, 77, 78, 79, 80, 81, 82, 83, 84, 85, 86, 87, 88, 89, 90 or more than 90 CAG repeats).

[0972] In one embodiment, a subject has incomplete penetrance where the HTT gene has between 36 and 40 CAG repeats (e.g., 36, 37, 38, 39 and 40 CAG repeats).

[0973] Symptoms of HD may include features attributed to CNS degeneration such as, but are not limited to, chorea, dystonia, bradykinesia, incoordination, irritability and depression, problem solving difficulties, reduction in the ability of a person to function in their normal day to day life, diminished speech, and difficulty swallowing, as well as features not attributed to CNS degeneration such as, but not limited to, weight loss, muscle wasting, metabolic dysfunction and endocrine disturbances.

[0974] Model systems for studying Huntington's Disease which may be used with the modulatory polynucleotides and AAV particles described herein include, but are not limited to, cell models (e.g., primary neurons and induced pluripotent stem cells), invertebrate models (e.g., drosophila or Caenorhabditis elegans), mouse models (e.g., YAC128 mouse model; R6/2 mouse model; BAC, YAC and knock-in mouse model), rat models (e.g., BAC) and large mammal models (e.g., pigs, sheep or monkeys).

[0975] Studies in animal models of HD have suggested that phenotypic reversal is feasible, for example, subsequent to gene shut off in regulated-expression models. In a mouse model allowing shut off of expression of a 94-polyglutamine repeat HTT protein, not only was the clinical syndrome reversed but also the intracellular aggregates were resolved. Further, animal models in which silencing of HTT was tested, demonstrated promising results with the therapy being both well tolerated and showing potential therapeutic benefit.

[0976] Such siRNA mediated HTT expression inhibition may be used for treating HD. According to the present invention, methods for treating and/or ameliorating HD in a patient comprises administering to the patient an effective amount of AAV particles comprising a nucleic acid sequence encoding the siRNA molecules of the present invention into cells. The administration of the AAV particles comprising such a nucleic acid sequence will encode the siRNA molecules which cause the inhibition/silence of HTT gene expression.

[0977] In one embodiment, the AAV particles described herein may be used to reduce the amount of HTT in a subject in need thereof and thus provides a therapeutic benefit as described herein.

[0978] In certain aspects, the symptoms of HD include behavioral difficulties and symptoms such as, but not limited to, apathy or lack of initiative, dysphoria, irritability, agitation or anxiety, poor self-care, poor judgment, inflexibility, disinhibition, depression, suicidal ideation euphoria, aggression, delusions, compulsions, hypersexuality, hallucinations, speech deterioration, slurred speech, difficulty swallowing, weight loss, cognitive dysfunction which impairs executive functions (e.g., organizing, planning, checking or adapting alternatives, and delays in the acquisition of new motor skills), unsteady gait and involuntary movements (chorea). In other aspects, the composition of the present invention is applied to one or both of the brain and the spinal cord. In one embodiment, the survival of the subject is prolonged by treating any of the symptoms of HD described herein.

[0979] Disclosed in the present invention are methods for treating Huntington's Disease (HD) associated with HTT protein in a subject in need of treatment. The method optionally comprises administering to the subject a therapeutically effective amount of a composition comprising at least AAV particles comprising a nucleic acid sequence encoding the siRNA molecules of the present invention. As a non-limiting example, the siRNA molecules can silence HTT gene expression, inhibit HTT protein production, and reduce one or more symptoms of HD in the subject such that HD is therapeutically treated.

### Methods of Treatment of Huntington's Disease

[0980] The present invention provides AAV particles comprising modulatory polynucleotides encoding siRNA molecules targeting the HTT gene, and methods for their design and manufacture. While not wishing to be bound by a single theory of operability, the invention provides modulatory polynucleotides, including siRNAs, that interfere with HTT expression, including HTT mutant and/or wild-type HTT gene expression. Particularly, the present invention employs viral genomes such as adeno-associated viral (AAV) viral genomes comprising modulatory polynucleotide sequences encoding the siRNA molecules of the present invention. The AAV particles comprising the modulatory polynucleotides encoding the siRNA molecules of the present invention may increase the delivery of active agents into neurons of interest such as medium spiny neurons of the striatum and cortical neurons. The siRNA duplexes or encoded dsRNA targeting the HTT gene may be able to inhibit HTT gene expression (e.g., mRNA level) significantly inside cells; therefore, reducing HTT expression induced stress inside the cells such as aggregation of protein and formation of inclusions, increased free radicals, mitochondrial dysfunction and RNA metabolism.

[0981] Provided in the present invention are methods for introducing the AAV particles comprising a modulatory polynucleotide sequence encoding the siRNA molecules of the present invention into cells, the method comprising introducing into said cells any of the AAV particles in an amount sufficient for degradation of target HTT mRNA to occur, thereby activating target-specific RNAi in the cells. In some aspects, the cells may be stem cells, neurons such as medium spiny or cortical neurons, muscle cells and glial cells such as astrocytes.

[0982] In some embodiments, the present invention provides methods for treating or ameliorating Huntington's Disease (HD) by administering to a subject in need thereof a therapeutically effective amount of a plasmid or AAV particle described herein.

[0983] In some embodiments, the AAV particles comprising modulatory polynucleotides encoding the siRNA molecules of the present invention may be used to treat and/or ameliorate for HD.

[0984] In one embodiment, the AAV particles comprising modulatory polynucleotides encoding the siRNA molecules of the present invention may be used to reduce the cognitive and/or motor decline of a subject with HD, where the amount of decline is determined by a standard evaluation system such as, but not limited to, Unified Huntington's Disease Ratings Scale (UHDRS) and subscores, and cognitive testing.

[0985] In one embodiment, the AAV particles comprising modulatory polynucleotides encoding the siRNA molecules of the present invention may be used to reduce the decline of functional capacity and activities of daily living as measured by a standard evaluation system such as, but not limited to, the total functional capacity (TFC) scale.

[0986] In some embodiments, the present invention provides methods for treating, or ameliorating Huntington's Disease associated with HTT gene and/or HTT protein in a subject in need of treatment, the method comprising administering to the subject a pharmaceutically effective amount of AAV particles comprising modulatory polynucleotides encoding at least one siRNA duplex targeting the HTT gene, inhibiting HTT gene expression and protein production, and ameliorating symptoms of HD in the subject.

[0987] In one embodiment, the AAV particles of the present invention may be used as a method of treating Huntington's disease in a subject in need of treatment. Any method known in the art for defining a subject in need of treatment may be used to identify said subject(s). A subject may have a clinical diagnosis of Huntington's disease, or may be pre-symptomatic. Any known method for diagnosing HD may be utilized, including, but not limited to, cognitive assessments and/or neurological or neuropsychiatric examinations, motor tests, sensory tests, psychiatric evaluations, brain imaging, family history and/or genetic testing.

[0988] In one embodiment, HD subject selection is determined with the use of the Prognostic Index for Huntington's Disease, or a derivative thereof (Long J D et al., Movement Disorders, 2017, 32(2), 256-263, the contents of which are herein incorporated by reference in their entirety). This prognostic index uses four components to predict probability of motor diagnosis, (1) total motor score (TMS) from the Unified Huntington's Disease Rating Scale (UHDRS), (2) Symbol Digit Modality Test (SDMT), (3) base-line age, and (4) cytosine-adenine-guanine (CAG) expansion.

[0989] In one embodiment, the prognostic index for Huntington's Disease is calculated with the following formula: PI_{HD}=51×TMS+(−34)×SDMT+7×Age×(CAG-34), wherein larger values for PI_{HD} indicate greater risk of diagnosis or onset of symptoms.

[0990] In another embodiment, the prognostic index for Huntington's Disease is calculated with the following normalized formula that gives standard deviation units to be interpreted in the context of 50% 10-year survival: PIN_{HD}=(PI_{ID}−883)/1044, wherein PIN_{HD}<0 indicates greater than 50% 10-year survival, and PIN_{HD}>0 suggests less than 50% 10-year survival.

[0991] In one embodiment, the prognostic index may be used to identify subjects whom will develop symptoms of HD within several years, but that do not yet have clinically diagnosable symptoms. Further, these asymptomatic patients may be selected for and receive treatment using the AAV particles and compositions of the present invention during the asymptomatic period.

[0992] In one embodiment, the AAV particles may be administered to a subject who has undergone biomarker assessment. Potential biomarkers in blood for premanifest and early progression of HD include, but are not limited to, 8-OhdG oxidative stress marker, metabolic markers (e.g., creatine kinase, branched-chain amino acids), cholesterol metabolites (e.g., 24-OH cholesterol), immune and inflammatory proteins (e.g., clusterin, complement components, interleukins 6 and 8), gene expression changes (e.g., transcriptomic markers), endocrine markers (e.g., cortisol, ghrelin and leptin), BDNF, adenosine 2A receptors. Potential biomarkers for brain imaging for premanifest and early progression of HD include, but are not limited to, striatal volume, subcortical white-matter volume, cortical thickness, whole brain and ventricular volumes, functional imaging (e.g., functional MRI), PET (e.g., with fluorodeoxyglucose), and magnetic resonance spectroscopy (e.g., lactate). Potential biomarkers for quantitative clinical tools for premanifest and early progression of HD include, but are not limited to, quantitative motor assessments, motor physiological assessments (e.g., transcranial magnetic stimulation), and quantitative eye movement measurements. Non-limiting examples of quantitative clinical biomarker assessments include tongue force variability, metronome-guided tapping, grip force, oculomotor assessments and cognitive tests. Non-limiting examples of multicenter observational studies include PREDICT-HD and TRACK-HD. A subject may have symptoms of HD, diagnosed with HD or may be asymptomatic for HD.

[0993] In one embodiment, the AAV particles may be administered to a subject who has undergone biomarker assessment using neuroimaging. A subject may have symptoms of HD, diagnosed with HD or may be asymptomatic for HD.

[0994] In one embodiment, the AAV particles may be administered to a subject who is asymptomatic for HD. A subject may be asymptomatic but may have undergone predictive genetic testing or biomarker assessment to determine if they are at risk for HD and/or a subject may have a family member (e.g., mother, father, brother, sister, aunt, uncle, grandparent) who has been diagnosed with HD.

[0995] In one embodiment, the AAV particles may be administered to a subject who is in the early stages of HD. In the early stage a subject has subtle changes in coordination, some involuntary movements (chorea), changes in mood such as irritability and depression, problem solving difficulties, reduction in the ability of a person to function in their normal day to day life.

[0996] In one embodiment, the AAV particles may be administered to a subject who is in the middle stages of HD. In the middle stage a subject has an increase in the movement disorder, diminished speech, difficulty swallowing, and ordinary activities will become harder to do. At this stage a subject may have occupational and physical therapists to help maintain control of voluntary movements and a subject may have a speech language pathologist.

[0997] In one embodiment, the AAV particles may be administered to a subject who is in the late stages of HD. In the late stage, a subject with HD is almost completely or completely dependent on others for care as the subject can no longer walk and is unable to speak. A subject can generally still comprehend language and is aware of family and friends but choking is a major concern.

[0998] In one embodiment, the AAV particles may be used to treat a subject who has the juvenile form of HD which is the onset of HD before the age of 20 years and as early as 2 years.

[0999] In one embodiment, the AAV particles may be used to treat a subject with HD who has fully penetrant HD where the HTT gene has 41 or more CAG repeats (e.g., 41, 42, 43, 44, 45, 46, 47, 48, 49, 50, 51, 52, 53, 54, 55, 56, 57, 58, 59, 60, 61, 62, 63, 64, 65, 66, 67, 68, 69, 70, 71, 72, 73, 74, 75, 76, 77, 78, 79, 80, 81, 82, 83, 84, 85, 86, 87, 88, 89, 90 or more than 90 CAG repeats).

[1000] In one embodiment, the AAV particles may be used to treat a subject with HD who has incomplete penetrance where the HTT gene has between 36 and 40 CAG repeats (e.g., 36, 37, 38, 39 and 40 CAG repeats).

[1001] In some embodiments, the composition comprising the AAV particles comprising modulatory polynucleotides encoding the siRNA molecules of the present invention is administered to the central nervous system of the subject. In other embodiments, the composition comprising the AAV particles comprising modulatory polynucleotides encoding the siRNA molecules of the present invention is administered to a tissue of a subject (e.g., brain of the subject).

[1002] In one embodiment, the AAV particles comprising modulatory polynucleotides encoding the siRNA molecules of the present invention may be delivered into specific types of targeted cells, including, but not limited to, neurons including medium spiny or cortical neurons; glial cells including oligodendrocytes, astrocytes and microglia; and/or other cells surrounding neurons such as T cells.

[1003] In one embodiment, the AAV particles comprising modulatory polynucleotides encoding the siRNA molecules of the present invention may be delivered to neurons in the striatum and/or neurons of the cortex.

[1004] In some embodiments, the composition of the present invention for treating HD is administered to the subject in need intravenously, intramuscularly, subcutaneously, intraperitoneally, intraparenchymally, subpially, intrathecally and/or intraventricularly, allowing the siRNA molecules or vectors comprising the siRNA molecules to pass through one or both the blood-brain barrier and the blood spinal cord barrier, or directly access the brain and/or spinal cord. In some aspects, the method includes administering (e.g., intraparenchymal administration, subpial administration, intraventricular administration and/or intrathecal administration) directly to the central nervous system (CNS) of a subject (using, e.g., an infusion pump and/or a delivery scaffold) a therapeutically effective amount of a composition comprising AAV particles encoding the nucleic acid sequence for the siRNA molecules of the present invention. The vectors may be used to silence or suppress HTT gene expression, and/or reducing one or more symptoms of HD in the subject such that HD is therapeutically treated.

[1005] In some embodiments, the siRNA molecules or the AAV particles comprising such siRNA molecules may be introduced directly into the central nervous system of the subject, for example, by infusion to the white matter a subject. While not wishing to be bound by theory, distribution via direct white matter infusion may be independent of axonal transport mechanisms which may be impaired in subjects with Huntington's Disease which means white matter infusion may allow for more transport of the AAV particles.

[1006] In one embodiment, the composition comprising the AAV particles comprising modulatory polynucleotides encoding the siRNA molecules of the present invention is administered to the central nervous system of the subject via intraparenchymal injection.

[1007] In one embodiment, the AAV particle composition comprising modulatory polynucleotides encoding the siRNA molecules of the present invention is administered to the central nervous system of the subject via intraparenchymal injection and intrathecal injection.

[1008] In one embodiment, the AAV particle composition comprising modulatory polynucleotides encoding the siRNA molecules of the present invention is administered to the central nervous system of the subject via intraparenchymal injection and intracerebroventricular injection.

[1009] In some embodiments, the composition of the present invention for treating HD is administered to the subject in need by intraparenchymal administration.

[1010] In some embodiments, the AAV particle composition comprising modulatory polynucleotides encoding the siRNA molecules of the present invention may be introduced directly into the central nervous system of the subject, for example, by infusion into the putamen.

[1011] In some embodiments, the AAV particle composition comprising modulatory polynucleotides encoding the siRNA molecules of the present invention may be introduced directly into the central nervous system of the subject, for example, by infusion into the thalamus of a subject. While not wishing to be bound by theory, the thalamus is an area of the brain which is relatively spared in subjects with Huntington's Disease which means it may allow for more widespread cortical transduction via axonal transport of the AAV particles.

[1012] In some embodiments, the AAV particle composition comprising modulatory polynucleotides encoding the siRNA molecules of the present invention may be introduced indirectly into the central nervous system of the subject, for example, by intravenous administration.

### Modulate HTT Expression

[1013] In one embodiment, administration of the AAV particles to a subject will reduce the expression of HTT in a subject and the reduction of expression of the HTT will reduce the effects of HD in a subject.

[1014] In one embodiment, the encoded dsRNA once expressed and contacts a cell expressing HTT protein, inhibits the expression of HTT protein by at least 10%, at least 20%, at least 25%, at least 30%, at least 35% or at least 40% or more, such as when assayed by a method as described herein.

[1015] In one embodiment, administration of the AAV particles comprising a modulatory polynucleotide sequence encoding a siRNA of the invention, to a subject may lower HTT (e.g., mutant HTT, wild-type HTT and/or mutant and wild-type HTT) in a subject. In one embodiment, administration of the AAV particles to a subject may lower wild-type HTT in a subject. In yet another embodiment, administration of the AAV particles to a subject may lower both mutant HTT and wild-type HTT in a subject. The mutant and/or wild-type HTT may be lowered by about 20%, 30%, 40%, 50%, 60%, 70%, 80%, 85%, 90%, 95% and 100%, or at least 20-30%, 20-40%, 20-50%, 20-60%, 20-70%, 20-80%, 20-90%, 20-95%, 20-100%, 30-40%, 30-50%, 30-60%, 30-70%, 30-80%, 30-90%, 30-95%, 30-100%, 40-50%, 40-60%, 40-70%, 40-80%, 40-90%, 40-95%, 40-100%, 50-60%, 50-70%, 50-80%, 50-90%, 50-95%, 50-100%, 60-70%, 60-80%, 60-90%, 60-95%, 60-100%, 70-80%, 70-90%, 70-95%, 70-100%, 80-90%, 80-95%, 80-100%, 90-95%, 90-100% or 95-100% in a subject such as, but not limited to, the CNS, a region of the CNS, or a specific cell of the CNS of a subject. The mutant HTT may be lowered by about 20%, 30%, 40%, 50%, 60%, 70%, 80%, 85%, 90%, 95% and 100%, or at least 20-30%, 20-40%, 20-50%, 20-60%, 20-70%, 20-80%, 20-90%, 20-95%, 20-100%, 30-40%, 30-50%, 30-60%, 30-70%, 30-80%, 30-90%, 30-95%, 30-100%, 40-50%, 40-60%, 40-70%, 40-80%, 40-90%, 40-95%, 40-100%, 50-60%, 50-70%, 50-80%, 50-90%, 50-95%, 50-100%, 60-70%, 60-80%, 60-90%, 60-95%, 60-100%, 70-80%, 70-90%, 70-95%, 70-100%, 80-90%, 80-95%, 80-100%, 90-95%, 90-100% or 95-100% in a subject such as, but not limited to, the CNS, a region of the CNS, or a specific cell of the CNS of a subject. The wild-type HTT may be lowered by about 20%, 30%, 40%, 50%, 60%, 70%, 80%, 85%, 90%, 95% and 100%, or at least 20-30%, 20-40%, 20-50%, 20-60%, 20-70%, 20-80%, 20-90%, 20-95%, 20-100%, 30-40%, 30-50%, 30-60%, 30-70%, 30-80%, 30-90%, 30-95%, 30-100%, 40-50%, 40-60%, 40-70%, 40-80%, 40-90%, 40-95%, 40-100%, 50-60%, 50-70%, 50-80%, 50-90%, 50-95%, 50-100%, 60-70%, 60-80%, 60-90%, 60-95%, 60-100%, 70-80%, 70-90%, 70-95%, 70-100%, 80-90%, 80-95%, 80-100%, 90-95%, 90-100% or 95-100% in a subject such as, but not limited to, the CNS, a region of the CNS, or a specific cell of the CNS of a subject. The mutant and wild-type HTT may be lowered by about 20%, 30%, 40%, 50%, 60%, 70%, 80%, 85%, 90%, 95% and 100%, or at least 20-30%, 20-40%, 20-50%, 20-60%, 20-70%, 20-80%, 20-90%, 20-95%, 20-100%, 30-40%, 30-50%, 30-60%, 30-70%, 30-80%, 30-90%, 30-95%, 30-100%, 40-50%, 40-60%, 40-70%, 40-80%, 40-90%, 40-95%, 40-100%, 50-60%, 50-70%, 50-80%, 50-90%, 50-95%, 50-100%, 60-70%, 60-80%, 60-90%, 60-95%, 60-100%, 70-80%, 70-90%, 70-95%, 70-100%, 80-90%, 80-95%, 80-100%, 90-95%, 90-100% or 95-100% in a subject such as, but not limited to, the CNS, a region of the CNS, or a specific cell of the CNS of a subject. As a non-limiting example, the AAV particles may lower the expression of HTT by at least 50% in the medium spiny neurons. As a non-limiting example, the AAV particles may lower the expression of HTT by at least 40% in the medium spiny neurons. As a non-limiting example, the AAV particles may lower the expression of HTT by at least 40% in the medium spiny neurons of the putamen. As a non-limiting example, the AAV particles may lower the expression of HTT by at least 30% in the medium spiny neurons of the putamen. As yet another non-limiting example, the AAV particles may lower the expression of HTT in the putamen and cortex by at least 40%. As yet another non-limiting example, the AAV particles may lower the expression of HTT in the putamen and cortex by at least 30%. As yet another non-limiting example, the AAV particles may lower the expression of HTT in the putamen by at least 30%. As yet another non-limiting example, the AAV particles may lower the expression of HTT in the putamen by at least 30% and cortex by at least 15%.

[1016] In one embodiment, the AAV particles may be used to reduce the expression of HTT protein by at least about 30%, 31%, 32%, 33%, 34%, 35%, 36%, 37%, 38%, 39%, 40%, 41%, 42%, 43%, 44%, 45%, 46%, 47%, 48%, 49%, 50%, 51%, 52%, 53%, 54%, 55%, 56%, 57%, 58%, 59%, 60%, 61%, 62%, 63%, 64%, 65%, 66%, 67%, 68%, 69%, 70%, 71%, 72%, 73%, 74%, 75%, 76%, 77%, 78%, 79%, 80%, 85%, 90%, 95% and 100%, or at least 20-30%, 20-40%, 20-50%, 20-60%, 20-70%, 20-80%, 20-90%, 20-95%, 20-100%, 30-40%, 30-50%, 30-60%, 30-70%, 30-80%, 30-90%, 30-95%, 30-100%, 40-50%, 40-60%, 40-70%, 40-80%, 40-90%, 40-95%, 40-100%, 50-60%, 50-70%, 50-80%, 50-90%, 50-95%, 50-100%, 55-60%, 55-70%, 55-80%, 55-90%, 55-95%, 55-100%, 60-70%, 60-80%, 60-90%, 60-95%, 60-100%, 70-80%, 70-90%, 70-95%, 70-100%, 80-90%, 80-95%, 80-100%, 90-95%, 90-100% or 95-100%. As a non-limiting example, the expression of HTT protein expression may be reduced by 50-90%. As a non-limiting example, the expression of HTT protein expression may be reduced by 30-70%.

[1017] In one embodiment, the siRNA duplexes or encoded dsRNA may be used to reduce the expression of HTT mRNA by at least about 30%, 31%, 32%, 33%, 34%, 35%, 36%, 37%, 38%, 39%, 40%, 41%, 42%, 43%, 44%, 45%, 46%, 47%, 48%, 49%, 50%, 51%, 52%, 53%, 54%, 55%, 56%, 57%, 58%, 59%, 60%, 61%, 62%, 63%, 64%, 65%, 66%, 67%, 68%, 69%, 70%, 71%, 72%, 73%, 74%, 75%, 76%, 77%, 78%, 79%, 80%, 85%, 90%, 95% and 100%, or at least 20-30%, 20-40%, 20-50%, 20-60%, 20-70%, 20-80%, 20-90%, 20-95%, 20-100%, 30-40%, 30-50%, 30-60%, 30-70%, 30-80%, 30-90%, 30-95%, 30-100%, 40-50%, 40-60%, 40-70%, 40-80%, 40-90%, 40-95%, 40-100%, 50-60%, 50-70%, 50-80%, 50-90%, 50-95%, 50-100%, 55-60%, 55-70%, 55-80%, 55-90%, 55-95%, 55-100%, 60-70%, 60-80%, 60-90%, 60-95%, 60-100%, 70-80%, 70-90%, 70-95%, 70-100%, 80-90%, 80-95%, 80-100%, 90-95%, 90-100% or 95-100%. As a non-limiting example, the expression of HTT mRNA may be reduced 50-90%.

[1018] In one embodiment, the AAV particles may be used to decrease HTT protein in a subject. The decrease may independently be 5%, 10%, 15%, 20%, 25%, 30%, 35%, 40%, 45%, 50%, 55%, 60%, 65%, 70%, 75%, 80%, 85%, 90%, 95%, or more than 95%, 5-15%, 5-20%, 5-25%, 5-30%, 5-35%, 5-40%, 5-45%, 5-50%, 5-55%, 5-60%, 5-65%, 5-70%, 5-75%, 5-80%, 5-85%, 5-90%, 5-95%, 10-20%, 10-25%, 10-30%, 10-35%, 10-40%, 10-45%, 10-50%, 10-55%, 10-60%, 10-65%, 10-70%, 10-75%, 10-80%, 10-85%, 10-90%, 10-95%, 15-25%, 15-30%, 15-35%, 15-40%, 15-45%, 15-50%, 15-55%, 15-60%, 15-65%, 15-70%, 15-75%, 15-80%, 15-85%, 15-90%, 15-95%, 20-30%, 20-35%, 20-40%, 20-45%, 20-50%, 20-55%, 20-60%, 20-65%, 20-70%, 20-75%, 20-80%, 20-85%, 20-90%, 20-95%, 25-35%, 25-40%, 25-45%, 25-50%, 25-55%, 25-60%, 25-65%, 25-70%, 25-75%, 25-80%, 25-85%, 25-90%, 25-95%, 30-40%, 30-45%, 30-50%, 30-55%, 30-60%, 30-65%, 30-70%, 30-75%, 30-80%, 30-85%, 30-90%, 30-95%, 35-45%, 35-50%, 35-55%, 35-60%, 35-65%, 35-70%, 35-75%, 35-80%, 35-85%, 35-90%, 35-95%, 40-50%, 40-55%, 40-60%, 40-65%, 40-70%, 40-75%, 40-80%, 40-85%, 40-90%, 40-95%, 45-55%, 45-60%, 45-65%, 45-70%, 45-75%, 45-80%, 45-85%, 45-90%, 45-95%, 50-60%, 50-65%, 50-70%, 50-75%, 50-80%, 50-85%, 50-90%, 50-95%, 55-65%, 55-70%, 55-75%, 55-80%, 55-85%, 55-90%, 55-95%, 60-70%, 60-75%, 60-80%, 60-85%, 60-90%, 60-95%, 65-75%, 65-80%, 65-85%, 65-90%, 65-95%, 70-80%, 70-85%, 70-90%, 70-95%, 75-85%, 75-90%, 75-95%, 80-90%, 80-95%, or 90-95%. As a non-limiting example, a subject may have a 50% decrease of HTT protein. As a non-limiting example, a subject may have a decrease of 70% of HTT protein and a decrease of 10% of wild type HTT protein. As a non-limiting example, the decrease of HTT in the medium spiny neurons of the putamen may be about 40%. As a non-limiting example, the decrease of HTT in the putamen and cortex may be about 40%. As a non-limiting example, the decrease of HTT in the medium spiny neurons of the putamen may be between 40%-70%. As a non-limiting example, the decrease of HTT in the putamen and cortex may be between 40%-70%.

[1019] In one embodiment, the AAV particles may be used to decrease wild type HTT protein in a subject. The decrease may independently be 5%, 10%, 15%, 20%, 25%, 30%, 35%, 40%, 45%, 50%, 55%, 60%, 65%, 70%, 75%, 80%, 85%, 90%, 95%, or more than 95%, 5-15%, 5-20%, 5-25%, 5-30%, 5-35%, 5-40%, 5-45%, 5-50%, 5-55%, 5-60%, 5-65%, 5-70%, 5-75%, 5-80%, 5-85%, 5-90%, 5-95%, 10-20%, 10-25%, 10-30%, 10-35%, 10-40%, 10-45%, 10-50%, 10-55%, 10-60%, 10-65%, 10-70%, 10-75%, 10-80%, 10-85%, 10-90%, 10-95%, 15-25%, 15-30%, 15-35%, 15-40%, 15-45%, 15-50%, 15-55%, 15-60%, 15-65%, 15-70%, 15-75%, 15-80%, 15-85%, 15-90%, 15-95%, 20-30%, 20-35%, 20-40%, 20-45%, 20-50%, 20-55%, 20-60%, 20-65%, 20-70%, 20-75%, 20-80%, 20-85%, 20-90%, 20-95%, 25-35%, 25-40%, 25-45%, 25-50%, 25-55%, 25-60%, 25-65%, 25-70%, 25-75%, 25-80%, 25-85%, 25-90%, 25-95%, 30-40%, 30-45%, 30-50%, 30-55%, 30-60%, 30-65%, 30-70%, 30-75%, 30-80%, 30-85%, 30-90%, 30-95%, 35-45%, 35-50%, 35-55%, 35-60%, 35-65%, 35-70%, 35-75%, 35-80%, 35-85%, 35-90%, 35-95%, 40-50%, 40-55%, 40-60%, 40-65%, 40-70%, 40-75%, 40-80%, 40-85%, 40-90%, 40-95%, 45-55%, 45-60%, 45-65%, 45-70%, 45-75%, 45-80%, 45-85%, 45-90%, 45-95%, 50-60%, 50-65%, 50-70%, 50-75%, 50-80%, 50-85%, 50-90%, 50-95%, 55-65%, 55-70%, 55-75%, 55-80%, 55-85%, 55-90%, 55-95%, 60-70%, 60-75%, 60-80%, 60-85%, 60-90%, 60-95%, 65-75%, 65-80%, 65-85%, 65-90%, 65-95%, 70-80%, 70-85%, 70-90%, 70-95%, 75-85%, 75-90%, 75-95%, 80-90%, 80-95%, or 90-95%. As a non-limiting example, a subject may have a 50% decrease of wild type HTT protein. As a non-limiting example, the decrease of wild type HTT in the medium spiny neurons of the putamen may be about 40%. As a non-limiting example, the decrease of wild type HTT in the putamen and cortex may be about 40%. As a non-limiting example, the decrease of wild type HTT in the medium spiny neurons of the putamen may be between 40%-70%. As a non-limiting example, the decrease of wild type HTT in the putamen and cortex may be between 40%-70%.

[1020] In one embodiment, the AAV particles may be used to decrease mutant HTT protein in a subject. The decrease may independently be 5%, 10%, 15%, 20%, 25%, 30%, 35%, 40%, 45%, 50%, 55%, 60%, 65%, 70%, 75%, 80%, 85%, 90%, 95%, or more than 95%, 5-15%, 5-20%, 5-25%, 5-30%, 5-35%, 5-40%, 5-45%, 5-50%, 5-55%, 5-60%, 5-65%, 5-70%, 5-75%, 5-80%, 5-85%, 5-90%, 5-95%, 10-20%, 10-25%, 10-30%, 10-35%, 10-40%, 10-45%, 10-50%, 10-55%, 10-60%, 10-65%, 10-70%, 10-75%, 10-80%, 10-85%, 10-90%, 10-95%, 15-25%, 15-30%, 15-35%, 15-40%, 15-45%, 15-50%, 15-55%, 15-60%, 15-65%, 15-70%, 15-75%, 15-80%, 15-85%, 15-90%, 15-95%, 20-30%, 20-35%, 20-40%, 20-45%, 20-50%, 20-55%, 20-60%, 20-65%, 20-70%, 20-75%, 20-80%, 20-85%, 20-90%, 20-95%, 25-35%, 25-40%, 25-45%, 25-50%, 25-55%, 25-60%, 25-65%, 25-70%, 25-75%, 25-80%, 25-85%, 25-90%, 25-95%, 30-40%, 30-45%, 30-50%, 30-55%, 30-60%, 30-65%, 30-70%, 30-75%, 30-80%, 30-85%, 30-90%, 30-95%, 35-45%, 35-50%, 35-55%, 35-60%, 35-65%, 35-70%, 35-75%, 35-80%, 35-85%, 35-90%, 35-95%, 40-50%, 40-55%, 40-60%, 40-65%, 40-70%, 40-75%, 40-80%, 40-85%, 40-90%, 40-95%, 45-55%, 45-60%, 45-65%, 45-70%, 45-75%, 45-80%, 45-85%, 45-90%, 45-95%, 50-60%, 50-65%, 50-70%, 50-75%, 50-80%, 50-85%, 50-90%, 50-95%, 55-65%, 55-70%, 55-75%, 55-80%, 55-85%, 55-90%, 55-95%, 60-70%, 60-75%, 60-80%, 60-85%, 60-90%, 60-95%, 65-75%, 65-80%, 65-85%, 65-90%, 65-95%, 70-80%, 70-85%, 70-90%, 70-95%, 75-85%, 75-90%, 75-95%, 80-90%, 80-95%, or 90-95%. As a non-limiting example, a subject may have a 50% decrease of mutant HTT protein. As a non-limiting example, the decrease of mutant HTT in the medium spiny neurons of the putamen may be about 40%. As a non-limiting example, the decrease of mutant HTT in the putamen and cortex may be about 40%. As a non-limiting example, the decrease of mutant HTT in the medium spiny neurons of the putamen may be between 40%-70%. As a non-limiting example, the decrease of mutant HTT in the putamen and cortex may be between 40%-70%.\

[1021] In some embodiments, the present invention provides methods for inhibiting/silencing HTT gene expression in a cell. Accordingly, the siRNA duplexes or encoded dsRNA can be used to substantially inhibit HTT gene expression in a cell, in particular in a neuron. In some aspects, the inhibition of HTT gene expression refers to an inhibition by at least about 20%, such as by at least about 30%, 31%, 32%, 33%, 34%, 35%, 36%, 37%, 38%, 39%, 40%, 41%, 42%, 43%, 44%, 45%, 46%, 47%, 48%, 49%, 50%, 51%, 52%, 53%, 54%, 55%, 56%, 57%, 58%, 59%, 60%, 61%, 62%, 63%, 64%, 65%, 66%, 67%, 68%, 69%, 70%, 71%, 72%, 73%, 74%, 75%, 76%, 77%, 78%, 79%, 80%, 85%, 90%, 95% and 100%, or at least 20-30%, 20-40%, 20-50%, 20-60%, 20-70%, 20-80%, 20-90%, 20-95%, 20-100%, 30-40%, 30-50%, 30-60%, 30-70%, 30-80%, 30-90%, 30-95%, 30-100%, 40-50%, 40-60%, 40-70%, 40-80%, 40-90%, 40-95%, 40-100%, 50-60%, 50-70%, 50-80%, 50-90%, 50-95%, 50-100%, 55-60%, 55-70%, 55-80%, 55-90%, 55-95%, 55-100%, 60-70%, 60-80%, 60-90%, 60-95%, 60-100%, 70-80%, 70-90%, 70-95%, 70-100%, 80-90%, 80-95%, 80-100%, 90-95%, 90-100% or 95-100%. Accordingly, the protein product of the targeted gene may be inhibited by at least about 20%, preferably by at least about 30%, 31%, 32%, 33%, 34%, 35%, 36%, 37%, 38%, 39%, 40%, 41%, 42%, 43%, 44%, 45%, 46%, 47%, 48%, 49%, 50%, 51%, 52%, 53%, 54%, 55%, 56%, 57%, 58%, 59%, 60%, 61%, 62%, 63%, 64%, 65%, 66%, 67%, 68%, 69%, 70%, 71%, 72%, 73%, 74%, 75%, 76%, 77%, 78%, 79%, 80%, 85%, 90%, 95% and 100%, or at least 20-30%, 20-40%, 20-50%, 20-60%, 20-70%, 20-80%, 20-90%, 20-95%, 20-100%, 30-40%, 30-50%, 30-60%, 30-70%, 30-80%, 30-90%, 30-95%, 30-100%, 40-50%, 40-60%, 40-70%, 40-80%, 40-90%, 40-95%, 40-100%, 50-60%, 50-70%, 50-80%, 50-90%, 50-95%, 50-100%, 60-70%, 60-80%, 60-90%, 60-95%, 60-100%, 70-80%, 70-90%, 70-95%, 70-100%, 80-90%, 80-95%, 80-100%, 90-95%, 90-100% or 95-100%.

[1022] In some embodiments, the present invention provides methods for inhibiting/silencing HTT gene expression in a cell, in particular in a medium spiny neuron. In some aspects, the inhibition of HTT gene expression refers to an inhibition by at least about 20%, such as by at least about 30%, 31%, 32%, 33%, 34%, 35%, 36%, 37%, 38%, 39%, 40%, 41%, 42%, 43%, 44%, 45%, 46%, 47%, 48%, 49%, 50%, 51%, 52%, 53%, 54%, 55%, 56%, 57%, 58%, 59%, 60%, 61%, 62%, 63%, 64%, 65%, 66%, 67%, 68%, 69%, 70%, 71%, 72%, 73%, 74%, 75%, 76%, 77%, 78%, 79%, 80%, 85%, 90%, 95% and 100%, or at least 20-30%, 20-40%, 20-50%, 20-60%, 20-70%, 20-80%, 20-90%, 20-95%, 20-100%, 30-40%, 30-50%, 30-60%, 30-70%, 30-80%, 30-90%, 30-95%, 30-100%, 40-50%, 40-60%, 40-70%, 40-80%, 40-90%, 40-95%, 40-100%, 50-60%, 50-70%, 50-80%, 50-90%, 50-95%, 50-100%, 55-60%, 55-70%, 55-80%, 55-90%, 55-95%, 55-100%, 60-70%, 60-80%, 60-90%, 60-95%, 60-100%, 70-80%, 70-90%, 70-95%, 70-100%, 80-90%, 80-95%, 80-100%, 90-95%, 90-100% or 95-100%. Accordingly, the protein product of the targeted gene may be inhibited by at least about 20%, preferably by at least about 30%, 31%, 32%, 33%, 34%, 35%, 36%, 37%, 38%, 39%, 40%, 41%, 42%, 43%, 44%, 45%, 46%, 47%, 48%, 49%, 50%, 51%, 52%, 53%, 54%, 55%, 56%, 57%, 58%, 59%, 60%, 61%, 62%, 63%, 64%, 65%, 66%, 67%, 68%, 69%, 70%, 71%, 72%, 73%, 74%, 75%, 76%, 77%, 78%, 79%, 80%, 85%, 90%, 95% and 100%, or at least 20-30%, 20-40%, 20-50%, 20-60%, 20-70%, 20-80%, 20-90%, 20-95%, 20-100%, 30-40%, 30-50%, 30-60%, 30-70%, 30-80%, 30-90%, 30-95%, 30-100%, 40-50%, 40-60%, 40-70%, 40-80%, 40-90%, 40-95%, 40-100%, 50-60%, 50-70%, 50-80%, 50-90%, 50-95%, 50-100%, 55-60%, 55-70%, 55-80%, 55-90%, 55-95%, 55-100%, 60-70%, 60-80%, 60-90%, 60-95%, 60-100%, 70-80%, 70-90%, 70-95%, 70-100%, 80-90%, 80-95%, 80-100%, 90-95%, 90-100% or 95-100%.

[1023] In some embodiments, the present invention provides methods for inhibiting/silencing HTT gene expression in a cell, in particular in an astrocyte. In some aspects, the inhibition of HTT gene expression refers to an inhibition by at least about 20%, such as by at least about 30%, 31%, 32%, 33%, 34%, 35%, 36%, 37%, 38%, 39%, 40%, 41%, 42%, 43%, 44%, 45%, 46%, 47%, 48%, 49%, 50%, 51%, 52%, 53%, 54%, 55%, 56%, 57%, 58%, 59%, 60%, 61%, 62%, 63%, 64%, 65%, 66%, 67%, 68%, 69%, 70%, 71%, 72%, 73%, 74%, 75%, 76%, 77%, 78%, 79%, 80%, 85%, 90%, 95% and 100%, or at least 20-30%, 20-40%, 20-50%, 20-60%, 20-70%, 20-80%, 20-90%, 20-95%, 20-100%, 30-40%, 30-50%, 30-60%, 30-70%, 30-80%, 30-90%, 30-95%, 30-100%, 40-50%, 40-60%, 40-70%, 40-80%, 40-90%, 40-95%, 40-100%, 50-60%, 50-70%, 50-80%, 50-90%, 50-95%, 50-100%, 55-60%, 55-70%, 55-80%, 55-90%, 55-95%, 55-100%, 60-70%, 60-80%, 60-90%, 60-95%, 60-100%, 70-80%, 70-90%, 70-95%, 70-100%, 80-90%, 80-95%, 80-100%, 90-95%, 90-100% or 95-100%. Accordingly, the protein product of the targeted gene may be inhibited by at least about 20%, preferably by at least about 30%, 31%, 32%, 33%, 34%, 35%, 36%, 37%, 38%, 39%, 40%, 41%, 42%, 43%, 44%, 45%, 46%, 47%, 48%, 49%, 50%, 51%, 52%, 53%, 54%, 55%, 56%, 57%, 58%, 59%, 60%, 61%, 62%, 63%, 64%, 65%, 66%, 67%, 68%, 69%, 70%, 71%, 72%, 73%, 74%, 75%, 76%, 77%, 78%, 79%, 80%, 85%, 90%, 95% and 100%, or at least 20-30%, 20-40%, 20-50%, 20-60%, 20-70%, 20-80%, 20-90%, 20-95%, 20-100%, 30-40%, 30-50%, 30-60%, 30-70%, 30-80%, 30-90%, 30-95%, 30-100%, 40-50%, 40-60%, 40-70%, 40-80%, 40-90%, 40-95%, 40-100%, 50-60%, 50-70%, 50-80%, 50-90%, 50-95%, 50-100%, 55-60%, 55-70%, 55-80%, 55-90%, 55-95%, 55-100%, 60-70%, 60-80%, 60-90%, 60-95%, 60-100%, 70-80%, 70-90%, 70-95%, 70-100%, 80-90%, 80-95%, 80-100%, 90-95%, 90-100% or 95-100%.

[1024] In one embodiment, the siRNA duplexes or encoded dsRNA may be used to reduce the expression of HTT protein and/or mRNA in at least one region of the CNS such as, but not limited to the midbrain. The expression of HTT protein and/or mRNA is reduced by at least about 30%, 31%, 32%, 33%, 34%, 35%, 36%, 37%, 38%, 39%, 40%, 41%, 42%, 43%, 44%, 45%, 46%, 47%, 48%, 49%, 50%, 51%, 52%, 53%, 54%, 55%, 56%, 57%, 58%, 59%, 60%, 61%, 62%, 63%, 64%, 65%, 66%, 67%, 68%, 69%, 70%, 71%, 72%, 73%, 74%, 75%, 76%, 77%, 78%, 79%, 80%, 85%, 90%, 95% and 100%, or at least 20-30%, 20-40%, 20-50%, 20-60%, 20-70%, 20-80%, 20-90%, 20-95%, 20-100%, 30-40%, 30-50%, 30-60%, 30-70%, 30-80%, 30-90%, 30-95%, 30-100%, 40-50%, 40-60%, 40-70%, 40-80%, 40-90%, 40-95%, 40-100%, 50-60%, 50-70%, 50-80%, 50-90%, 50-95%, 50-100%, 55-60%, 55-70%, 55-80%, 55-90%, 55-95%, 55-100%, 60-70%, 60-80%, 60-90%, 60-95%, 60-100%, 70-80%, 70-90%, 70-95%, 70-100%, 80-90%, 80-95%, 80-100%, 90-95%, 90-100% or 95-100% in at least one region of the CNS. As a non-limiting example, the expression of HTT protein and mRNA in the striatum and/or cortex is reduced by 50-90%. As a non-limiting example, the expression of HTT protein and mRNA in the striatum is reduced by 40-50%. As a non-limiting example, the expression of HTT protein and mRNA in the cortex is reduced by 40-50%. As a non-limiting example, the expression of HTT protein and mRNA in the cortex is reduced by 30-70%. As a non-limiting example, the expression of HTT protein and mRNA in the striatum and/or cortex is reduced by 40-70%. As a non-limiting example, the expression of HTT protein and mRNA in the striatum and/or cortex is reduced by 40-50%. As a non-limiting example, the expression of HTT protein and mRNA in the striatum and/or cortex is reduced by 50-70%. As a non-limiting example, the expression of HTT protein and mRNA in the striatum and/or cortex is reduced by 50-60%. As a non-limiting example, the expression of HTT protein and mRNA in the striatum and/or cortex is reduced by 50%. As a non-limiting example, the expression of HTT protein and mRNA in the striatum and/or cortex is reduced by 51%. As a non-limiting example, the expression of HTT protein and mRNA in the striatum and/or cortex is reduced by 52%. As a non-limiting example, the expression of HTT protein and mRNA in the striatum and/or cortex is reduced by 53%. As a non-limiting example, the expression of HTT protein and mRNA in the striatum and/or cortex is reduced by 54%. As a non-limiting example, the expression of HTT protein and mRNA in the striatum and/or cortex is reduced by 55%. As a non-limiting example, the expression of HTT protein and mRNA in the striatum and/or cortex is reduced by 56%. As a non-limiting example, the expression of HTT protein and mRNA in the striatum and/or cortex is reduced by 57%. As a non-limiting example, the expression of HTT protein and mRNA in the striatum and/or cortex is reduced by 58%. As a non-limiting example, the expression of HTT protein and mRNA in the striatum and/or cortex is reduced by 59%. As a non-limiting example, the expression of HTT protein and mRNA in the striatum and/or cortex is reduced by 60%.

[1025] In one embodiment, the siRNA duplexes or encoded dsRNA may be used to reduce the expression of HTT protein and/or mRNA in at least one region of the CNS such as, but not limited to the forebrain. The expression of HTT protein and/or mRNA is reduced by at least about 30%, 31%, 32%, 33%, 34%, 35%, 36%, 37%, 38%, 39%, 40%, 41%, 42%, 43%, 44%, 45%, 46%, 47%, 48%, 49%, 50%, 51%, 52%, 53%, 54%, 55%, 56%, 57%, 58%, 59%, 60%, 61%, 62%, 63%, 64%, 65%, 66%, 67%, 68%, 69%, 70%, 71%, 72%, 73%, 74%, 75%, 76%, 77%, 78%, 79%, 80%, 85%, 90%, 95% and 100%, or at least 20-30%, 20-40%, 20-50%, 20-60%, 20-70%, 20-80%, 20-90%, 20-95%, 20-100%, 30-40%, 30-50%, 30-60%, 30-70%, 30-80%, 30-90%, 30-95%, 30-100%, 40-50%, 40-60%, 40-70%, 40-80%, 40-90%, 40-95%, 40-100%, 50-60%, 50-70%, 50-80%, 50-90%, 50-95%, 50-100%, 55-60%, 55-70%, 55-80%, 55-90%, 55-95%, 55-100%, 60-70%, 60-80%, 60-90%, 60-95%, 60-100%, 70-80%, 70-90%, 70-95%, 70-100%, 80-90%, 80-95%, 80-100%, 90-95%, 90-100% or 95-100% in at least one region of the CNS. As a non-limiting example, the expression of HTT protein and mRNA in the putamen is reduced by 50-90%. As a non-limiting example, the expression of HTT protein and mRNA in the striatum is reduced by 40-50%. As a non-limiting example, the expression of HTT protein and mRNA in the cortex is reduced by 40-50%. As a non-limiting example, the expression of HTT protein and mRNA in the cortex is reduced by 30-70%. As a non-limiting example, the expression of HTT protein and mRNA in the striatum and/or cortex is reduced by 40-70%. As a non-limiting example, the expression of HTT protein and mRNA in the striatum and/or cortex is reduced by 40-50%. As a non-limiting example, the expression of HTT protein and mRNA in the striatum and/or cortex is reduced by 50-70%. As a non-limiting example, the expression of HTT protein and mRNA in the striatum and/or cortex is reduced by 50-60%. As a non-limiting example, the expression of HTT protein and mRNA in the striatum and/or cortex is reduced by 50%. As a non-limiting example, the expression of HTT protein and mRNA in the striatum and/or cortex is reduced by 51%. As a non-limiting example, the expression of HTT protein and mRNA in the striatum and/or cortex is reduced by 52%. As a non-limiting example, the expression of HTT protein and mRNA in the striatum and/or cortex is reduced by 53%. As a non-limiting example, the expression of HTT protein and mRNA in the striatum and/or cortex is reduced by 54%. As a non-limiting example, the expression of HTT protein and mRNA in the striatum and/or cortex is reduced by 55%. As a non-limiting example, the expression of HTT protein and mRNA in the striatum and/or cortex is reduced by 56%. As a non-limiting example, the expression of HTT protein and mRNA in the striatum and/or cortex is reduced by 57%. As a non-limiting example, the expression of HTT protein and mRNA in the striatum and/or cortex is reduced by 58%. As a non-limiting example, the expression of HTT protein and mRNA in the striatum and/or cortex is reduced by 59%. As a non-limiting example, the expression of HTT protein and mRNA in the striatum and/or cortex is reduced by 60%.

[1026] In one embodiment, the siRNA duplexes or encoded dsRNA may be used to reduce the expression of HTT protein and/or mRNA in the striatum. The expression of HTT protein and/or mRNA is reduced by at least about 30%, 31%, 32%, 33%, 34%, 35%, 36%, 37%, 38%, 39%, 40%, 41%, 42%, 43%, 44%, 45%, 46%, 47%, 48%, 49%, 50%, 51%, 52%, 53%, 54%, 55%, 56%, 57%, 58%, 59%, 60%, 61%, 62%, 63%, 64%, 65%, 66%, 67%, 68%, 69%, 70%, 71%, 72%, 73%, 74%, 75%, 76%, 77%, 78%, 79%, 80%, 85%, 90%, 95% and 100%, or at least 20-30%, 20-40%, 20-50%, 20-60%, 20-70%, 20-80%, 20-90%, 20-95%, 20-100%, 30-40%, 30-50%, 30-60%, 30-70%, 30-80%, 30-90%, 30-95%, 30-100%, 40-50%, 40-60%, 40-70%, 40-80%, 40-90%, 40-95%, 40-100%, 50-60%, 50-70%, 50-80%, 50-90%, 50-95%, 50-100%, 60-70%, 60-80%, 60-90%, 60-95%, 60-100%, 70-80%, 70-90%, 70-95%, 70-100%, 80-90%, 80-95%, 80-100%, 90-95%, 90-100% or 95-100%. As a non-limiting example, the expression of HTT protein and mRNA in the striatum is reduced by 40-50%. As a non-limiting example, the expression of HTT protein and mRNA in the striatum is reduced by 30-70%. As a non-limiting example, the expression of HTT protein and mRNA in the striatum is reduced by at least 30%. As a non-limiting example, the expression of HTT protein and mRNA in the striatum is reduced by 40-70%. As a non-limiting example, the expression of HTT protein and mRNA in the striatum is reduced by 40-50%. As a non-limiting example, the expression of HTT protein and mRNA in the striatum is reduced by 50-70%. As a non-limiting example, the expression of HTT protein and mRNA in the striatum is reduced by 50-60%. As a non-limiting example, the expression of HTT protein and mRNA in the striatum is reduced by 50%. As a non-limiting example, the expression of HTT protein and mRNA in the striatum is reduced by 51%. As a non-limiting example, the expression of HTT protein and mRNA in the striatum is reduced by 52%. As a non-limiting example, the expression of HTT protein and mRNA in the striatum is reduced by 53%. As a non-limiting example, the expression of HTT protein and mRNA in the striatum is reduced by 54%. As a non-limiting example, the expression of HTT protein and mRNA in the striatum is reduced by 55%. As a non-limiting example, the expression of HTT protein and mRNA in the striatum is reduced by 56%. As a non-limiting example, the expression of HTT protein and mRNA in the striatum is reduced by 57%. As a non-limiting example, the expression of HTT protein and mRNA in the striatum is reduced by 58%. As a non-limiting example, the expression of HTT protein and mRNA in the striatum is reduced by 59%. As a non-limiting example, the expression of HTT protein and mRNA in the striatum is reduced by 60%.

[1027] In some embodiments, the AAV particles comprising modulatory polynucleotides encoding the siRNA molecules of the present invention may be used to suppress HTT protein in neurons and/or astrocytes of the striatum and/or the cortex. As a non-limiting example, the suppression of HTT protein is in medium spiny neurons of the striatum and/or neurons of the cortex.

[1028] In some embodiments, the AAV particles comprising modulatory polynucleotides encoding the siRNA molecules of the present invention may be used to suppress HTT protein in neurons and/or astrocytes of the striatum and/or the cortex and reduce associated neuronal toxicity. The suppression of HTT protein in the neurons and/or astrocytes of the striatum and/or the cortex may be, independently, suppressed by 5%, 10%, 15%, 20%, 25%, 30%, 35%, 40%, 45%, 50%, 55%, 60%, 65%, 70%, 75%, 80%, 85%, 90%, 95%, or more than 95%, 5-15%, 5-20%, 5-25%, 5-30%, 5-35%, 5-40%, 5-45%, 5-50%, 5-55%, 5-60%, 5-65%, 5-70%, 5-75%, 5-80%, 5-85%, 5-90%, 5-95%, 10-20%, 10-25%, 10-30%, 10-35%, 10-40%, 10-45%, 10-50%, 10-55%, 10-60%, 10-65%, 10-70%, 10-75%, 10-80%, 10-85%, 10-90%, 10-95%, 15-25%, 15-30%, 15-35%, 15-40%, 15-45%, 15-50%, 15-55%, 15-60%, 15-65%, 15-70%, 15-75%, 15-80%, 15-85%, 15-90%, 15-95%, 20-30%, 20-35%, 20-40%, 20-45%, 20-50%, 20-55%, 20-60%, 20-65%, 20-70%, 20-75%, 20-80%, 20-85%, 20-90%, 20-95%, 25-35%, 25-40%, 25-45%, 25-50%, 25-55%, 25-60%, 25-65%, 25-70%, 25-75%, 25-80%, 25-85%, 25-90%, 25-95%, 30-40%, 30-45%, 30-50%, 30-55%, 30-60%, 30-65%, 30-70%, 30-75%, 30-80%, 30-85%, 30-90%, 30-95%, 35-45%, 35-50%, 35-55%, 35-60%, 35-65%, 35-70%, 35-75%, 35-80%, 35-85%, 35-90%, 35-95%, 40-50%, 40-55%, 40-60%, 40-65%, 40-70%, 40-75%, 40-80%, 40-85%, 40-90%, 40-95%, 45-55%, 45-60%, 45-65%, 45-70%, 45-75%, 45-80%, 45-85%, 45-90%, 45-95%, 50-60%, 50-65%, 50-70%, 50-75%, 50-80%, 50-85%, 50-90%, 50-95%, 55-65%, 55-70%, 55-75%, 55-80%, 55-85%, 55-90%, 55-95%, 60-70%, 60-75%, 60-80%, 60-85%, 60-90%, 60-95%, 65-75%, 65-80%, 65-85%, 65-90%, 65-95%, 70-80%, 70-85%, 70-90%, 70-95%, 75-85%, 75-90%, 75-95%, 80-90%, 80-95%, or 90-95%. The reduction of associated neuronal toxicity may be 5%, 10%, 15%, 20%, 25%, 30%, 35%, 40%, 45%, 50%, 55%, 60%, 65%, 70%, 75%, 80%, 85%, 90%, 95%, or more than 95%, 5-15%, 5-20%, 5-25%, 5-30%, 5-35%, 5-40%, 5-45%, 5-50%, 5-55%, 5-60%, 5-65%, 5-70%, 5-75%, 5-80%, 5-85%, 5-90%, 5-95%, 10-20%, 10-25%, 10-30%, 10-35%, 10-40%, 10-45%, 10-50%, 10-55%, 10-60%, 10-65%, 10-70%, 10-75%, 10-80%, 10-85%, 10-90%, 10-95%, 15-25%, 15-30%, 15-35%, 15-40%, 15-45%, 15-50%, 15-55%, 15-60%, 15-65%, 15-70%, 15-75%, 15-80%, 15-85%, 15-90%, 15-95%, 20-30%, 20-35%, 20-40%, 20-45%, 20-50%, 20-55%, 20-60%, 20-65%, 20-70%, 20-75%, 20-80%, 20-85%, 20-90%, 20-95%, 25-35%, 25-40%, 25-45%, 25-50%, 25-55%, 25-60%, 25-65%, 25-70%, 25-75%, 25-80%, 25-85%, 25-90%, 25-95%, 30-40%, 30-45%, 30-50%, 30-55%, 30-60%, 30-65%, 30-70%, 30-75%, 30-80%, 30-85%, 30-90%, 30-95%, 35-45%, 35-50%, 35-55%, 35-60%, 35-65%, 35-70%, 35-75%, 35-80%, 35-85%, 35-90%, 35-95%, 40-50%, 40-55%, 40-60%, 40-65%, 40-70%, 40-75%, 40-80%, 40-85%, 40-90%, 40-95%, 45-55%, 45-60%, 45-65%, 45-70%, 45-75%, 45-80%, 45-85%, 45-90%, 45-95%, 50-60%, 50-65%, 50-70%, 50-75%, 50-80%, 50-85%, 50-90%, 50-95%, 55-65%, 55-70%, 55-75%, 55-80%, 55-85%, 55-90%, 55-95%, 60-70%, 60-75%, 60-80%, 60-85%, 60-90%, 60-95%, 65-75%, 65-80%, 65-85%, 65-90%, 65-95%, 70-80%, 70-85%, 70-90%, 70-95%, 75-85%, 75-90%, 75-95%, 80-90%, 80-95%, or 90-95%.

[1029] In one embodiment, the siRNA duplexes or encoded dsRNA may be used to reduce the expression of HTT protein and/or mRNA in the cortex. The expression of HTT protein and/or mRNA is reduced by at least about 30%, 31%, 32%, 33%, 34%, 35%, 36%, 37%, 38%, 39%, 40%, 41%, 42%, 43%, 44%, 45%, 46%, 47%, 48%, 49%, 50%, 51%, 52%, 53%, 54%, 55%, 56%, 57%, 58%, 59%, 60%, 61%, 62%, 63%, 64%, 65%, 66%, 67%, 68%, 69%, 70%, 71%, 72%, 73%, 74%, 75%, 76%, 77%, 78%, 79%, 80%, 85%, 90%, 95% and 100%, or at least 20-30%, 20-40%, 20-50%, 20-60%, 20-70%, 20-80%, 20-90%, 20-95%, 20-100%, 30-40%, 30-50%, 30-60%, 30-70%, 30-80%, 30-90%, 30-95%, 30-100%, 40-50%, 40-60%, 40-70%, 40-80%, 40-90%, 40-95%, 40-100%, 50-60%, 50-70%, 50-80%, 50-90%, 50-95%, 50-100%, 60-70%, 60-80%, 60-90%, 60-95%, 60-100%, 70-80%, 70-90%, 70-95%, 70-100%, 80-90%, 80-95%, 80-100%, 90-95%, 90-100% or 95-100%. As a non-limiting example, the expression of HTT protein and mRNA in the cortex is reduced by 40-50%. As a non-limiting example, the expression of HTT protein and mRNA in the cortex is reduced by 30-70%. As a non-limiting example, the expression of HTT protein and mRNA in the cortex is reduced by at least 30%. As a non-limiting example, the expression of HTT protein and mRNA in the cortex is reduced by 40-70%. As a non-limiting example, the expression of HTT protein and mRNA in the cortex is reduced by 40-50%. As a non-limiting example, the expression of HTT protein and mRNA in the cortex is reduced by 50-70%. As a non-limiting example, the expression of HTT protein and mRNA in the cortex is reduced by 50-60%. As a non-limiting example, the expression of HTT protein and mRNA in the cortex is reduced by 50%. As a non-limiting example, the expression of HTT protein and mRNA in the cortex is reduced by 51%. As a non-limiting example, the expression of HTT protein and mRNA in the cortex is reduced by 52%. As a non-limiting example, the expression of HTT protein and mRNA in the cortex is reduced by 53%. As a non-limiting example, the expression of HTT protein and mRNA in the cortex is reduced by 54%. As a non-limiting example, the expression of HTT protein and mRNA in the cortex is reduced by 55%. As a non-limiting example, the expression of HTT protein and mRNA in the cortex is reduced by 56%. As a non-limiting example, the expression of HTT protein and mRNA in the cortex is reduced by 57%. As a non-limiting example, the expression of HTT protein and mRNA in the cortex is reduced by 58%. As a non-limiting example, the expression of HTT protein and mRNA in the cortex is reduced by 59%. As a non-limiting example, the expression of HTT protein and mRNA in the cortex is reduced by 60%.

[1030] In one embodiment, the siRNA duplexes or encoded dsRNA may be used to reduce the expression of HTT protein and/or mRNA in the motor cortex. The expression of HTT protein and/or mRNA is reduced by at least about 30%, 31%, 32%, 33%, 34%, 35%, 36%, 37%, 38%, 39%, 40%, 41%, 42%, 43%, 44%, 45%, 46%, 47%, 48%, 49%, 50%, 51%, 52%, 53%, 54%, 55%, 56%, 57%, 58%, 59%, 60%, 61%, 62%, 63%, 64%, 65%, 66%, 67%, 68%, 69%, 70%, 71%, 72%, 73%, 74%, 75%, 76%, 77%, 78%, 79%, 80%, 85%, 90%, 95% and 100%, or at least 20-30%, 20-40%, 20-50%, 20-60%, 20-70%, 20-80%, 20-90%, 20-95%, 20-100%, 30-40%, 30-50%, 30-60%, 30-70%, 30-80%, 30-90%, 30-95%, 30-100%, 40-50%, 40-60%, 40-70%, 40-80%, 40-90%, 40-95%, 40-100%, 50-60%, 50-70%, 50-80%, 50-90%, 50-95%, 50-100%, 60-70%, 60-80%, 60-90%, 60-95%, 60-100%, 70-80%, 70-90%, 70-95%, 70-100%, 80-90%, 80-95%, 80-100%, 90-95%, 90-100% or 95-100%. As a non-limiting example, the expression of HTT protein and mRNA in the motor cortex is reduced by 40-50%. As a non-limiting example, the expression of HTT protein and mRNA in the motor cortex is reduced by 30-70%. As a non-limiting example, the expression of HTT protein and mRNA in the motor cortex is reduced by at least 30%. As a non-limiting example, the expression of HTT protein and mRNA in the motor cortex is reduced by 40-70%. As a non-limiting example, the expression of HTT protein and mRNA in the motor cortex is reduced by 40-50%. As a non-limiting example, the expression of HTT protein and mRNA in the motor cortex is reduced by 50-70%. As a non-limiting example, the expression of HTT protein and mRNA in the motor cortex is reduced by 50-60%. As a non-limiting example, the expression of HTT protein and mRNA in the motor cortex is reduced by 50%. As a non-limiting example, the expression of HTT protein and mRNA in the motor cortex is reduced by 51%. As a non-limiting example, the expression of HTT protein and mRNA in the motor cortex is reduced by 52%. As a non-limiting example, the expression of HTT protein and mRNA in the motor cortex is reduced by 53%. As a non-limiting example, the expression of HTT protein and mRNA in the motor cortex is reduced by 54%. As a non-limiting example, the expression of HTT protein and mRNA in the motor cortex is reduced by 55%. As a non-limiting example, the expression of HTT protein and mRNA in the motor cortex is reduced by 56%. As a non-limiting example, the expression of HTT protein and mRNA in the motor cortex is reduced by 57%. As a non-limiting example, the expression of HTT protein and mRNA in the motor cortex is reduced by 58%. As a non-limiting example, the expression of HTT protein and mRNA in the motor cortex is reduced by 59%. As a non-limiting example, the expression of HTT protein and mRNA in the motor cortex is reduced by 60%.

[1031] In one embodiment, the siRNA duplexes or encoded dsRNA may be used to reduce the expression of HTT protein and/or mRNA in the somatosensory cortex. The expression of HTT protein and/or mRNA is reduced by at least about 30%, 31%, 32%, 33%, 34%, 35%, 36%, 37%, 38%, 39%, 40%, 41%, 42%, 43%, 44%, 45%, 46%, 47%, 48%, 49%, 50%, 51%, 52%, 53%, 54%, 55%, 56%, 57%, 58%, 59%, 60%, 61%, 62%, 63%, 64%, 65%, 66%, 67%, 68%, 69%, 70%, 71%, 72%, 73%, 74%, 75%, 76%, 77%, 78%, 79%, 80%, 85%, 90%, 95% and 100%, or at least 20-30%, 20-40%, 20-50%, 20-60%, 20-70%, 20-80%, 20-90%, 20-95%, 20-100%, 30-40%, 30-50%, 30-60%, 30-70%, 30-80%, 30-90%, 30-95%, 30-100%, 40-50%, 40-60%, 40-70%, 40-80%, 40-90%, 40-95%, 40-100%, 50-60%, 50-70%, 50-80%, 50-90%, 50-95%, 50-100%, 60-70%, 60-80%, 60-90%, 60-95%, 60-100%, 70-80%, 70-90%, 70-95%, 70-100%, 80-90%, 80-95%, 80-100%, 90-95%, 90-100% or 95-100%. As a non-limiting example, the expression of HTT protein and mRNA in the somatosensory cortex is reduced by 40-50%. As a non-limiting example, the expression of HTT protein and mRNA in the somatosensory cortex is reduced by 30-70%. As a non-limiting example, the expression of HTT protein and mRNA in the somatosensory cortex is reduced by at least 30%. As a non-limiting example, the expression of HTT protein and mRNA in the somatosensory cortex is reduced by 40-70%. As a non-limiting example, the expression of HTT protein and mRNA in the somatosensory cortex is reduced by 40-50%. As a non-limiting example, the expression of HTT protein and mRNA in the somatosensory cortex is reduced by 50-70%. As a non-limiting example, the expression of HTT protein and mRNA in the somatosensory cortex is reduced by 50-60%. As a non-limiting example, the expression of HTT protein and mRNA in the somatosensory cortex is reduced by 50%. As a non-limiting example, the expression of HTT protein and mRNA in the somatosensory cortex is reduced by 51%. As a non-limiting example, the expression of HTT protein and mRNA in the somatosensory cortex is reduced by 52%. As a non-limiting example, the expression of HTT protein and mRNA in the somatosensory cortex is reduced by 53%. As a non-limiting example, the expression of HTT protein and mRNA in the somatosensory cortex is reduced by 54%. As a non-limiting example, the expression of HTT protein and mRNA in the somatosensory cortex is reduced by 55%. As a non-limiting example, the expression of HTT protein and mRNA in the somatosensory cortex is reduced by 56%. As a non-limiting example, the expression of HTT protein and mRNA in the somatosensory cortex is reduced by 57%. As a non-limiting example, the expression of HTT protein and mRNA in the somatosensory cortex is reduced by 58%. As a non-limiting example, the expression of HTT protein and mRNA in the somatosensory cortex is reduced by 59%. As a non-limiting example, the expression of HTT protein and mRNA in the somatosensory cortex is reduced by 60%.

[1032] In one embodiment, the siRNA duplexes or encoded dsRNA may be used to reduce the expression of HTT protein and/or mRNA in the temporal cortex. The expression of HTT protein and/or mRNA is reduced by at least about 30%, 31%, 32%, 33%, 34%, 35%, 36%, 37%, 38%, 39%, 40%, 41%, 42%, 43%, 44%, 45%, 46%, 47%, 48%, 49%, 50%, 51%, 52%, 53%, 54%, 55%, 56%, 57%, 58%, 59%, 60%, 61%, 62%, 63%, 64%, 65%, 66%, 67%, 68%, 69%, 70%, 71%, 72%, 73%, 74%, 75%, 76%, 77%, 78%, 79%, 80%, 85%, 90%, 95% and 100%, or at least 20-30%, 20-40%, 20-50%, 20-60%, 20-70%, 20-80%, 20-90%, 20-95%, 20-100%, 30-40%, 30-50%, 30-60%, 30-70%, 30-80%, 30-90%, 30-95%, 30-100%, 40-50%, 40-60%, 40-70%, 40-80%, 40-90%, 40-95%, 40-100%, 50-60%, 50-70%, 50-80%, 50-90%, 50-95%, 50-100%, 60-70%, 60-80%, 60-90%, 60-95%, 60-100%, 70-80%, 70-90%, 70-95%, 70-100%, 80-90%, 80-95%, 80-100%, 90-95%, 90-100% or 95-100%. As a non-limiting example, the expression of HTT protein and mRNA in the temporal cortex is reduced by 40-50%. As a non-limiting example, the expression of HTT protein and mRNA in the temporal cortex is reduced by 30-70%. As a non-limiting example, the expression of HTT protein and mRNA in the temporal cortex is reduced by at least 30%. As a non-limiting example, the expression of HTT protein and mRNA in the temporal cortex is reduced by 40-70%. As a non-limiting example, the expression of HTT protein and mRNA in the temporal cortex is reduced by 40-50%. As a non-limiting example, the expression of HTT protein and mRNA in the temporal cortex is reduced by 50-70%. As a non-limiting example, the expression of HTT protein and mRNA in the temporal cortex is reduced by 50-60%. As a non-limiting example, the expression of HTT protein and mRNA in the temporal cortex is reduced by 50%. As a non-limiting example, the expression of HTT protein and mRNA in the temporal cortex is reduced by 51%. As a non-limiting example, the expression of HTT protein and mRNA in the temporal cortex is reduced by 52%. As a non-limiting example, the expression of HTT protein and mRNA in the temporal cortex is reduced by 53%. As a non-limiting example, the expression of HTT protein and mRNA in the temporal cortex is reduced by 54%. As a non-limiting example, the expression of HTT protein and mRNA in the temporal cortex is reduced by 55%. As a non-limiting example, the expression of HTT protein and mRNA in the temporal cortex is reduced by 56%. As a non-limiting example, the expression of HTT protein and mRNA in the temporal cortex is reduced by 57%. As a non-limiting example, the expression of HTT protein and mRNA in the temporal cortex is reduced by 58%. As a non-limiting example, the expression of HTT protein and mRNA in the temporal cortex is reduced by 59%. As a non-limiting example, the expression of HTT protein and mRNA in the temporal cortex is reduced by 60%.

[1033] In one embodiment, the siRNA duplexes or encoded dsRNA may be used to reduce the expression of HTT protein and/or mRNA in the putamen. The expression of HTT protein and/or mRNA is reduced by at least about 30%, 31%, 32%, 33%, 34%, 35%, 36%, 37%, 38%, 39%, 40%, 41%, 42%, 43%, 44%, 45%, 46%, 47%, 48%, 49%, 50%, 51%, 52%, 53%, 54%, 55%, 56%, 57%, 58%, 59%, 60%, 61%, 62%, 63%, 64%, 65%, 66%, 67%, 68%, 69%, 70%, 71%, 72%, 73%, 74%, 75%, 76%, 77%, 78%, 79%, 80%, 85%, 90%, 95% and 100%, or at least 20-30%, 20-40%, 20-50%, 20-60%, 20-70%, 20-80%, 20-90%, 20-95%, 20-100%, 30-40%, 30-50%, 30-60%, 30-70%, 30-80%, 30-90%, 30-95%, 30-100%, 40-50%, 40-60%, 40-70%, 40-80%, 40-90%, 40-95%, 40-100%, 50-60%, 50-70%, 50-80%, 50-90%, 50-95%, 50-100%, 55-60%, 55-70%, 55-80%, 55-90%, 55-95%, 55-100%, 60-70%, 60-80%, 60-90%, 60-95%, 60-100%, 70-80%, 70-90%, 70-95%, 70-100%, 80-90%, 80-95%, 80-100%, 90-95%, 90-100% or 95-100% in at least one region of the CNS. As a non-limiting example, the expression of HTT protein and mRNA in the putamen is reduced by 40-70%. As a non-limiting example, the expression of HTT protein and mRNA in the putamen is reduced by 40-50%. As a non-limiting example, the expression of HTT protein and mRNA in the putamen is reduced by 50-70%. As a non-limiting example, the expression of HTT protein and mRNA in the putamen is reduced by 50-60%. As a non-limiting example, the expression of HTT protein and mRNA in the putamen is reduced by 50%. As a non-limiting example, the expression of HTT protein and mRNA in the putamen is reduced by 51%. As a non-limiting example, the expression of HTT protein and mRNA in the putamen is reduced by 52%. As a non-limiting example, the expression of HTT protein and mRNA in the putamen is reduced by 53%. As a non-limiting example, the expression of HTT protein and mRNA in the putamen is reduced by 54%. As a non-limiting example, the expression of HTT protein and mRNA in the putamen is reduced by 55%. As a non-limiting example, the expression of HTT protein and mRNA in the putamen is reduced by 56%. As a non-limiting example, the expression of HTT protein and mRNA in the putamen is reduced by 57%. As a non-limiting example, the expression of HTT protein and mRNA in the putamen is reduced by 58%. As a non-limiting example, the expression of HTT protein and mRNA in the putamen is reduced by 59%. As a non-limiting example, the expression of HTT protein and mRNA in the putamen is reduced by 60%.

### Solo and Combination Therapy

[1034] In some embodiments, the present composition is administered as a solo therapeutic or combination therapeutics for the treatment of HD.

[1035] In some embodiments, the pharmaceutical composition of the present invention is used as a solo therapy. In other embodiments, the pharmaceutical composition of the present invention is used in combination therapy. The combination therapy may be in combination with one or more neuroprotective agents such as small molecule compounds, growth factors and hormones which have been tested for their neuroprotective effect on neuron degeneration.

[1036] The AAV particles encoding siRNA duplexes targeting the HTT gene may be used in combination with one or more other therapeutic agents. By “in combination with,” it is not intended to imply that the agents must be administered at the same time and/or formulated for delivery together, although these methods of delivery are within the scope of the present disclosure. Compositions can be administered concurrently with, prior to, or subsequent to, one or more other desired therapeutics or medical procedures. In general, each agent will be administered at a dose and/or on a time schedule determined for that agent.

[1037] Therapeutic agents that may be used in combination with the AAV particles encoding the nucleic acid sequence for the siRNA molecules of the present invention can be small molecule compounds which are antioxidants, anti-inflammatory agents, anti-apoptosis agents, calcium regulators, antiglutamatergic agents, structural protein inhibitors, compounds involved in muscle function, and compounds involved in metal ion regulation.

[1038] Compounds tested for treating HD which may be used in combination with the vectors described herein include, but are not limited to, dopamine-depleting agents (e.g., tetrabenazine for chorea), benzodiazepines (e.g., clonazepam for myoclonus, chorea, dystonia, rigidity, and/or spasticity), anticonvulsants (e.g., sodium valproate and levetiracetam for myoclonus), amino acid precursors of dopamine (e.g., levodopa for rigidity which is particularly associate with juvenile HD or young adult-onset parkinsonian phenotype), skeletal muscle relaxants (e.g., baclofen, tizanidine for rigidity and/or spasticity), inhibitors for acetycholine release at the neuromuscular junction to cause muscle paralysis (e.g., botulinum toxin for bruxism and/or dystonia), atypical neuroleptics (e.g., olanzapine and quetiapine for psychosis and/or irritability, risperidone, sulpiride and haloperidol for psychosis, chorea and/or irritability, clozapine for treatment-resistant psychosis, aripiprazole for psychosis with prominent negative symptoms), agents to increase ATP/cellular energetics (e.g., creatine), selective serotonin reuptake inhibitors (SSRIs) (e.g., citalopram, fluoxetine, paroxetine, sertraline, mirtazapine, venlafaxine for depression, anxiety, obsessive compulsive behavior and/or irritability), hypnotics (e.g., xopiclone and/or zolpidem for altered sleep-wake cycle), anticonvulsants (e.g., sodium valproate and carbamazepine for mania or hypomania) and mood stabilizers (e.g., lithium for mania or hypomania).

[1039] Neurotrophic factors may be used in combination therapy with the AAV particles encoding the nucleic acid sequence for the siRNA molecules of the present invention for treating HD. Generally, a neurotrophic factor is defined as a substance that promotes survival, growth, differentiation, proliferation and/or maturation of a neuron, or stimulates increased activity of a neuron. In some embodiments, the present methods further comprise delivery of one or more trophic factors into the subject in need of treatment. Trophic factors may include, but are not limited to, IGF-I, GDNF, BDNF, CTNF, VEGF, Colivelin, Xaliproden, Thyrotrophin-releasing hormone and ADNF, and variants thereof.

[1040] In one aspect, the AAV particles comprising modulatory polynucleotides encoding the siRNA duplex targeting the HTT gene may be co-administered with AAV particles expressing neurotrophic factors such as AAV-IGF-I (See e.g., Vincent et al., Neuromolecular medicine, 2004, 6, 79-85; the content of which is incorporated herein by reference in its entirety) and AAV-GDNF (See e.g., Wang et al., J Neurosci., 2002, 22, 6920-6928; the content of which is incorporated herein by reference in its entirety).

### Amyotrophic Lateral Sclerosis (ALS)

### Amyotrophic Lateral Sclerosis (ALS)

[1041] Amyotrophic lateral sclerosis (ALS), an adult-onset neurodegenerative disorder, is a progressive and fatal disease characterized by the selective death of motor neurons in the motor cortex, brainstem and spinal cord. The incidence of ALS is about 1.9 per 100,000. Patients diagnosed with ALS develop a progressive muscle phenotype characterized by spasticity, hyperreflexia or hyporeflexia, fasciculations, muscle atrophy and paralysis. These motor impairments are caused by the denervation of muscles due to the loss of motor neurons. The major pathological features of ALS include degeneration of the corticospinal tracts and extensive loss of lower motor neurons (LMNs) or anterior horn cells (Ghatak et al., J Neuropathol Exp Neurol., 1986, 45, 385-395), degeneration and loss of Betz cells and other pyramidal cells in the primary motor cortex (Udaka et al., Acta Neuropathol, 1986, 70, 289-295; Maekawa et al., Brain, 2004, 127, 1237-1251) and reactive gliosis in the motor cortex and spinal cord (Kawamata et al., Am J Pathol., 1992, 140, 691-707; and Schiffer et al., J Neurol Sci., 1996, 139, 27-33). ALS is usually fatal within 3 to 5 years after the diagnosis due to respiratory defects and/or inflammation (Rowland L P and Shneibder N A, N Engl. J. Med., 2001, 344, 1688-1700).

[1042] A cellular hallmark of ALS is the presence of proteinaceous, ubiquitinated, cytoplasmic inclusions in degenerating motor neurons and surrounding cells (e.g., astrocytes). Ubiquitinated inclusions (i.e., Lewy body-like inclusions or Skein-like inclusions) are the most common and specific type of inclusion in ALS and are found in LMNs of the spinal cord and brainstem, and in corticospinal upper motor neurons (UMNs) (Matsumoto et al., J Neurol Sci., 1993, 115, 208-213; and Sasak and Maruyama, Acta Neuropathol., 1994, 87, 578-585). A few proteins have been identified to be components of the inclusions, including ubiquitin, Cu/Zn superoxide dismutase 1 (SOD1), peripherin and Dorfin. Neurofilamentous inclusions are often found in hyaline conglomerate inclusions (HCIs) and axonal ‘spheroids’ in spinal cord motor neurons in ALS. Other types and less specific inclusions include Bunina bodies (cystatin C-containing inclusions) and Crescent shaped inclusions (SCIs) in upper layers of the cortex. Other neuropathological features seen in ALS include fragmentation of the Golgi apparatus, mitochondrial vacuolization and ultrastructural abnormalities of synaptic terminals (Fujita et al., Acta Neuropathol. 2002, 103, 243-247).

[1043] In addition, in frontotemporal dementia ALS (FTD-ALS) cortical atrophy (including the frontal and temporal lobes) is also observed, which may cause cognitive impairment in FTD-ALS patients.

[1044] ALS is a complex and multifactorial disease and multiple mechanisms hypothesized as responsible for ALS pathogenesis include, but are not limited to, dysfunction of protein degradation, glutamate excitotoxicity, mitochondrial dysfunction, apoptosis, oxidative stress, inflammation, protein misfolding and aggregation, aberrant RNA metabolism, and altered gene expression.

[1045] About 10%-15% of ALS cases have family history of the disease, and these patients are referred to as familial ALS (fALS) or inherited patients, commonly with a Mendelian dominant mode of inheritance and high penetrance. The remainder (approximately 85%-95%) is classified as sporadic ALS (sALS), as they are not associated with a documented family history, but instead are thought to be due to other risk factors including, but not limited to environmental factors, genetic polymorphisms, somatic mutations, and possibly gene-environmental interactions. In most cases, familial (or inherited) ALS is inherited as autosomal dominant disease, but pedigrees with autosomal recessive and X-linked inheritance and incomplete penetrance exist. Sporadic and familial forms are clinically indistinguishable suggesting a common pathogenesis. The precise cause of the selective death of motor neurons in ALS remains elusive. Progress in understanding the genetic factors in fALS may shed light on both forms of the disease.

[1046] Recently, an explosion to genetic causes of ALS has discovered mutations in more than 10 different genes that are known to cause fALS. The most common ones are found in the genes encoding Cu/Zn superoxide dismutase 1 (SOD1; ˜20%) (Rosen D R et al., Nature, 1993, 362, 59-62), fused in sarcoma/translated in liposarcoma (FUS/TLS; 1-5%) and TDP-43 (TARDBP; 1-5%). Recently, a hexanucleotide repeat expansion (GGGGCC)ₙ in the C9orF72 gene was identified as the most frequent cause of fALS (˜40%) in the Western population (reviewed by Renton et al., Nat. Neurosci., 2014, 17, 17-23). Other genes mutated in ALS include alsin (ALS2), senataxin (SETX), vesicle-associated membrane protein (VAPB), and angiogenin (ANG). fALS genes control different cellular mechanisms, suggesting that the pathogenesis of ALS is complicated and may be related to several different processes finally leading to motor neuron degeneration.

[1047] SOD1 is one of the three human superoxide dismutases identified and characterized in mammals: copper-zinc superoxide dismutase (Cu/ZnSOD or SOD1), manganese superoxide dismutase (MnSOD or SOD2), and extracellular superoxide dismutase (ECSOD or SOD3). SOD1 is a 32 kDa homodimer of a 153-residue polypeptide with one copper- and one zinc-binding site per subunit, which is encoded by the SOD1 gene (GeneBank access No.: NM_000454.4; SEQ ID NO: 1502) on human chromosome 21. SOD1 catalyzes the reaction of superoxide anion (O²⁻) into molecular oxygen (O₂) and hydrogen peroxide (H₂O₂) at a bound copper ion. The intracellular concentration of SOD1 is high (ranging from 10 to 100 μM), accounting for 1% of the total protein content in the central nervous system (CNS). The protein is localized not only in the cytoplasm but also in the nucleus, lysosomes, peroxisomes, and mitochondrial intermembrane spaces in eukaryotic cells (Lindenau J et al., Glia, 2000, 29, 25-34).

[1048] Mutations in the SOD1 gene are carried by 15-20% of fALS patients and by 1-2% of all ALS cases. Currently, at least 170 different mutations distributed throughout the 153-amino acid SOD1 polypeptide have been found to cause ALS, and an updated list can be found at the ALS online Genetic Database (ALSOD) (Wroe R et al., Amyotroph Lateral Scler., 2008, 9, 249-250). Table 46 lists some examples of mutations in SOD1 in ALS. These mutations are predominantly single amino acid substitutions (i.e. missense mutations) although deletions, insertions, and C-terminal truncations also occur. Different SOD1 mutations display different geographic distribution patterns. For instance, 40-50% of all Americans with ALS caused by SOD1 gene mutations have a particular mutation Ala4Val (or A4V). The A4V mutation is typically associated with more severe signs and symptoms and the survival period is typically 2-3 years. The I113T mutation is by far the most common mutation in the United Kingdom. The most prevalent mutation in Europe is D90A substitute and the survival period is usually greater than 10 years.

TABLE 46
Examples of SOD1 mutations in ALS

| Location | Mutations |
|---|---|
| Exon1 | Q22L; E21K, G; F20C; N19S; |
| (220 bp) | G16A, S; V14M, S; G12R; G10G, V, R; |
| | L8Q, V; V7E; C6G, F; V5L; A4T, V, S |
| Exon2 | T54R; E49K; H48R, Q; |
| (97 bp) | V47F, A; H46R; F45C; H43R; G41S, D; |
| | G37R; V29, insA |
| Exon3 | D76Y, V; G72S, C; L67R; |
| (70 bp) | P66A; N65S; S59I, S |
| Exon4 | D124G, V; |
| (118 bp) | V118L, InsAAAAC; L117V; T116T; |
| | R115G; G114A; I113T, F; I112M, T; |
| | G108V; L106V, F; S106L, delTCACTC; |
| | I104F; D101G, Y, H, N; E100G, K; I99V; |
| | V97L, M; D96N, V; A95T, V; |
| | G93S, V, A, C, R, D; D90V, A; A89T, V; |
| | T88delACTGCTGAC; V87A, M; |
| | N86I, S, D, K; G85R, S; L84V, F; H80R |
| Exon5 | I151T, S; I149T; V148I, G; |
| (461 bp) | G147D, R; C146R, stop; A145T, G; |
| | L144F, S; G141E, stop; A140A, G; |
| | N139D, K, H, N; G138E; T137R; |
| | S134N; E133V, delGAA, insTT; |
| | E132insTT; G127R, InsTGGG; |
| | L126S, delITT, stop; D126, delTT |

[1049] To investigate the mechanism of neuronal death associated with SOD1 gene defects, several rodent models of SOD1-linked ALS were developed in the art, which express the human SOD1 gene with different mutations, including missense mutations, small deletions or insertions. Non-limiting examples of ALS mouse models include SOD1^{G93A}, SOD1^{A4V}, SOD1^{G37R}, SOD1^{G85R}, SOD1^{90A}, SOD1^{L84V}, SOD1^{I113T}, SOD1^{H36R/H48Q}, SOD1^{G127X}, SOD1^{L126X} and SOD1^{L126delTT}. There are two transgenic rat models carrying two different human SOD1 mutations: SOD1^{H46R} and SOD1^{G93R}. These rodent ALS models can develop muscle weakness similar to human ALS patients and other pathogenic features that reflect several characteristics of the human disease, in particular, the selective death of spinal motor neurons, aggregation of protein inclusions in motor neurons and microglial activation. It is well known in the art that the transgenic rodents are good models of human SOD1-associated ALS disease and provide models for studying disease pathogenesis and developing disease treatment.

[1050] Studies in animal and cellular models showed that SOD1 pathogenic variants cause ALS by gain of function. That is to say, the superoxide dismutase enzyme gains new but harmful properties when altered by SOD1 mutations. For example, some SOD1 mutated variants in ALS increase oxidative stress (e.g., increased accumulation of toxic superoxide radicals) by disrupting the redox cycle. Other studies also indicate that some SOD1 mutated variants in ALS might acquire toxic properties that are independent of its normal physiological function (such as abnormal aggregation of misfolded SOD1 variants. In the aberrant redox chemistry model, mutant SOD1 is unstable and through aberrant chemistry interacts with nonconventional substrates causing overproduction of reactive oxygen species (ROS). In the protein toxicity model, unstable, misfolded SOD1 aggregates into cytoplasmic inclusion bodies, sequestering proteins crucial for cellular processes. These two hypotheses are not mutually exclusive. It has been shown that oxidation of selected histidine residues that bind metals in the active site mediates SOD1 aggregation.

[1051] The aggregated mutant SOD1 protein may also induce mitochondrial dysfunction (Vehvilainen P et al., Front Cell Neurosci., 2014, 8, 126), impairment of axonal transport, aberrant RNA metabolism, glial cell pathology and glutamate excitotoxicity. In some sporadic ALS cases, misfolded wild-type SOD1 protein is found in diseased motor neurons which forms a “toxic conformation” that is similar to that which is seen with familial ALS-linked SOD1 variants (Rotunno M S and Bosco D A, Front Cell Neurosci., 2013, 16, 7, 253). Such evidence suggests that ALS is a protein folding diseases analogous to other neurodegenerative diseases such as Alzheimer's disease and Parkinson's disease.

[1052] Currently, no curative treatments are available for patients suffering from ALS. The only FDA approved drug Riluzole, an inhibitor of glutamate release, has a moderate effect on ALS, only extending survival by 2-3 months if it is taken for 18 months. Unfortunately, patients taking riluzole do not experience any slowing in disease progression or improvement in muscle function. Therefore, riluzole does not present a cure, or even an effective treatment. Researchers continue to search for better therapeutic agents.

[1053] Therapeutic approaches that may prevent or ameliorate SOD1 aggregation have been tested previously. For example, arimoclomol, a hydroxylamine derivative, is a drug that targets heat shock proteins, which are cellular defense mechanisms against these aggregates. Studies demonstrated that treatment with arimoclomol improved muscle function in SOD1 mouse models. Other drugs that target one or more cellular defects in ALS may include AMPA antagonists such as talampanel, beta-lactam antibiotics, which may reduce glutamate-induced excitotoxicity to motor neurons; Bromocriptine that may inhibit oxidative induced motor neuron death (e.g. U.S. Patent publication No. 20110105517; the content of which is incorporated herein by reference in its entirety); 1,3-diphenylurea derivative or multikinase inhibitor which may reduce SOD1 gene expression (e.g., U.S. Patent Publication No. 20130225642; the content of which is incorporated herein by reference in its entirety); dopamine agonist pramipexole and its anantiomer dexpramipexole, which may ameliorate the oxidative response in mitochondria; nimesulide, which inhibits cyclooxygenase enzyme (e.g., U.S. Patent Publication No. 20060041022; the content of which is incorporated herein by reference in its entirety); drugs that act as free radical scavengers (e.g. U.S. Pat. No. 6,933,310 and PCT Patent Publication No.: WO2006075434; the content of each of which is incorporated herein by reference in their entirety).

[1054] Another approach to inhibit abnormal SOD1 protein aggregation is to silence/inhibit SOD1 gene expression in ALS. It has been reported that small interfering RNAs for specific gene silencing of the mutated allele are therapeutically beneficial for the treatment of fALS (e.g., Ralgh G S et al., Nat. Medicine, 2005, 11(4), 429-433; and Raoul C et al., Nat. Medicine, 2005, 11(4), 423-428; and Maxwell M M et al., PNAS, 2004, 101(9), 3178-3183; and Ding H et al., Chinese Medical J., 2011, 124(1), 106-110; and Scharz D S et al., Plos Genet., 2006, 2(9), e140; the content of each of which is incorporated herein by reference in their entirety).

[1055] Many other RNA therapeutic agents that target the SOD1 gene and modulate SOD1 expression in ALS are taught in the art. Such RNA based agents include antisense oligonucleotides and double stranded small interfering RNAs. See, e.g., Wang H et al., J Biol. Chem., 2008, 283(23), 15845-15852); U.S. Pat. Nos. 7,498,316; 7,632,938; 7,678,895; 7,951,784; 7,977,314; 8,183,219; 8,309,533 and 8, 586, 554; and U.S. Patent publication Nos. 2006/0229268 and 2011/0263680; the content of each of which is herein incorporated by reference in their entirety.

[1056] The present invention provides AAV particles comprising modulatory polynucleotides comprising sequences encoding siRNA molecules targeting the SOD1 gene and methods for their design and manufacture. The AAV particles comprising the nucleic acid sequence encoding the siRNA molecules of the present invention may increase the delivery of active agents into motor neurons. The siRNA duplexes or encoding dsRNA targeting the SOD1 gene may be able to inhibit SOD1 gene expression (e.g., mRNA level) significantly inside cells; therefore, ameliorating SOD1 expression induced stress inside the cells such as aggregation of protein and formation of inclusions, increased free radicals, mitochondrial dysfunction and RNA metabolism.

[1057] Such siRNA mediated SOD1 expression inhibition may be used for treating ALS. According to the present invention, methods for treating and/or ameliorating ALS in a patient comprises administering to the patient an effective amount of AAV particle comprising a nucleic acid sequence encoding the siRNA molecules of the present invention into cells. The administration of the AAV particle comprising such a nucleic acid sequence will encode the siRNA molecules which cause the inhibition/silence of SOD1 gene expression.

[1058] In one embodiment, the AAV particle comprising the modulatory polynucleotide, reduce the expression of mutant SOD1 in a subject. The reduction of mutant SOD1 can also reduce the formation of toxic aggregates which can cause mechanisms of toxicity such as, but not limited to, oxidative stress, mitochondrial dysfunction, impaired axonal transport, aberrant RNA metabolism, glial cell pathology and/or glutamate excitotoxicity.

[1059] In one embodiment, the vector, e.g., AAV particles, reduces the amount of SOD1 in a subject in need thereof and thus provides a therapeutic benefit as described herein.

### Methods of Treatment of ALS

[1060] Provided in the present invention are methods for introducing the AAV particles comprising modulatory polynucleotides comprising sequences comprising a nucleic acid sequence encoding the siRNA molecules of the present invention into cells, the method comprising introducing into said cells any of the vectors in an amount sufficient for degradation of target SOD1 mRNA to occur, thereby activating target-specific RNAi in the cells. In some aspects, the cells may be stem cells, neurons such as motor neurons, muscle cells and glial cells such as astrocytes.

[1061] Disclosed in the present invention are methods for treating ALS associated with abnormal SOD1 function in a subject in need of treatment. The method optionally comprises administering to the subject a therapeutically effective amount of a composition comprising at least AAV particles comprising modulatory polynucleotides comprising a nucleic acid sequence encoding the siRNA molecules of the present invention. As a non-limiting example, the siRNA molecules can silence SOD1 gene expression, inhibit SOD1 protein production, and reduce one or more symptoms of ALS in the subject such that ALS is therapeutically treated.

[1062] In some embodiments, the composition comprising the AAV particles comprising modulatory polynucleotides comprising a nucleic acid sequence encoding the siRNA molecules of the present invention is administered to the central nervous system of the subject. In other embodiments, the composition comprising the AAV particles comprising modulatory polynucleotides comprising a nucleic acid sequence encoding the siRNA molecules of the present invention is administered to the muscles of the subject

[1063] In particular, the AAV particles comprising modulatory polynucleotides comprising a nucleic acid sequence encoding the siRNA molecules of the present invention may be delivered into specific types of targeted cells, including motor neurons; glial cells including oligodendrocyte, astrocyte and microglia; and/or other cells surrounding neurons such as T cells. Studies in human ALS patients and animal SOD1 ALS models implicate glial cells as playing an early role in the dysfunction and death of motor neurons. Normal SOD1 in the surrounding, protective glial cells can prevent the motor neurons from dying even though mutant SOD1 is present in motor neurons (e.g., reviewed by Philips and Rothstein, Exp. Neurol., 2014, May 22. pii: S0014-4886(14)00157-5; the content of which is incorporated herein by reference in its entirety).

[1064] In some specific embodiments, the AAV particles comprising modulatory polynucleotides comprising a nucleic acid sequence encoding the siRNA molecules of the present invention may be used as a therapy for ALS.

[1065] In some embodiments, the present composition is administered as a solo therapeutics or combination therapeutics for the treatment of ALS.

[1066] The AAV particles comprising modulatory polynucleotides comprising a nucleic acid sequence encoding the siRNA molecules targeting the SOD1 gene may be used in combination with one or more other therapeutic agents. By “in combination with,” it is not intended to imply that the agents must be administered at the same time and/or formulated for delivery together, although these methods of delivery are within the scope of the present disclosure. Compositions can be administered concurrently with, prior to, or subsequent to, one or more other desired therapeutics or medical procedures. In general, each agent will be administered at a dose and/or on a time schedule determined for that agent.

[1067] Therapeutic agents that may be used in combination with the AAV particles comprising modulatory polynucleotides comprising a nucleic acid sequence encoding the siRNA molecules of the present invention can be small molecule compounds which are antioxidants, anti-inflammatory agents, anti-apoptosis agents, calcium regulators, antiglutamatergic agents, structural protein inhibitors, and compounds involved in metal ion regulation.

[1068] Compounds tested for treating ALS which may be used in combination with the vectors described herein include, but are not limited to, antiglutamatergic agents: Riluzole, Topiramate, Talampanel, Lamotrigine, Dextromethorphan, Gabapentin and AMPA antagonist; Anti-apoptosis agents: Minocycline, Sodium phenylbutyrate and Arimoclomol; Anti-inflammatory agent: ganglioside, Celecoxib, Cyclosporine, Azathioprine, Cyclophosphamide, Plasmaphoresis, Glatiramer acetate and thalidomide; Ceftriaxone (Berry et al., Plos One, 2013, 8(4)); Beat-lactam antibiotics; Pramipexole (a dopamine agonist) (Wang et al., Amyotrophic Lateral Scler., 2008, 9(1), 50-58); Nimesulide in U.S. Patent Publication No. 20060074991; Diazoxide disclosed in U.S. Patent Publication No. 20130143873); pyrazolone derivatives disclosed in US Patent Publication No. 20080161378; free radical scavengers that inhibit oxidative stress-induced cell death, such as bromocriptine Patent Publication No. 20110105517); phenyl carbamate compounds discussed in PCT Patent Publication No. 2013100571; neuroprotective compounds disclosed in U.S. Pat. Nos. 6,933,310 and 8,399,514 and US Patent Publication Nos. 20110237907 and 20140038927; and glycopeptides taught in U.S. Patent Publication No. 20070185012; the content of each of which is incorporated herein by reference in their entirety.

[1069] Therapeutic agents that may be used in combination therapy with the AAV particles comprising modulatory polynucleotides comprising a nucleic acid sequence encoding the siRNA molecules of the present invention may be hormones or variants that can protect neuronal loss, such as adrenocorticotropic hormone (ACTH) or fragments thereof (e.g., U.S. Patent Publication No. 20130259875); Estrogen (e.g., U.S. Pat. Nos. 6,334,998 and 6,592,845); the content of each of which is incorporated herein by reference in their entirety.

[1070] Neurotrophic factors may be used in combination therapy with the AAV particles comprising modulatory polynucleotides comprising a nucleic acid sequence encoding the siRNA molecules of the present invention for treating ALS. Generally, a neurotrophic factor is defined as a substance that promotes survival, growth, differentiation, proliferation and/or maturation of a neuron, or stimulates increased activity of a neuron. In some embodiments, the present methods further comprise delivery of one or more trophic factors into the subject in need of treatment. Trophic factors may include, but are not limited to, IGF-I, GDNF, BDNF, CTNF, VEGF, Colivelin, Xaliproden, Thyrotrophin-releasing hormone and ADNF, and variants thereof.

[1071] In one aspect, the vector, e.g., AAV particle, encoding the nucleic acid sequence for the at least one siRNA duplex targeting the SOD1 gene may be co-administered with AAV particles expressing neurotrophic factors such as AAV-IGF-I (Vincent et al., Neuromolecular medicine, 2004, 6, 79-85; the content of which is incorporated herein by reference in its entirety) and AAV-GDNF (Wang et al., J Neurosci., 2002, 22, 6920-6928; the content of which is incorporated herein by reference in its entirety).

[1072] In some embodiments, the composition of the present invention for treating ALS is administered to the subject in need intravenously, intramuscularly, subcutaneously, intraperitoneally, intrathecally and/or intraventricularly, allowing the siRNA molecules or vectors comprising the siRNA molecules to pass through one or both the blood-brain barrier and the blood spinal cord barrier. In some aspects, the method includes administering (e.g., intraventricularly administering and/or intrathecally administering) directly to the central nervous system (CNS) of a subject (using, e.g., an infusion pump and/or a delivery scaffold) a therapeutically effective amount of a composition comprising AAV particles comprising modulatory polynucleotides comprising a nucleic acid sequence encoding the siRNA molecules of the present invention. The vectors may be used to silence or suppress SOD1 gene expression, and/or reducing one or more symptoms of ALS in the subject such that ALS is therapeutically treated.

[1073] In certain aspects, the symptoms of ALS include, but are not limited to, motor neuron degeneration, muscle weakness, muscle atrophy, the stiffness of muscle, difficulty in breathing, slurred speech, fasciculation development, frontotemporal dementia and/or premature death are improved in the subject treated. In other aspects, the composition of the present invention is applied to one or both of the brain and the spinal cord. In other aspects, one or both of muscle coordination and muscle function are improved. In other aspects, the survival of the subject is prolonged.

[1074] In one embodiment, administration of the AAV particles comprising modulatory polynucleotides comprising a nucleic acid sequence encoding the siRNA molecules of the present invention, to a subject may lower mutant SOD1 in the CNS of a subject. In another embodiment, administration of the AAV particles, to a subject may lower wild-type SOD1 in the CNS of a subject. In yet another embodiment, administration of the AAV particles, to a subject may lower both mutant SOD1 and wild-type SOD1 in the CNS of a subject. The mutant and/or wild-type SOD1 may be lowered by about 30%, 40%, 50%, 60%, 70%, 80%, 85%, 90%, 95% and 100%, or at least 20-30%, 20-40%, 20-50%, 20-60%, 20-70%, 20-80%, 20-90%, 20-95%, 20-100%, 30-40%, 30-50%, 30-60%, 30-70%, 30-80%, 30-90%, 30-95%, 30-100%, 40-50%, 40-60%, 40-70%, 40-80%, 40-90%, 40-95%, 40-100%, 50-60%, 50-70%, 50-80%, 50-90%, 50-95%, 50-100%, 60-70%, 60-80%, 60-90%, 60-95%, 60-100%, 70-80%, 70-90%, 70-95%, 70-100%, 80-90%, 80-95%, 80-100%, 90-95%, 90-100% or 95-100% in the CNS, a region of the CNS, or a specific cell of the CNS of a subject. As a non-limiting example, the AAV particles may lower the expression of wild-type SOD1 by at least 50% in the motor neurons (e.g., ventral horn motor neurons) and/or astrocytes. As another non-limiting example, the AAV particles may lower the expression of mutant SOD1 by at least 50% in the motor neurons (e.g., ventral horn motor neurons) and/or astrocytes. As yet another non-limiting example, the AAV particles may lower the expression of wild-type SOD1 and mutant SOD1 by at least 50% in the motor neurons (e.g., ventral horn motor neurons) and/or astrocytes.

[1075] In one embodiment, administration of the AAV particles, to a subject will reduce the expression of mutant and/or wild-type SOD1 in the spinal cord and the reduction of expression of the mutant and/or wild-type SOD1 will reduce the effects of ALS in a subject.

[1076] In one embodiment, the AAV particles may be administered to a subject who is in the early stages of ALS. Early stage symptoms include, but are not limited to, muscles which are weak and soft or stiff, tight and spastic, cramping and twitching (fasciculations) of muscles, loss of muscle bulk (atrophy), fatigue, poor balance, slurred words, weak grip, and/or tripping when walking. The symptoms may be limited to a single body region or a mild symptom may affect more than one region. As a non-limiting example, administration of the AAV particles may reduce the severity and/or occurrence of the symptoms of ALS.

[1077] In one embodiment, the AAV particles may be administered to a subject who is in the middle stages of ALS. The middle stage of ALS includes, but is not limited to, more widespread muscle symptoms as compared to the early stage, some muscles are paralyzed while others are weakened or unaffected, continued muscle twitchings (fasciculations), unused muscles may cause contractures where the joints become rigid, painful and sometimes deformed, weakness in swallowing muscles may cause choking and greater difficulty eating and managing saliva, weakness in breathing muscles can cause respiratory insufficiency which can be prominent when lying down, and/or a subject may have bouts of uncontrolled and inappropriate laughing or crying (pseudobulbar affect). As a non-limiting example, administration of the AAV particles may reduce the severity and/or occurrence of the symptoms of ALS.

[1078] In one embodiment, the AAV particles may be administered to a subject who is in the late stages of ALS. The late stage of ALS includes, but is not limited to, voluntary muscles which are mostly paralyzed, the muscles that help move air in and out of the lungs are severely compromised, mobility is extremely limited, poor respiration may cause fatigue, fuzzy thinking, headaches and susceptibility to infection or diseases (e.g., pneumonia), speech is difficult and eating or drinking by mouth may not be possible.

[1079] In one embodiment, the AAV particles may be used to treat a subject with ALS who has a C9orf72 mutation.

[1080] In one embodiment, the AAV particles may be used to treat a subject with ALS who has TDP-43 mutations.

[1081] In one embodiment, the AAV particles may be used to treat a subject with ALS who has FUS mutations.

[1082] In one embodiment, the AAV particle of the present invention comprises an AAVrh10 capsid and a self-complementary AAV viral genome comprising an H1 promoter, a stuffer sequence originating from a pLKO.1 lentiviral vector and a SOD1 targeting payload.

[1083] In one embodiment, the AAV particle of the present invention comprises an AAV2 capsid and a self-complementary AAV viral genome.

[1084] In one embodiment, the AAV particle of the present invention comprises an AAV2 capsid and a self-complementary AAV viral genome comprising an H1 promoter, a stuffer sequence originating from a pLKO.1 lentiviral vector and a SOD1 targeting payload.

### V. Definitions

[1085] Unless stated otherwise, the following terms and phrases have the meanings described below. The definitions are not meant to be limiting in nature and serve to provide a clearer understanding of certain aspects of the present invention.

[1086] As used herein, the term “nucleic acid”, “polynucleotide” and ‘oligonucleotide” refer to any nucleic acid polymers composed of either polydeoxyribonucleotides (containing 2-deoxy-D-ribose), or polyribonucleotides (containing D-ribose), or any other type of polynucleotide which is an N glycoside of a purine or pyrimidine base, or modified purine or pyrimidine bases. There is no intended distinction in length between the term “nucleic acid”, “polynucleotide” and “oligonucleotide”, and these terms will be used interchangeably. These terms refer only to the primary structure of the molecule. Thus, these terms include double- and single-stranded DNA, as well as double- and single stranded RNA.

[1087] As used herein, the term “RNA” or “RNA molecule” or “ribonucleic acid molecule” refers to a polymer of ribonucleotides; the term “DNA” or “DNA molecule” or “deoxyribonucleic acid molecule” refers to a polymer of deoxyribonucleotides. DNA and RNA can be synthesized naturally, e.g., by DNA replication and transcription of DNA, respectively; or be chemically synthesized. DNA and RNA can be single-stranded (i.e., ssRNA or ssDNA, respectively) or multi-stranded (e.g., double stranded, i.e., dsRNA and dsDNA, respectively). The term “mRNA” or “messenger RNA”, as used herein, refers to a single stranded RNA that encodes the amino acid sequence of one or more polypeptide chains.

[1088] As used herein, the term “RNA interfering” or “RNAi” refers to a sequence specific regulatory mechanism mediated by RNA molecules which results in the inhibition or interfering or “silencing” of the expression of a corresponding protein-coding gene. RNAi has been observed in many types of organisms, including plants, animals and fungi. RNAi occurs in cells naturally to remove foreign RNAs (e.g., viral RNAs). Natural RNAi proceeds via fragments cleaved from free dsRNA which direct the degradative mechanism to other similar RNA sequences. RNAi is controlled by the RNA-induced silencing complex (RISC) and is initiated by short/small dsRNA molecules in cell cytoplasm, where they interact with the catalytic RISC component argonaute. The dsRNA molecules can be introduced into cells exogenously. Exogenous dsRNA initiates RNAi by activating the ribonuclease protein Dicer, which binds and cleaves dsRNAs to produce double-stranded fragments of 21-25 base pairs with a few unpaired overhang bases on each end. These short double stranded fragments are called small interfering RNAs (siRNAs).

[1089] As used herein, the terms “short interfering RNA,” “small interfering RNA” or “siRNA” refer to an RNA molecule (or RNA analog) comprising between about 5-60 nucleotides (or nucleotide analogs) which is capable of directing or mediating RNAi. Preferably, a siRNA molecule comprises between about 15-30 nucleotides or nucleotide analogs, such as between about 16-25 nucleotides (or nucleotide analogs), between about 18-23 nucleotides (or nucleotide analogs), between about 19-22 nucleotides (or nucleotide analogs) (e.g., 19, 20, 21 or 22 nucleotides or nucleotide analogs), between about 19-25 nucleotides (or nucleotide analogs), and between about 19-24 nucleotides (or nucleotide analogs). The term “short” siRNA refers to a siRNA comprising 5-23 nucleotides, preferably 21 nucleotides (or nucleotide analogs), for example, 19, 20, 21 or 22 nucleotides. The term “long” siRNA refers to a siRNA comprising 24-60 nucleotides, preferably about 24-25 nucleotides, for example, 23, 24, 25 or 26 nucleotides. Short siRNAs may, in some instances, include fewer than 19 nucleotides, e.g., 16, 17 or 18 nucleotides, or as few as 5 nucleotides, provided that the shorter siRNA retains the ability to mediate RNAi. Likewise, long siRNAs may, in some instances, include more than 26 nucleotides, e.g., 27, 28, 29, 30, 35, 40, 45, 50, 55, or even 60 nucleotides, provided that the longer siRNA retains the ability to mediate RNAi or translational repression absent further processing, e.g., enzymatic processing, to a short siRNA. siRNAs can be single stranded RNA molecules (ss-siRNAs) or double stranded RNA molecules (ds-siRNAs) comprising a sense strand and an antisense strand which hybridized to form a duplex structure called siRNA duplex.

[1090] As used herein, the term “the antisense strand” or “the first strand” or “the guide strand” of a siRNA molecule refers to a strand that is substantially complementary to a section of about 10-50 nucleotides, e.g., about 15-30, 16-25, 18-23 or 19-22 nucleotides of the mRNA of the gene targeted for silencing. The antisense strand or first strand has sequence sufficiently complementary to the desired target mRNA sequence to direct target-specific silencing, e.g., complementarity sufficient to trigger the destruction of the desired target mRNA by the RNAi machinery or process.

[1091] As used herein, the term “the sense strand” or “the second strand” or “the passenger strand” of a siRNA molecule refers to a strand that is complementary to the antisense strand or first strand. The antisense and sense strands of a siRNA molecule are hybridized to form a duplex structure. As used herein, a “siRNA duplex” includes a siRNA strand having sufficient complementarity to a section of about 10-50 nucleotides of the mRNA of the gene targeted for silencing and a siRNA strand having sufficient complementarity to form a duplex with the other siRNA strand.

[1092] As used herein, the term “complementary” refers to the ability of polynucleotides to form base pairs with one another. Base pairs are typically formed by hydrogen bonds between nucleotide units in antiparallel polynucleotide strands. Complementary polynucleotide strands can form base pair in the Watson-Crick manner (e.g., A to T, A to U, C to G), or in any other manner that allows for the formation of duplexes. As persons skilled in the art are aware, when using RNA as opposed to DNA, uracil rather than thymine is the base that is considered to be complementary to adenosine. However, when a U is denoted in the context of the present invention, the ability to substitute a T is implied, unless otherwise stated. Perfect complementarity or 100% complementarity refers to the situation in which each nucleotide unit of one polynucleotide strand can form hydrogen bond with a nucleotide unit of a second polynucleotide strand. Less than perfect complementarity refers to the situation in which some, but not all, nucleotide units of two strands can form hydrogen bond with each other. For example, for two 20-mers, if only two base pairs on each strand can form hydrogen bond with each other, the polynucleotide strands exhibit 10% complementarity. In the same example, if 18 base pairs on each strand can form hydrogen bonds with each other, the polynucleotide strands exhibit 90% complementarity.

[1093] As used herein, the term “substantially complementary” means that the siRNA has a sequence (e.g., in the antisense strand) which is sufficient to bind the desired target mRNA, and to trigger the RNA silencing of the target mRNA.

[1094] As used herein, “targeting” means the process of design and selection of nucleic acid sequence that will hybridize to a target nucleic acid and induce a desired effect.

[1095] The term “gene expression” refers to the process by which a nucleic acid sequence undergoes successful transcription and in most instances translation to produce a protein or peptide. For clarity, when reference is made to measurement of “gene expression”, this should be understood to mean that measurements may be of the nucleic acid product of transcription, e.g., RNA or mRNA or of the amino acid product of translation, e.g., polypeptides or peptides. Methods of measuring the amount or levels of RNA, mRNA, polypeptides and peptides are well known in the art.

[1096] As used herein, the term “mutation” refers to any changing of the structure of a gene, resulting in a variant (also called “mutant”) form that may be transmitted to subsequent generations. Mutations in a gene may be caused by the alternation of single base in DNA, or the deletion, insertion, or rearrangement of larger sections of genes or chromosomes.

[1097] As used herein, the term “vector” means any molecule or moiety which transports, transduces or otherwise acts as a carrier of a heterologous molecule such as the siRNA molecule of the invention. A “viral genome” or “vector genome” or “viral vector” refers to a sequence which comprises one or more polynucleotide regions encoding or comprising a molecule of interest, e.g., a transgene, a polynucleotide encoding a polypeptide or multi-polypeptide or a modulatory nucleic acid such as small interfering RNA (siRNA). Viral genomes are commonly used to deliver genetic materials into cells. Viral genomes are often modified for specific applications. Types of viral genome sequence include retroviral viral genome sequences, lentiviral viral genome sequences, adenoviral viral genome sequences and adeno-associated viral genome sequences.

[1098] The term “adeno-associated virus” or “AAV” as used herein refers to any vector which comprises or derives from components of an adeno-associated vector and is suitable to infect mammalian cells, preferably human cells. The term AAV vector typically designates an AAV type viral particle or virion comprising a payload. The AAV vector may be derived from various serotypes, including combinations of serotypes (i.e., “pseudotyped” AAV) or from various genomes (e.g., single stranded or self-complementary). In addition, the AAV vector may be replication defective and/or targeted.

[1099] As used herein, the phrase “inhibit expression of a gene” means to cause a reduction in the amount of an expression product of the gene. The expression product can be a RNA molecule transcribed from the gene (e.g., an mRNA) or a polypeptide translated from an mRNA transcribed from the gene. Typically a reduction in the level of an mRNA results in a reduction in the level of a polypeptide translated therefrom. The level of expression may be determined using standard techniques for measuring mRNA or protein.

[1100] As used herein, the term “in vitro” refers to events that occur in an artificial environment, e.g., in a test tube or reaction vessel, in cell culture, in a Petri dish, etc., rather than within an organism (e.g., animal, plant, or microbe).

[1101] As used herein, the term “in vivo” refers to events that occur within an organism (e.g., animal, plant, or microbe or cell or tissue thereof).

[1102] As used herein, the term “modified” refers to a changed state or structure of a molecule of the invention. Molecules may be modified in many ways including chemically, structurally, and functionally.

[1103] As used herein, the term “synthetic” means produced, prepared, and/or manufactured by the hand of man. Synthesis of polynucleotides or polypeptides or other molecules of the present invention may be chemical or enzymatic.

[1104] As used herein, the term “transfection” refers to methods to introduce exogenous nucleic acids into a cell. Methods of transfection include, but are not limited to, chemical methods, physical treatments and cationic lipids or mixtures. The list of agents that can be transfected into a cell is large and includes, but is not limited to, siRNA, sense and/or anti-sense sequences, DNA encoding one or more genes and organized into an expression plasmid, proteins, protein fragments, and more.

[1105] As used herein, “off target” refers to any unintended effect on any one or more target, gene, or cellular transcript.

[1106] As used herein, the phrase “pharmaceutically acceptable” is employed herein to refer to those compounds, materials, compositions, and/or dosage forms which are, within the scope of sound medical judgment, suitable for use in contact with the tissues of human beings and animals without excessive toxicity, irritation, allergic response, or other problem or complication, commensurate with a reasonable benefit/risk ratio.

[1107] As used herein, the term “effective amount” of an agent is that amount sufficient to effect beneficial or desired results, for example, clinical results, and, as such, an “effective amount” depends upon the context in which it is being applied. For example, in the context of administering an agent that treats HD, an effective amount of an agent is, for example, an amount sufficient to achieve treatment, as defined herein, of HD, as compared to the response obtained without administration of the agent. For example, in the context of administering an agent that treats ALS, an effective amount of an agent is, for example, an amount sufficient to achieve treatment, as defined herein, of ALS, as compared to the response obtained without administration of the agent.

[1108] As used herein, the term “therapeutically effective amount” means an amount of an agent to be delivered (e.g., nucleic acid, drug, therapeutic agent, diagnostic agent, prophylactic agent, etc.) that is sufficient, when administered to a subject suffering from or susceptible to an infection, disease, disorder, and/or condition, to treat, improve symptoms of, diagnose, prevent, and/or delay the onset of the infection, disease, disorder, and/or condition.

[1109] As used herein, the term “subject” or “patient” refers to any organism to which a composition in accordance with the invention may be administered, e.g., for experimental, diagnostic, prophylactic, and/or therapeutic purposes. Typical subjects include animals (e.g., mammals such as mice, rats, rabbits, non-human primates such as chimpanzees and other apes and monkey species, and humans) and/or plants.

[1110] As used herein, the term “preventing” or “prevention” refers to delaying or forestalling the onset, development or progression of a condition or disease for a period of time, including weeks, months, or years.

[1111] The term “treatment” or “treating,” as used herein, refers to the application of one or more specific procedures used for the cure or amelioration of a disease. In certain embodiments, the specific procedure is the administration of one or more pharmaceutical agents. In the context of the present invention, the specific procedure is the administration of one or more siRNA molecules.

[1112] As used herein, the term “amelioration” or “ameliorating” refers to a lessening of severity of at least one indicator of a condition or disease. For example, in the context of neurodegeneration disorder, amelioration includes the reduction of neuron loss.

[1113] As used herein, the term “administering” refers to providing a pharmaceutical agent or composition to a subject.

[1114] As used herein, the term “neurodegeneration” refers to a pathologic state which results in neural cell death. A large number of neurological disorders share neurodegeneration as a common pathological state. For example, Alzheimer's disease, Parkinson's disease, Huntington's disease, and amyotrophic lateral sclerosis (ALS) all cause chronic neurodegeneration, which is characterized by a slow, progressive neural cell death over a period of several years, whereas acute neurodegeneration is characterized by a sudden onset of neural cell death as a result of ischemia, such as stroke, or trauma, such as traumatic brain injury, or as a result of axonal transection by demyelination or trauma caused, for example, by spinal cord injury or multiple sclerosis. In some neurological disorders, mainly one type of neuronal cell is degenerative, for example, medium spiny neuron degeneration in early HD.

### VI. Equivalents and Scope

[1115] Those skilled in the art will recognize, or be able to ascertain using no more than routine experimentation, many equivalents to the specific embodiments in accordance with the invention described herein. The scope of the present invention is not intended to be limited to the above Description, but rather is as set forth in the appended claims.

[1116] In the claims, articles such as “a,” “an,” and “the” may mean one or more than one unless indicated to the contrary or otherwise evident from the context. Claims or descriptions that include “or” between one or more members of a group are considered satisfied if one, more than one, or all of the group members are present in, employed in, or otherwise relevant to a given product or process unless indicated to the contrary or otherwise evident from the context. The invention includes embodiments in which exactly one member of the group is present in, employed in, or otherwise relevant to a given product or process. The invention includes embodiments in which more than one, or the entire group members are present in, employed in, or otherwise relevant to a given product or process.

[1117] It is also noted that the term “comprising” is intended to be open and permits but does not require the inclusion of additional elements or steps. When the term “comprising” is used herein, the term “consisting of” is thus also encompassed and disclosed.

[1118] Where ranges are given, endpoints are included. Furthermore, it is to be understood that unless otherwise indicated or otherwise evident from the context and understanding of one of ordinary skill in the art, values that are expressed as ranges can assume any specific value or subrange within the stated ranges in different embodiments of the invention, to the tenth of the unit of the lower limit of the range, unless the context clearly dictates otherwise.

[1119] In addition, it is to be understood that any particular embodiment of the present invention that falls within the prior art may be explicitly excluded from any one or more of the claims. Since such embodiments are deemed to be known to one of ordinary skill in the art, they may be excluded even if the exclusion is not set forth explicitly herein. Any particular embodiment of the compositions of the invention (e.g., any antibiotic, therapeutic or active ingredient; any method of production; any method of use; etc.) can be excluded from any one or more claims, for any reason, whether or not related to the existence of prior art.

[1120] It is to be understood that the words which have been used are words of description rather than limitation, and that changes may be made within the purview of the appended claims without departing from the true scope and spirit of the invention in its broader aspects.

[1121] While the present invention has been described at some length and with some particularity with respect to the several described embodiments, it is not intended that it should be limited to any such particulars or embodiments or any particular embodiment, but it is to be construed with references to the appended claims so as to provide the broadest possible interpretation of such claims in view of the prior art and, therefore, to effectively encompass the intended scope of the invention.

### VII. Examples

### Example 1. AAV-miRNA Expression Vectors

[1122] The constructs comprising the pri-miRNA cassettes containing guide strands targeting HTT and passenger strands were engineered into AAV-miRNA expression vectors (either ss or sc). The AAV-miRNA expression vector construct from ITR to ITR, recited 5′ to 3′, comprises an ITR (mutant or wild-type), a promoter comprising either a CMV (which includes an SV40 intron), U6, H1, CBA (which includes a CMVie enhancer, a CB promoter and an SV40 intron) or CAG promoter (which includes a CMVie enhancer, a CB promoter and a rabbit betaglobin intron), the pri-miRNA cassette, a rabbit globin polyA or human growth hormone and wild type ITR. In vitro and in vivo studies are performed to evaluate the pharmacological activity of the AAV-miRNA expression vectors.

### Example 2. In Vivo Studies of AAV-miRNA

### A. In Vivo Studies of Efficacy

[1123] Based on HTT suppression in YAC128 mice, guide to passenger ratio, and precision of 5′ end processing, selected AAV-miRNA expression vectors are packaged in AAV1 (either as ss or sc) with a CBA promoter (AAV1.CBA.iHtt), formulated in phosphate buffered saline (PBS) with 0.001% F-68 and administered to YAC128 mice to assess efficacy. AAV1 vectors are administered to YAC128 mice 7-12 weeks of age via bilateral intrastriatal infusion at a dose of approximately 1E10 to 3E10 vg in 5 uL over 10 minutes per hemisphere. A control group is treated with vehicle (PBS with 0.001% F-68). Following test article administration, behavioral tests including rotarod and Porsolt swim tests are performed at pre-determined time intervals, to assess efficacy. At a pre-determined day post-dosing, animals are euthanized, and striatum tissue punches are collected and snap-frozen. Tissue samples are homogenized and the total RNA is purified. The relative expression of HTT is determined by qRT-PCR. Housekeeping genes for normalization included mouse XPNPEP1. HTT is normalized to housekeeping gene expression, and then further normalized to the vehicle group. Samples are also used to quantify HTT protein.

### B. In Vivo Study in NHP of HTT Suppression, Guide to Passenger Ratio and 5′ End Precision of Processing

[1124] Based on HTT suppression in YAC128 mice, guide to passenger ratio, and precision of 5′ end processing, selected AAV-miRNA expression vectors are packaged in AAV1 with a CBA promoter (AAV1.CBA.iHtt), formulated in phosphate buffered saline (PBS) with 0.001% F-68 and administered to non-human primates by intraparenchymal brain infusion. A control group is treated with vehicle (PBS with 0.001% F-68). The relative expression of HTT mRNA, guide to passenger ratio, and the precision of 5′ end processing is determined in various tissue samples at a pre-determined time post-dosing.

### Example 3. Activity of Polycistronic Constructs in HEK293T and HeLa Cells

[1125] The polycistronic miRNA expression vectors encoding VOYHTmiR-104.016 (SEQ ID NO: 1589) and VOYHTmiR-127.579 (SEQ ID NO: 1599) were packaged in AAV2, and infected into HEK293T cells and HeLa cells. For HEK293T, the cells were plated into 96-well plates (2.5E4 cells/well in 100 ul cell culture medium) and infected with polycistronic miRNA expression vectors. The HeLa cells were plated into 96-well plates (1E4 cells/well in 100 ul cell culture medium). 24 hours after infection, the cells were harvested for immediate cell lysis and measurement of luciferase activity or isolation of RNA for qRT-PCR.

### A. Activity of Polycistronic Constructs (125 pM and 250 pM)

[1126] The relative activity (relative luciferase) of the polycistronic constructs 48 hours after transfection at 125 pM and 250 pM was determined by luciferase activity for the HEK293T and HeLa cells. The relative activity was obtained by normalizing the renilla luciferase level to the interal control firefly luciferase level as determined by duo-luciferase assay.

[1127] The RLU for the polycistronic constructs and the description of the constructs tested are shown in Table 47. In Table 47, two modulatory polynucleotides were tested in each vector and the modulatory polynucleotides were in tandem. In the table, the vector encodes the A modulatory polynucleotide before the B modulatory polynucleotide.

[1128] For the HEK293T cells, the control had a RLU of 1 at 125 pM and 1.11 at 250 pM. The construct encoding one VOYHTmiR-104.016 modulatory polynucleotide (SEQ ID NO: 1589) transfected at 125 pM provided a RLU of 0.13 and at 250 pM provided a RLU of 0.14. The construct encoding the VOYHTmiR-127.579 modulatory polynucleotide (SEQ ID NO: 1599) transfected at 125 pM provided a RLU of 0.14 and at 250 pM provided a RLU of 0.14. When two vectors each encoding one of the two modulatory polynucleotides (VOYHTmiR-104.016 (SEQ ID NO: 1589]) and VOYHTmiR-127.579 (SEQ ID NO: 1599)) were transfected at the same time at 125 pM each, a RLU of 0.06 was seen.

[1129] For the HeLa cells, the control had a RLU of 1 at 125 pM and 0.99 at 250 pM. The construct encoding the VOYHTmiR-104.016 modulatory polynucleotide (SEQ ID NO: 1589) transfected at 125 pM provided a RLU of 0.26 and at 250 pM provided a RLU of 0.27. The construct encoding the VOYHTmiR-127.579 modulatory polynucleotide (SEQ ID NO: 1599) transfected at 125 pM provided a RLU of 0.20 and at 250 pM provided a RLU of 0.12. When two constructs each encoding one of the two modulatory polynucleotides (VOYHTmiR-104.016 (SEQ ID NO: 1589) and VOYHTmiR-127.579 (SEQ ID NO: 1599)) were transfected at the same time at 125 pM each, a RLU of 0.22 was seen.

TABLE 47
Polycistronic activity

| Modulatory | Modulatory | | RLU | | | |
|---|---|---|---|---|---|---|
| Polynucleotide | Polynucleotide | Sequence | HEK293T | | HeLa | |
| Name | SEQ ID | Name | 125 pM | 250 pM | 125 pM | 250 pM |
| A: VOYHTmiR-104.016 | A: 1589 | VOYPC13 | 0.13 | 0.17 | 0.23 | 0.26 |
| B: VOYHTmiR-104.016 | B: 1589 | | | | | |
| A: VOYHTmiR-127.579 | A: 1599 | VOYPC14 | 0.05 | 0.06 | 0.08 | 0.09 |
| B: VOYHTmiR-104.016 | B: 1589 | | | | | |
| A: VOYHTmiR-104.016 | A: 1589 | VOYPC15 | 0.05 | 0.06 | 0.16 | 0.17 |
| B: VOYHTmiR-127.579 | B: 1599 | | | | | |
| A: VOYHTmiR-127.579 | A: 1599 | VOYPC16 | 0.13 | 0.14 | 0.18 | 0.17 |
| B: VOYHTmiR-127.579 | B: 1599 | | | | | |

[1130] The vectors encoding both the VOYHTmiR-104.016 and VOYHTmiR-127.579 in tandem showed the best activity as compared to the controls.

### B. Activity of Polycistronic Constructs (62.5 pM and 125 pM) and Length of Vector

[1131] The relative activity (relative luciferase) of the polycistronic constructs with and without filler DNA (to make the total DNA content the same in each condition) 40 hours after transfection at 62.5 pM and 125 pM was determined by Duo-Luciferase assay for HeLa cells. The relative activity was obtained by normalizing the renilla luciferase level to the internal control firefly luciferase level as determined by duo-luciferase assay. The RLU for the polycistronic constructs and the description of the constructs tested are shown in Table 48. In Table 48, two modulatory polynucleotides were tested in each construct and the modulatory polynucleotides were in tandem. In the table, the construct encodes the A modulatory polynucleotide before the B modulatory polynucleotide.

[1132] For constructs with filler DNA, the control had a RLU of 1 at 62.5 pM and 125 pM. The constructs encoding the VOYHTmiR-104.016 modulatory polynucleotide (SEQ ID NO: 1589) transfected at 62.5 pM provided a RLU of 0.45 and at 125 pM provided a RLU of 0.31. The constructs encoding the VOYHTmiR-127.579 modulatory polynucleotide (SEQ ID NO: 1599) transfected at 62.5 pM provided a RLU of 0.25 and at 125 pM provided a RLU of 0.20. When two constructs each encoding one of the two modulatory polynucleotides (VOYHTmiR-104.016 (SEQ ID NO: 1589) and VOYHTmiR-127.579 (SEQ ID NO: 1599)) were transfected at the same time at 62.5 pM each, a RLU of 0.26 was seen.

[1133] For constructs without filler DNA, the control had a RLU of 1 at 62.5 pM and 125 pM. The constructs encoding the VOYHTmiR-104.016 modulatory polynucleotide (SEQ ID NO: 1589) transfected at 62.5 pM provided a RLU of 0.31 and at 125 pM provided a RLU of 0.24. The constructs encoding the VOYHTmiR-127.579 modulatory polynucleotide (SEQ ID NO: 1599) transfected at 62.5 pM provided a RLU of 0.29 and at 125 pM provided a RLU of 0.24. When two constructs each encoding one of the two modulatory polynucleotides (VOYHTmiR-104.016 (SEQ ID NO: 1589) and VOYHTmiR-127.579 (SEQ ID NO: 1599)) were transfected at the same time at 62.5 pM each, a RLU of 0.23 was seen.

TABLE 48
Polycistronic activity

| Modulatory | Modulatory | | RLU | | | |
|---|---|---|---|---|---|---|
| Polynucleotide | Polynucleotide | Sequence | With Filler DNA | | Without Filler DNA | |
| Name | SEQ ID | Name | 62.5 pM | 125 pM | 62.5 pM | 125 pM |
| A: VOYHTmiR-104.016 | A: 1589 | VOYPC13 | 0.41 | 0.38 | 0.36 | 0.37 |
| B: VOYHTmiR-104.016 | B: 1589 | | | | | |
| A: VOYHTmiR-127.579 | A: 1599 | VOYPC14 | 0.17 | 0.15 | 0.16 | 0.15 |
| B: VOYHTmiR-104.016 | B: 1589 | | | | | |
| A: VOYHTmiR-104.016 | A: 1589 | VOYPC15 | 0.36 | 0.24 | 0.35 | 0.23 |
| B: VOYHTmiR-127.579 | B: 1599 | | | | | |
| A: VOYHTmiR-127.579 | A: 1599 | VOYPC16 | 0.30 | 0.23 | 0.29 | 0.23 |
| B: VOYHTmiR-127.579 | B: 1599 | | | | | |

[1134] Both the higher and lower dose of the constructs showed similar expression with and without the filler DNA. The constructs with the VOYHTmiR-127.579 and VOYHTmiR-104.016 modulatory polynucleotides in tandem showed the lowest RLU for both transfection conditions.

C. HTT Suppression after Transfection with Polycistronic Constructs

[1135] The relative expression of HTT mRNA 48 hours after transfection at a 125 pM or 250 pM was determined by qRT-PCR for HeLa. The relative HTT mRNA expression was obtained by normalizing the HTT mRNA level to the housekeeping gene mRNA level as determined by qRT-PCR; this normalized HTT mRNA level was then expressed relative to the normalized HTT mRNA level in control treated cells. The results for the polycistronic constructs and the description of the constructs tested are shown in Table 49. In Table 49, two modulatory polynucleotides were tested in each construct and the modulatory polynucleotides were in tandem. In the table, the construct encodes the A modulatory polynucleotide before the B modulatory polynucleotide.

[1136] The constructs encoding the VOYHTmiR-104.016 modulatory polynucleotide (SEQ ID NO: 1589) transfected at 125 pM provided a relative Htt mRNA level (normalized to control) of 50% and at 250 pM provided a relative Htt mRNA level (normalized to control) of 61%. The constructs encoding the VOYHTmiR-127.579 modulatory polynucleotide (SEQ ID NO: 1599) transfected at 125 pM provided a relative Htt mRNA level (normalized to control) of 52% and at 250 pM provided a relative Htt mRNA level (normalized to control) of 56%. When two constructs each encoding one of the two modulatory polynucleotides (VOYHTmiR-104.016 (SEQ ID NO: 1589) and VOYHTmiR-127.579 (SEQ ID NO: 1599)) were transfected at the same time at 125 pM each, a relative Htt mRNA level (normalized to control) of 49% was seen.

TABLE 49
Knock-Down of HTT

| | | | Relative HTT | |
|---|---|---|---|---|
| | | | mRNA Level (%) | |
| | Modulatory | | (normalized | |
| | polynu- | | to Control) | |
| Modulatory Polynu- | cleotide | Sequence | HeLa | |
| cleotide Name | SEQ ID | Name | 125 pM | 250 pM |
| A: VOYHTmiR-104.016 | A: 1589 | VOYPC13 | 43 | 50 |
| B: VOYHTmiR-104.016 | B: 1589 | | | |
| A: VOYHTmiR-127.579 | A: 1599 | VOYPC14 | 43 | 36 |
| B: VOYHTmiR-104.016 | B: 1589 | | | |
| A: VOYHTmiR-104.016 | A: 1589 | VOYPC15 | 49 | 50 |
| B: VOYHTmiR-127.579 | B: 1599 | | | |
| A: VOYHTmiR-127.579 | A: 1599 | VOYPC16 | 55 | 50 |
| B: VOYHTmiR-127.579 | B: 1599 | | | |

[1137] The constructs encoding both the VOYHTmiR-104.016 and VOYHTmiR-127.579 in tandem showed the best activity as compared to the controls for both transfection conditions.

D. HTT Suppression after Infection at MOI of 1E4 and 1E5 vg/cell

[1138] The relative expression of HTT mRNA 24 hours after infection at a MOI of 1E4 or 1E5 vg/cell was determined by qRT-PCR for HEK293T and HeLa cells. The relative HTT mRNA expression was obtained by normalizing the HTT mRNA level to the housekeeping gene mRNA level as determined by qRT-PCR; this normalized HTT mRNA level was then expressed relative to the normalized HTT mRNA level in mCherry-treated cells. The results are shown in Tables 50 and 51.

TABLE 50
Knock-Down of HTT

| | | Relative HTT | | | |
|---|---|---|---|---|---|
| | | mRNA Level (%) | | | |
| Modulatory | Modulatory | (normalized to Control) | | | |
| Polynucleotide | polynucleotide | HEK293T | | HeLa | |
| Name | SEQ ID | 1E4 | 1E5 | 1E4 | 1E5 |
| VOYHTmiR-104.016 | 1589 | 42 | 28 | 75 | 47 |
| VOYHTmiR-127.579 | 1599 | 44 | 29 | 67 | 45 |
| Construct 1: | Construct 1: | 35 | 27 | 67 | 46 |
| VOYHTmiR-104.016 | 1589 | | | | |
| Construct 2: | Construct 2: | | | | |
| VOYHTmiR-127.579 | 1599 | | | | |
| Untreated | — | 86 | 91 | 67 | 96 |

TABLE 51
Knock-Down of HTT

| | | | Relative HTT | | | |
|---|---|---|---|---|---|---|
| | | | mRNA Level (%) | | | |
| Modulatory | Modulatory | | (normalized to Control) | | | |
| Polynucleotide | polynucleotide | Sequence | HEK293T | | HeLa | |
| Name | SEQ ID | Name | 1E4 | 1E5 | 1E4 | 1E5 |
| A: VOYHTmiR-104.016 | A: 1589 | VOYPC13 | 48 | 27 | 47 | 46 |
| B: VOYHTmiR-104.016 | B: 1589 | | | | | |
| A: VOYHTmiR-127.579 | A: 1599 | VOYPC14 | 32 | 22 | 46 | 28 |
| B: VOYHTmiR-104.016 | B: 1589 | | | | | |
| A: VOYHTmiR-104.016 | A: 1589 | VOYPC15 | 30 | 23 | 60 | 26 |
| B: VOYHTmiR-127.579 | B: 1599 | | | | | |
| A: VOYHTmiR-127.579 | A: 1599 | VOYPC16 | 39 | 28 | 67 | 34 |
| B: VOYHTmiR-127.579 | B: 1599 | | | | | |

[1139] The vectors encoding both the VOYHTmiR-104.016 and VOYHTmiR-127.579 in tandem showed the best activity as compared to the controls for both infection levels in both cell types.

### E. Activity of Polycistronic Constructs (62.5 pM and 125 pM)

[1140] The relative activity (relative luciferase) of the polycistronic constructs 48 hours after transfection at 62.5 pM and 125 pM was determined by duo-luciferase assay for the HEK293T and HeLa cells. The relative activity was obtained by normalizing the renilla luciferase level to the internal control firefly luciferase level as determined by duo-luciferase assay. The RLU for the polycistronic constructs and the description of the constructs tested are shown in Tables 52-53. In Table 53, two, three or four modulatory polynucleotides were tested in each construct and the modulatory polynucleotides were in tandem. For example, if there are two modulatory polynucleotides, the construct encodes the A modulatory polynucleotide before the B modulatory polynucleotide.

TABLE 52
Knock-Down of HTT

| | | RLU | | | |
|---|---|---|---|---|---|
| Modulatory | Modulatory | HEK293T | | HEK293T | |
| Polynucleotide | polynucleotide | 62.5 | 62.5 | 62.5 | 62.5 |
| Name | SEQ ID | pM | pM | pM | pM |
| VOYHTmiR-104.016 | 1589 | 0.24 | 0.2 | 0.59 | 0.3 |
| VOYHTmiR-127.579 | 1599 | 0.31 | 0.23 | 0.84 | 0.27 |
| Construct 1: | Construct 1: | 0.1 | 0.11 | 0.25 | 0.2 |
| VOYHTmiR-104.016 | 1589 | | | | |
| Construct 2: | Construct 2: | | | | |
| VOYHTmiR-127.579 | 1599 | | | | |
| Untreated | — | 0.24 | 0.2 | 0.59 | 0.3 |

TABLE 53
Polycistronic activity

| Modulatory | Modulatory | | RLU | | | |
|---|---|---|---|---|---|---|
| Polynucleotide | polynucleotide | Sequence | 293T | | HeLa | |
| Name | SEQ ID | Name | 62.5 pM | 125 pM | 62.5 pM | 125 pM |
| A: VOYHTmiR-127.579 | A: 1599 | VOYPC14 | 0.11 | 0.09 | 0.26 | 0.11 |
| B: VOYHTmiR-104.016 | B: 1589 | | | | | |
| A: VOYHTmiR-127.579 | A: 1599 | VOYPC35 | 0.11 | 0.11 | 0.28 | 0.28 |
| B: VOYHTmiR-104.016 | B: 1589 | | | | | |
| C: VOYHTmiR-104.016 | C: 1589 | | | | | |
| A: VOYHTmiR-127.579 | A: 1599 | VOYPC36 | 0.07 | 0.07 | 0.16 | 0.10 |
| B: VOYHTmiR-104.016 | B: 1589 | | | | | |
| C: VOYHTmiR-127.579 | C: 1599 | | | | | |
| A: VOYHTmiR-127.579 | A: 1599 | VOYPC51 | 0.08 | 0.07 | 0.18 | 0.12 |
| B: VOYHTmiR-104.016 | B: 1589 | | | | | |
| C: VOYHTmiR-127.579 | C: 1599 | | | | | |
| D: VOYHTmiR-104.016 | D: 1589 | | | | | |
| A: VOYHTmiR-127.579 | A: 1599 | VOYPC52 | 0.07 | 0.07 | 0.16 | 0.10 |
| B: VOYHTmiR-104.016 | B: 1589 | | | | | |
| C: VOYHTmiR-104.016 | C: 1589 | | | | | |
| D: VOYHTmiR-127.579 | D: 1599 | | | | | |

[1141] The constructs encoding more than two modulatory polynucleotides gave the lowest RLU values for both transfection conditions in both cell types.

### Example 4. Activity of Polycistronic Constructs in HEK293T and HeLa Cells

[1142] The polycistronic miRNA expression constructs encoding VOYHTmiR-104.579 (SEQ ID NO: 1595) and VOYHTmiR-127.016 (SEQ ID NO: 1593) were packaged in scAAV2, and infected into HEK293T cells and HeLa cells. For HEK293T, the cells were plated into 96-well plates (2.5E4 cells/well in 100 ul cell culture medium) and infected with polycistronic miRNA expression vectors. The HeLa cells were plated into 96-well plates (1E4 cells/well in 100 ul cell culture medium). 24 hours after infection, the cells were harvested for immediate cell lysis and measurement of luciferase activity or isolation for qRT-PCR.

### A. Activity of Polycistronic Constructs (62.5 pM and 125 pM)

[1143] The relative activity (relative luciferase) of the polycistronic constructs 48 hours after transfection at 62.5 pM and 125 pM was determined by qRT-PCR for HEK293T and HeLa cells. The relative activity was obtained by normalizing the renilla luciferase level to the internal control firefly luciferase level as determined by duo-luciferase assay. The RLU for the polycistronic constructs and the description of the constructs tested are shown in Tables 54-55. In Table 55, two modulatory polynucleotides were tested in each construct and the modulatory polynucleotides were in tandem. In the table, the construct encodes the A modulatory polynucleotide before the B modulatory polynucleotide.

TABLE 54
Knock-Down of HTT

| | | RLU | | | |
|---|---|---|---|---|---|
| Modulatory | Modulatory | HEK293T | | HeLa | |
| Polynucleotide | polynucleotide | 62.5 | 125 | 62.5 | 125 |
| Name | SEQ ID | pM | pM | pM | pM |
| VOYHTmiR-104.579 | 1595 | 0.24 | 0.13 | 0.51 | 0.25 |
| VOYHTmiR-127.016 | 1593 | 0.33 | 0.16 | 0.23 | 0.22 |
| Construct 1: | Construct 1: | 0.07 | 0.06 | 0.08 | 0.12 |
| VOYHTmiR-104.579 | 1595 | | | | |
| Construct 2: | Construct 2: | | | | |
| VOYHTmiR-127.016 | 1593 | | | | |

TABLE 55
Polycistronic activity

| Modulatory | Modulatory | | RLU | | | |
|---|---|---|---|---|---|---|
| Polynucleotide | polynucleotide | Sequence | HEK293T | | HeLa | |
| Name | SEQ ID | Name | 62.5 pM | 125 pM | 62.5 pM | 125 pM |
| A: VOYHTmiR-127.579 | A: 1599 | VOYPC14 | 0.12 | 0.09 | 0.19 | 0.27 |
| B: VOYHTmiR-104.016 | B: 1589 | | | | | |
| A: VOYHTmiR-104.579 | A: 1595 | VOYPC17 | 0.33 | 0.18 | 0.55 | 0.93 |
| B: VOYHTmiR-104.579 | B: 1595 | | | | | |
| A: VOYHTmiR-127.016 | A: 1593 | VOYPC18 | 0.21 | 0.15 | 0.16 | 0.21 |
| B: VOYHTmiR-127.016 | B: 1593 | | | | | |
| A: VOYHTmiR-104.579 | A: 1595 | VOYPC19 | 0.09 | 0.05 | 0.10 | 0.07 |
| B: VOYHTmiR-127.016 | B: 1593 | | | | | |
| A: VOYHTmiR-127.016 | A: 1593 | VOYPC20 | 0.07 | 0.04 | 0.09 | 0.09 |
| B: VOYHTmiR-104.579 | B: 1595 | | | | | |

[1144] The constructs with the VOYHTmiR-127.016 and VOYHTmiR-104.579 modulatory polynucleotides in tandem in any order showed the lowest RLU for both transfection conditions.

### B. Activity of Polycistronic Constructs (62.5 pM and 125 pM) in HeLa at 48 and 72 Hours

[1145] The relative expression of HTT mRNA 48 and 72 hours after transfection at 62.5 pM and 125 pM was determined by qRT-PCR for HeLa cells. The relative HTT mRNA expression was obtained by normalizing the HTT mRNA level to the housekeeping gene mRNA level as determined by qRT-PCR; this normalized HTT mRNA level was then expressed relative to the normalized HTT mRNA level in mCherry-treated cells. The results and the description of the constructs tested are shown in Table 56-57. In Table 57, two modulatory polynucleotides were tested in each vector and the modulatory polynucleotides were in tandem. In the table, the vector encodes the A modulatory polynucleotide before the B modulatory polynucleotide.

TABLE 56
Knock-Down of HTT

| | | Relative HTT | |
|---|---|---|---|
| | | mRNA Level (%) | |
| Modulatory | Modulatory | (normalized to Control) | |
| Polynucleotide | polynucleotide | 48 hours | |
| Name | SEQ ID | 62.5 pM | 125 pM |
| VOYHTmiR-104.579 | 1595 | 73 | 91 |
| VOYHTmiR-127.016 | 1593 | 52 | 51 |
| Construct 1: | Construct 1: | 43 | 23 |
| VOYHTmiR-104.579 | 1595 | | |
| Construct 2: | Construct 2: | | |
| VOYHTmiR-127.016 | 1593 | | |

TABLE 57
Knock-Down of HTT

| | | | Relative HTT | |
|---|---|---|---|---|
| | | | mRNA Level (%) | |
| | | Polycistronic | (normalized | |
| | Modulatory | miRNA | to Control) | |
| | polynu- | expression | 62.5 pM | |
| Modulatory Polynu- | cleotide | vector | 48 | 72 |
| cleotide Name | SEQ ID | SEQ ID | Hours | Hours |
| A: VOYHTmiR-104.579 | A: 1595 | VOYPC17 | 97 | 88 |
| B: VOYHTmiR-104.579 | B: 1595 | | | |
| A: VOYHTmiR-127.016 | A: 1593 | VOYPC18 | 36 | 39 |
| B: VOYHTmiR-127.016 | B: 1593 | | | |
| A: VOYHTmiR-104.579 | A: 1595 | VOYPC19 | 37 | 37 |
| B: VOYHTmiR-127.016 | B: 1593 | | | |
| A: VOYHTmiR-127.016 | A: 1593 | VOYPC20 | 49 | 51 |
| B: VOYHTmiR-104.579 | B: 1595 | | | |

[1146] The constructs with the VOYHTmiR-127.016 and VOYHTmiR-104.579 modulatory polynucleotides in tandem in any order showed the lowest relative Htt mRNA levels for both time points.

### Example 5. Activity of Polycistronic Constructs in HEK293T Cells

[1147] To determine relative activities for inhibiting the target gene, miRNA expression vectors encoding VOYHTmiR-104.016 (SEQ ID NO: 1589) and/or VOYHTmiR-127.579 (SEQ ID NO: 1599) singly or in various tandem combinations comprising two, three or four modulatory polynucleotides were constructed and either transfected into HEK293T cells as plasmids, or packaged in AAV2 and infected into HEK293T cells, and then target gene mRNA levels were measured.

A. Activity of Polycistronic Constructs with Up to 2 Modulatory Polynucleotides after Plasmid Transfection

[1148] HEK293T cells were plated into 96-well plates (2.5E4 cells/well in 100 ul cell culture medium) and co-transfected with miRNA expression plasmid (62.5 or 125 pM) and a dual-luciferase plasmid containing the firefly luciferase gene for normalization of transfection efficiency and the VOYHTmiR-104.016 and VOYHTmiR-127.579 target regions of the huntingtin (HTT) gene cloned downstream of the stop codon for the Renilla luciferase gene. At 24 or 36 hours after transfection, the relative activities of the polycistronic constructs for inhibiting the HTT target mRNA were determined by measuring the Renilla and firefly luciferase activities with the Dual-Glo™ Luciferase Assay System, and normalizing the Renilla luciferase activity to the internal control firefly luciferase activity. These normalized Renilla luciferase activities (RLU, relative light units) were then expressed relative to normalized Renilla luciferase activity (average set to 1) in HEK293T cells transfected with control plasmid (pcDNA) at the same concentration.

[1149] The relative RLU (mean±standard deviation) for the various constructs and the description of the constructs tested are shown in Table 58 for 24 and 36 hours after transfection. Two constructs, each encoding a single modulatory polynucleotide—either VOYHTmiR-104.016 (SEQ ID NO: 1589) or VOYHTmiR-127.579 (SEQ ID NO: 1599)—served as references for four constructs that each encoded two modulatory polynucleotides (VOYHTmiR-104.016 (SEQ ID NO: 1589) and/or VOYHTmiR-127.579 (SEQ ID NO: 1599)) in tandem, where each polynucleotide is driven by its own H1 promoter and followed by its own H1 terminator. In Table 58, the construct encodes the A modulatory polynucleotide before the B modulatory polynucleotide. N/A means not applicable.

TABLE 58
Polycistronic Activity After Transfection of HEK293T Cells

| Modulatory | Modulatory | | Relative RLU at | | Relative RLU at | |
|---|---|---|---|---|---|---|
| Polynucleotide | polynucleotide | Sequence | 24 Hours | | 36 Hours | |
| Name | SEQ ID | Name | 62.5 pM | 125 pM | 62.5 pM | 125 pM |
| Construct 1: | 1589 (ITR to | N/A | 0.15 ± 0.01 | 0.15 ± 0.01 | 0.07 ± 0.00 | 0.07 ± 0.00 |
| VOYHTmiR-104.016 | ITR sequence: | | | | | |
| | SEQ ID NO: 2691) | | | | | |
| Construct 2: | 1599 (ITR to | N/A | 0.15 ± 0.02 | 0.14 ± 0.01 | 0.08 ± 0.00 | 0.07 ± 0.00 |
| VOYHTmiR-127.579 | ITR sequence: | | | | | |
| | SEQ ID NO: 2690) | | | | | |
| Construct 1: | Construct 1: 1589 | N/A | 0.11 ± 0.01 | 0.09 ± 0.01 | 0.03 ± 0.00 | 0.03 ± 0.00 |
| VOYHTmiR-104.016 | Construct 2: 1599 | | | | | |
| Construct 2: | | | | | | |
| VOYHTmiR-127.579 | | | | | | |
| A: VOYHTmiR-104.016 | A: 1589 | VOYPC59 | 0.08 ± 0.02 | 0.10 ± 0.03 | 0.03 ± 0.00 | 0.03 ± 0.00 |
| B: VOYHTmiR-104.016 | B: 1589 | | | | | |
| A: VOYHTmiR-127.579 | A: 1599 | VOYPC61 | 0.08 ± 0.02 | 0.08 ± 0.02 | 0.03 ± 0.00 | 0.03 ± 0.00 |
| B: VOYHTmiR-104.016 | B: 1589 | | | | | |
| A: VOYHTmiR-104.016 | A: 1589 | VOYPC60 | 0.09 ± 0.02 | 0.10 ± 0.02 | 0.03 ± 0.00 | 0.03 ± 0.00 |
| B: VOYHTmiR-127.579 | B: 1599 | | | | | |
| A: VOYHTmiR-127.579 | A: 1599 | VOYPC62 | 0.15 ± 0.03 | 0.13 ± 0.02 | 0.07 ± 0.00 | 0.07 ± 0.00 |
| B: VOYHTmiR-127.579 | B: 1599 | | | | | |

[1150] These results demonstrate that sequences VOYPC59, VOYPC60 and VOYPC61, each containing two modulatory polynucleotides in tandem (either two copies of VOYHTmiR-104.016 (SEQ ID NO: 1589), or a combination of one copy of VOYHTmiR-104.016 (SEQ ID NO: 1589) and one copy of VOYHTmiR-127.579 (SEQ ID NO: 1599)), provide more target lowering than the constructs containing a single modulatory polynucleotide (either VOYHTmiR-104.016 (SEQ ID NO: 1589) or VOYHTmiR-127.579 (SEQ ID NO: 1599)).

B. Activity of Polycistronic Constructs with Up to 4 Modulatory Polynucleotides after Infection with AAV

[1151] HEK293T cells were plated into 96-well plates (2.5E4 cells/well in 100 ul cell culture medium), and infected with miRNA expression vectors packaged in AAV2 at an MOI of 1×10³ vector genomes per cell, as well as transfected with a dual-luciferase plasmid containing the firefly luciferase gene for normalization of transfection efficiency and the VOYHTmiR-104.016 and VOYHTmiR-127.579 target regions of the HTT gene cloned downstream of the stop codon for the Renilla luciferase gene. At 48 hours after infection, the relative activities of the constructs for inhibiting the HTT target mRNA were determined by measuring the Renilla and firefly luciferase activities with the Dual-Glo™ Luciferase Assay System, and normalizing the Renilla luciferase activity to the internal control firefly luciferase activity. These normalized Renilla luciferase activities (RLU, relative light units) were then expressed relative to normalized Renilla luciferase activity (average set to 1) in HEK293T cells infected with control vector (AAV2.mCherry) at the same MOI, or uninfected HEK293T cells.

[1152] The relative RLU (mean±standard deviation) for the various constructs and the description of the constructs tested are shown in Table 59. Two AAV vectors, each encoding a single modulatory polynucleotide—either VOYHTmiR-104.016 (SEQ ID NO: 1589) or VOYHTmiR-127.579 (SEQ ID NO: 1599)—served as references for sixteen AAV vectors that contained two, three or four modulatory polynucleotides (VOYHTmiR-104.016 (SEQ ID NO: 1589) and/or VOYHTmiR-127.579 (SEQ ID NO: 1599)) in tandem, where each polynucleotide is driven by its own Pol III H1 promoter and followed by its own H1 terminator. In Table 59, the construct encodes the A modulatory polynucleotide before the B modulatory polynucleotide, which in turn is before the C modulatory polynucleotide, which in turn is before the D modulatory polynucleotide. N/A means not applicable.

TABLE 59
Polycistronic Activity After AAV Infection of HEK293T Cells

| Modulatory | Modulatory | | RLU |
|---|---|---|---|
| Polynucleotide | polynucleotide | Sequence | (Relative to |
| Name | SEQ ID | Name | Uninfected) |
| mCherry | N/A | N/A | 0.99 ± 0.02 |
| Uninfected | N/A | N/A | 1.00 ± 0.03 |
| VOYHTmiR-104.016 | 1589 (ITR | N/A | 0.25 ± 0.01 |
| | to ITR sequence: | | |
| | SEQ ID NO: 2691) | | |
| A: VOYHTmiR-104.016 | A: 1589 | VOYPC59 | 0.25 ± 0.01 |
| B: VOYHTmiR-104.016 | B: 1589 | | |
| A: VOYHTmiR-104.016 | A: 1589 | VOYPC33 | 0.21 ± 0.01 |
| B: VOYHTmiR-104.016 | B: 1589 | | |
| C: VOYHTmiR-104.016 | C: 1589 | | |
| A: VOYHTmiR-104.016 | A: 1589 | VOYPC47 | 0.19 ± 0.01 |
| B: VOYHTmiR-104.016 | B: 1589 | | |
| C: VOYHTmiR-104.016 | C: 1589 | | |
| D: VOYHTmiR-104.016 | D: 1589 | | |
| VOYHTmiR-127.579 | 1599 (ITR | N/A | 0.48 ± 0.01 |
| | to ITR sequence: | | |
| | SEQ ID NO: 2690) | | |
| A: VOYHTmiR-127.579 | A: 1599 | VOYPC62 | 0.42 ± 0.01 |
| B: VOYHTmiR-127.579 | B: 1599 | | |
| A: VOYHTmiR-127.579 | A: 1599 | VOYPC31 | 0.34 ± 0.03 |
| B: VOYHTmiR-127.579 | B: 1599 | | |
| C: VOYHTmiR-127.579 | C: 1599 | | |
| A: VOYHTmiR-127.579 | A: 1599 | VOYPC43 | 0.32 ± 0.02 |
| B: VOYHTmiR-127.579 | B: 1599 | | |
| C: VOYHTmiR-127.579 | C: 1599 | | |
| D: VOYHTmiR-127.579 | D: 1599 | | |
| A: VOYHTmiR-104.016 | A: 1589 | VOYPC60 | 0.27 ± 0.01 |
| B: VOYHTmiR-127.579 | B: 1599 | | |
| A: VOYHTmiR-127.579 | A: 1599 | VOYPC61 | 0.24 ± 0.03 |
| B: VOYHTmiR-104.016 | B: 1589 | | |
| A: VOYHTmiR-127.579 | A: 1599 | VOYPC29 | 0.28 ± 0.01 |
| B: VOYHTmiR-104.016 | B: 1589 | | |
| C: VOYHTmiR-127.579 | C: 1599 | | |
| A: VOYHTmiR-104.016 | A: 1589 | VOYPC34 | 0.20 ± 0.00 |
| B: VOYHTmiR-104.016 | B: 1589 | | |
| C: VOYHTmiR-127.579 | C: 1599 | | |
| A: VOYHTmiR-104.016 | A: 1589 | VOYPC30 | 0.26 ± 0.03 |
| B: VOYHTmiR-127.579 | B: 1599 | | |
| C: VOYHTmiR-104.016 | C: 1589 | | |
| A: VOYHTmiR-127.579 | A: 1599 | VOYPC32 | 0.23 ± 0.01 |
| B: VOYHTmiR-127.579 | B: 1599 | | |
| C: VOYHTmiR-104.016 | C: 1589 | | |
| A: VOYHTmiR-127.579 | A: 1599 | VOYPC44 | 0.17 ± 0.01 |
| B: VOYHTmiR-104.016 | B: 1589 | | |
| C: VOYHTmiR-127.579 | C: 1599 | | |
| D: VOYHTmiR-104.016 | D: 1589 | | |
| A: VOYHTmiR-104.016 | A: 1589 | VOYPC48 | 0.20 ± 0.01 |
| B: VOYHTmiR-127.579 | B: 1599 | | |
| C: VOYHTmiR-104.016 | C: 1589 | | |
| D: VOYHTmiR-127.579 | D: 1599 | | |
| A: VOYHTmiR-104.016 | A: 1589 | VOYPC46 | 0.19 ± 0.01 |
| B: VOYHTmiR-127.579 | B: 1599 | | |
| C: VOYHTmiR-127.579 | C: 1599 | | |
| D: VOYHTmiR-104.016 | D: 1589 | | |
| A: VOYHTmiR-127.579 | A: 1599 | VOYPC45 | 0.21 ± 0.01 |
| B: VOYHTmiR-104.016 | B: 1589 | | |
| C: VOYHTmiR-104.016 | C: 1589 | | |
| D: VOYHTmiR-127.579 | D: 1599 | | |

[1153] The results show that sequence VOYPC47 which contains 4 identical modulatory polynucleotides (VOYHTmiR-104.016 (SEQ ID NO: 1589)) in tandem provides more target lowering than VOYPC33 which contains 3 of the same modulatory polynucleotides (VOYHTmiR-104.016 (SEQ ID NO: 1589)) in tandem. These results also show that VOYPC33 which contains 3 identical modulatory polynucleotides (VOYHTmiR-104.016 (SEQ ID NO: 1589)) in tandem provides more target lowering than VOYPC59 which contains 2 of the same modulatory polynucleotides (VOYHTmiR-104.016 (SEQ ID NO: 1589)) in tandem.

[1154] The results show that sequence VOYPC43 which contains 4 identical modulatory polynucleotides (VOYHTmiR-127.579 (SEQ ID NO: 1599)) in tandem provides more target lowering than VOYPC31 which contains 3 of the same modulatory polynucleotides (VOYHTmiR-127.579 (SEQ ID NO: 1599)) in tandem. These results also show that VOYPC31 which contains 3 identical modulatory polynucleotides (VOYHTmiR-127.579 (SEQ ID NO: 1599)) in tandem provides more target lowering than VOYPC62 which contains 2 of the same modulatory polynucleotides (VOYHTmiR-127.579 (SEQ ID NO: 1599)) in tandem.

[1155] Taken together, these results with VOYHTmiR-104.016 (SEQ ID NO: 1589) and with VOYHTmiR-127.579 (SEQ ID NO: 1599) demonstrate that 4 identical modulatory polynucleotides in tandem provides more inhibitor activity (target lowering) than 3 of the same modulatory polynucleotides in tandem, which in turn provides more inhibitor activity (target lowering) than 2 of the same modulatory polynucleotides in tandem.

[1156] The results show that sequence VOYPC34, which contains two copies of VOYHTmiR-104.016 (SEQ ID NO: 1589) followed by one copy of VOYHTmiR-127.579 (SEQ ID NO: 1599) provides more inhibitory activity (target lowering) than VOYPC30. Both sequences contain two copies of VOYHTmiR-104.016 (SEQ ID NO: 1589) and one copy of VOYHTmiR-127.579 (SEQ ID NO: 1599), but the order of these modulatory polynucleotides is different; VOYPC34 contains two copies of VOYHTmiR-104.016 (SEQ ID NO: 1589) followed by one copy of VOYHTmiR-127.579 (SEQ ID NO: 1599) whereas VOYPC30 contains one copy of VOYHTmiR-104.016 (SEQ ID NO: 1589) followed by one copy of VOYHTmiR-127.579 (SEQ ID NO: 1599) followed by one copy of VOYHTmiR-104.016 (SEQ ID NO: 1589).

[1157] The results show that of the sequences containing four modulatory polynucleotides comprising two different modulatory polynucleotides, sequence VOYPC44 provides more inhibitory activity (target lowering) than VOYPC48, VOYPC46 or VOYPC45.

### Example 6. Pri-miRNA Processing of Polycistronic Constructs in HEK293T Cells

[1158] To determine precision and efficiency of pri-miRNA processing, miRNA expression vectors encoding VOYHTmiR-104.016 (SEQ ID NO: 1589) and/or VOYHTmiR-127.579 (SEQ ID NO: 1599) singly or in various tandem combinations comprising two modulatory polynucleotides were constructed, packaged in AAV2 with one CMV promoter, or two H1 promoters, and infected into HEK293T cells, and then precision and efficiency of pri-miRNA processing was assessed by deep sequencing.

[1159] HEK293T cells were plated into 6-well plates (2E6 cells/plate in 2 mL cell culture medium), and infected with miRNA expression vectors packaged in AAV2 at an MOI of 1×10⁴ vector genomes per cell, in duplicate (Rep1, Rep2); see Tables 60-65. At 48 hours after infection, the cell cultures were evaluated for pri-miRNA processing by deep sequencing to assess abundance of guide strand relative to the total endogenous pool of miRNAs (Tables 60-61), guide:passenger strand ratio (Tables 62-63), and precision of processing at the 5′-end of the guide strand (Tables 64-65). In Tables 60-65, the construct encodes the A modulatory polynucleotide before the B modulatory polynucleotide. N/A means not applicable.

[1160] With the CMV promoter (Table 60), guide strand abundance of VOYHTmiR-104.016 was affected by the presence of a second modulatory polynucleotide in the AAV genome. Guide strand abundance was lower with an AAV genome containing two copies of VOYHTmiR-104.016 (SEQ ID NO: 1589) (VOYPC13, 0.26 and 0.27% relative to the total endogenous miRNA pool) than with an AAV genome containing a single copy of VOYHTmiR-104.016 (SEQ ID NO: 1589) (0.49 and 0.43% relative to the total endogenous miRNA pool). However, guide strand abundance for VOYHTmiR-104.016 was higher with an AAV genome containing a second different modulatory polynucleotide VOYHTmiR-127.579. Guide strand abundance for VOYPC14 was 1.69 and 1.52% relative to the total endogenous miRNA pool, and guide strand abundance for VOYPC15 was 2.17 and 2.11% relative to the total endogenous miRNA pool, in contrast to guide strand abundance with a single modulatory polynucleotide (VOYHTmiR-104.016 (SEQ ID NO: 1589) which was 0.49 and 0.43% relative to the total endogenous miRNA pool. Sequences utilizing CMV promoters were configured with the modulatory polynucleotides in tandem 3′ to a CMV promoter, such that transcription of the modulatory polynucleotides was under the control of a single CMV promoter. Results obtained using the CMV promoter are shown in Table 60.

TABLE 60
Pri-miRNA Processing in HEK293T Cultures after AAV
Infection (CMV Promoter) - Guide Strand Abundance

| | | | Guide Strand Abundance Relative to | | | |
|---|---|---|---|---|---|---|
| Modulatory | Modulatory | | Endogenous miRNA Pool (%) | | | |
| Polynucleotide | polynucleotide | Sequence | 127.579 | | 104.016 | |
| Name | SEQ ID | Name | Rep1 | Rep2 | Rep1 | Rep2 |
| VOYHTmiR-127.579 | 1599 (ITR to | N/A | 1.92 | 0.85 | N/A | N/A |
| | ITR sequence: | | | | | |
| | SEQ ID NO: 2692) | | | | | |
| VOYHTmiR-104.016 | 1589 (ITR to | N/A | N/A | N/A | 0.49 | 0.43 |
| | ITR sequence: | | | | | |
| | SEQ ID NO: 2693) | | | | | |
| Construct 1: | Construct 1: | N/A | 0.98 | 0.72 | 0.24 | 0.23 |
| VOYHTmiR-104.016 | 1589 (ITR to | | | | | |
| Construct 2: | ITR sequence: | | | | | |
| VOYHTmiR-127.579 | SEQ ID NO: 2693) | | | | | |
| | Construct 2: | | | | | |
| | 1599 (ITR to | | | | | |
| | ITR sequence: | | | | | |
| | SEQ ID NO: 2692) | | | | | |
| A: VOYHTmiR-104.016 | A: 1589 | VOYPC13 | N/A | N/A | 0.26 | 0.27 |
| B: VOYHTmiR-104.016 | B: 1589 | | | | | |
| A: VOYHTmiR-127.579 | A: 1599 | VOYPC14 | 0.26 | 0.24 | 1.69 | 1.52 |
| B: VOYHTmiR-104.016 | B: 1589 | | | | | |
| A: VOYHTmiR-104.016 | A: 1589 | VOYPC15 | 0.31 | 0.28 | 2.17 | 2.11 |
| B: VOYHTmiR-127.579 | B: 1599 | | | | | |
| A: VOYHTmiR-127.579 | A: 1599 | VOYPC16 | 0.93 | 0.72 | N/A | N/A |
| B: VOYHTmiR-127.579 | B: 1599 | | | | | |

Sequences utilizing the Pol III promoter H1 were configured with each modulatory polynucleotide under control by its own H1 promoter. As shown in Table 61, with the H1 promoter, guide strand abundance was propoortional to the number of corresponding modulatory polynucleotides in the AAV genome. Guide strand abundance of VOYHTmiR-104.016 (SEQ ID NO: 1589) was 1.77-fold higher with an AAV genome containing two copies of VOYHTmiR-104.016 (VOYPC59, 3.81 and 3.84% relative to the total endogenous miRNA pool) than with an AAV genome containing a single copy of VOYHTmiR-104.016 (2.19 and 2.13% relative to the total endogenous miRNA pool). Guide strand abundance of VOYHTmiR-104.016 (SEQ ID NO: 1589) was similar with an AAV genome containing one copy of VOYHTmiR-104.016 whether or not a copy of a different modulatory polynucleotide VOYHTmiR-127.579 (SEQ ID NO: 1599) was present in the AAV genome. The guide strand abundance relative to the total endogenous miRNA pool of VOYHTmiR-104.016 was 2.19 and 2.13%, 2.61 and 2.52%, and 2.21 and 2.3% with an AAV genome containing one copy of VOYHTmiR-104.016 (SEQ ID NO: 1589), an AAV genome containing one copy of VOYHTmiR-104.016 (SEQ ID NO: 1589) followed by one copy of VOYHTmiR-127.579 (SEQ ID NO: 1599) (VOYPC60), and an AAV genome containing one copy of VOYHTmiR-127.579 (SEQ ID NO: 1599) followed by one copy of VOYHTmiR-104.016 (SEQ ID NO: 1589) (VOYPC61), respectively.

[1161] Similarly, with the H1 promoter (Table 61), for another modulatory polynucleotide, guide strand abundance of VOYHTmiR-127.579 (SEQ ID NO: 1599) was 2.67-fold higher with an AAV genome containing two copies of VOYHTmiR-127.579 (VOYPC62, 2.05 and 1.74% relative to the total endogenous miRNA pool) than with an AAV genome containing a single copy of VOYHTmiR-127.579 (0.75 and 0.67% relative to the total endogenous miRNA pool). Guide strand abundance of VOYHTmiR-127.579 (SEQ ID NO: 1599) was similar with an AAV genome containing one copy of VOYHTmiR-127.579 whether or not a copy of a different modulatory polynucleotide VOYHTmiR-104.016 (SEQ ID NO: 1589) was present in the AAV genome. The guide strand abundance of VOYHTmiR-127.579 relative to the total endogenous miRNA pool was 0.75 and 0.67%, 1.0 and 1.05%, and 0.97 and 0.99% with an AAV genome containing one copy of VOYHTmiR-127.579 (SEQ ID NO: 1599), an AAV genome containing one copy of VOYHTmiR-104.016 (SEQ ID NO: 1589) followed by one copy of VOYHTmiR-127.579 (SEQ ID NO: 1599) (VOYPC60), and an AAV genome containing one copy of VOYHTmiR-127.579 (SEQ ID NO: 1599) followed by one copy of VOYHTmiR-104.016 (SEQ ID NO: 1589) (VOYPC61), respectively.

TABLE 61
Pri-miRNA Processing in HEK293T Cultures after AAV
Infection (H1 Promoter) - Guide Strand Abundance

| | | | Guide Strand Abundance | | | |
|---|---|---|---|---|---|---|
| | | | Relative to Endogenous | | | |
| Modulatory | Modulatory | | miRNA Pool (%) | | | |
| Polynucleotide | polynucleotide | Sequence | 127.579 | | 104.016 | |
| Name | SEQ ID | Name | Rep1 | Rep2 | Rep1 | Rep2 |
| VOYHTmiR-127.579 | 1599 (ITR to | N/A | 0.75 | 0.67 | N/A | N/A |
| | ITR sequence: | | | | | |
| | SEQ ID NO: 2690) | | | | | |
| VOYHTmiR-104.016 | 1589 (ITR to | N/A | N/A | N/A | 2.19 | 2.13 |
| | ITR sequence: | | | | | |
| | SEQ ID NO: 2691) | | | | | |
| Construct 1: | Construct 1: | N/A | 0.32 | 0.29 | 1.54 | 1.56 |
| VOYHTmiR-104.016 | 1589 (ITR to | | | | | |
| Construct 2: | ITR sequence: | | | | | |
| VOYHTmiR-127.579 | SEQ ID NO: 2691) | | | | | |
| | Construct 2: | | | | | |
| | 1599 (ITR to | | | | | |
| | ITR sequence: | | | | | |
| | SEQ ID NO: 2690) | | | | | |
| A: VOYHTmiR-104.016 | A: 1589 | VOYPC59 | N/A | N/A | 3.81 | 3.84 |
| B: VOYHTmiR-104.016 | B: 1589 | | | | | |
| A: VOYHTmiR-127.579 | A: 1599 | VOYPC61 | 0.97 | 0.99 | 2.21 | 2.3 |
| B: VOYHTmiR-104.016 | B: 1589 | | | | | |
| A: VOYHTmiR-104.016 | A: 1589 | VOYPC60 | 1 | 1.05 | 2.61 | 2.52 |
| B: VOYHTmiR-127.579 | B: 1599 | | | | | |
| A: VOYHTmiR-127.579 | A: 1599 | VOYPC62 | 2.05 | 1.74 | N/A | N/A |
| B: VOYHTmiR-127.579 | B: 1599 | | | | | |

With the CMV promoter (Table 62), the guide/passenger strand ratio for VOYHTmiR-104.016 was 114.2 and 121.6, and 99.2 and 105.8 for an AAV genome containing one copy of VOYHTmiR-104.016 (SEQ ID NO: 1589) followed by one copy of VOYHTmiR-127.579 (SEQ ID NO: 1599) (VOYPC15), and an AAV genome containing one copy of VOYHTmiR-127.579 (SEQ ID NO: 1599) followed by one copy of VOYHTmiR-104.016 (SEQ ID NO: 1589) (VOYPC14), respectively, versus 71.1 and 83 for an AAV genome containing a single copy of VOYHTmiR-104.016 only.

TABLE 62
Pri-miRNA Processing in HEK293T Cultures after AAV
Infection (CMV Promoter) - Guide/Passenger Ratio

| Modulatory | Modulatory | | Guide/Passenger Ratio | | | |
|---|---|---|---|---|---|---|
| Polynucleotide | polynucleotide | Sequence | 127.579 | | 104.016 | |
| Name | SEQ ID | Name | Rep1 | Rep2 | Rep1 | Rep2 |
| VOYHTmiR-127.579 | 1599 (ITR to | N/A | 16.6 | 4.6 | N/A | N/A |
| | ITR sequence: | | | | | |
| | SEQ ID NO: 2692) | | | | | |
| VOYHTmiR-104.016 | 1589 (ITR to | N/A | N/A | N/A | 71.1 | 83 |
| | ITR sequence: | | | | | |
| | SEQ ID NO: 2693) | | | | | |
| Construct 1: | Construct 1: | N/A | 9.4 | 6 | 45.2 | 66.9 |
| VOYHTmiR-104.016 | 1589 (ITR to | | | | | |
| Construct 2: | ITR sequence: | | | | | |
| VOYHTmiR-127.579 | SEQ ID NO: 2693 | | | | | |
| | Construct 2: | | | | | |
| | 1599 (ITR to | | | | | |
| | ITR sequence: | | | | | |
| | SEQ ID NO: 2692) | | | | | |
| A: VOYHTmiR-104.016 | A: 1589 | VOYPC13 | N/A | N/A | 45.8 | 126.3 |
| B: VOYHTmiR-104.016 | B: 1589 | | | | | |
| A: VOYHTmiR-127.579 | A: 1599 | VOYPC14 | 6.8 | 6.7 | 99.2 | 105.8 |
| B: VOYHTmiR-104.016 | B: 1589 | | | | | |
| A: VOYHTmiR-104.016 | A: 1589 | VOYPC15 | 6.7 | 6.7 | 114.2 | 121.6 |
| B: VOYHTmiR-127.579 | B: 1599 | | | | | |
| A: VOYHTmiR-127.579 | A: 1599 | VOYPC16 | 7.8 | 6.6 | N/A | N/A |
| B: VOYHTmiR-127.579 | B: 1599 | | | | | |

[1162] When utilizing the Pol III H1 promoter (Table 63), the guide/passenger ratio of VOYHTmiR-104.016 (SEQ ID NO: 1589) was unaffected by the presence of a second modulatory polynucleotide in the AAV genome. Guide/passenger ratios for VOYHTmiR-104.016 were 16.9 and 20.2, 14.3 and 18.6, 16.3 and 16.3, and 17.7 and 17.8 for an AAV genome containing one copy of VOYHTmiR-104.016 (SEQ ID NO: 1589), an AAV genome containing two copies of VOYHTmiR-104.016 (SEQ ID NO: 1589) (VOYPC59), an AAV genome containing one copy of VOYHTmiR-104.016 (SEQ ID NO: 1589) followed by one copy of VOYHTmiR-127.579 (SEQ ID NO: 1599) (VOYPC60), and an AAV genome containing one copy of VOYHTmiR-127.579 (SEQ ID NO: 1599) followed by one copy of VOYHTmiR-104.016 (SEQ ID NO: 1589) (VOYPC61), respectively.

[1163] Similarly, with a Pol III H1 promoter (Table 63), the guide/passenger ratio of VOYHTmiR-127.579 (SEQ ID NO: 1599) was unaffected by the presence of a second modulatory polynucleotide in the AAV genome. Guide/passenger ratios for VOYHTmiR-127.579 were 6.4 and 5.9, 5.7 and 6.4, 5.6 and 6.2, and 6.2 and 5.8 for an AAV genome containing one copy of VOYHTmiR-127.579 (SEQ ID NO: 1599), an AAV genome containing two copies of VOYHTmiR-127.579 (SEQ ID NO: 1599) (VOYPC62), an AAV genome containing one copy of VOYHTmiR-104.016 (SEQ ID NO: 1589) followed by one copy of VOYHTmiR-127.579 (SEQ ID NO: 1599) (VOYPC60), and an AAV genome containing one copy of VOYHTmiR-127.579 (SEQ ID NO: 1599) followed by one copy of VOYHTmiR-104.016 (SEQ ID NO: 1589) (VOYPC61), respectively.

[1164] These results demonstrate that with the Pol III H1 promoter (Table 63), the guide/passenger ratio was the same whether a second modulatory polynucleotide was present or not.

TABLE 63
Pri-miRNA Processing in HEK293T Cultures after AAV
Infection (H1 Promoter) - Guide/Passenger Ratio

| Modulatory | Modulatory | | Guide/Passenger Ratio | | | |
|---|---|---|---|---|---|---|
| Polynucleotide | polynucleotide | Sequence | 127.579 | | 104.016 | |
| Name | SEQ ID | Name | Rep1 | Rep2 | Rep1 | Rep2 |
| VOYHTmiR-127.579 | 1599 (ITR to | N/A | 6.4 | 5.9 | N/A | N/A |
| | ITR sequence: | | | | | |
| | SEQ ID NO: 2690) | | | | | |
| VOYHTmiR-104.016 | 1589 (ITR to | N/A | N/A | N/A | 16.9 | 20.2 |
| | ITR sequence: | | | | | |
| | SEQ ID NO: 2691 | | | | | |
| Construct 1: | Construct 1: | N/A | 6.3 | 6 | 17.6 | 19.5 |
| VOYHTmiR-104.016 | 1589 (ITR to | | | | | |
| Construct 2: | ITR sequence: | | | | | |
| VOYHTmiR-127.579 | SEQ ID NO: 2691) | | | | | |
| | Construct 2: | | | | | |
| | 1599 (ITR to | | | | | |
| | ITR sequence: | | | | | |
| | SEQ ID NO: 2690) | | | | | |
| A: VOYHTmiR-104.016 | A: 1589 | VOYPC59 | N/A | N/A | 14.3 | 18.6 |
| B: VOYHTmiR-104.016 | B: 1589 | | | | | |
| A: VOYHTmiR-127.579 | A: 1599 | VOYPC61 | 6.2 | 5.8 | 17.7 | 17.8 |
| B: VOYHTmiR-104.016 | B: 1589 | | | | | |
| A: VOYHTmiR-104.016 | A: 1589 | VOYPC60 | 5.6 | 6.2 | 16.3 | 16.3 |
| B: VOYHTmiR-127.579 | B: 1599 | | | | | |
| A: VOYHTmiR-127.579 | A: 1599 | VOYPC62 | 5.7 | 6.4 | N/A | N/A |
| B: VOYHTmiR-127.579 | B: 1599 | | | | | |

[1165] With the CMV promoter (Table 64), the precision of processing at the 5′-end of the guide strand was the same whether or not a second modulatory polynucleotide was present in the AAV genome. With the CMV promoter, the precision of processing at the 5′-end of the guide strand for VOYHTmiR-104.016 (SEQ ID NO: 1589) was 95.5 and 95%, 94.9 and 95.4%, 95.7 and 95.7%, and 95.6 and 95.3% for an AAV genome containing one copy of VOYHTmiR-104.016 (SEQ ID NO: 1589), an AAV genome containing two copies of VOYHTmiR-104.016 (SEQ ID NO: 1589) (VOYPC13), an AAV genome containing one copy of VOYHTmiR-104.016 (SEQ ID NO: 1589) followed by one copy of VOYHTmiR-127.579 (SEQ ID NO: 1599) (VOYPC15), and an AAV genome containing one copy of VOYHTmiR-127.579 (SEQ ID NO: 1599) followed by one copy of VOYHTmiR-104.016 (SEQ ID NO: 1589) (VOYPC14), respectively. With the CMV promoter, the precision of processing at the 5′-end of the guide strand for VOYHTmiR-127.579 (SEQ ID NO: 1599) was 59 and 59.8%, 60.1 and 60.8%, 59.9 and 61.5%, and 61 and 61.2% for an AAV genome containing one copy of VOYHTmiR-127.579 (SEQ ID NO: 1599) an AAV genome containing two copies of VOYHTmiR-127.579 (SEQ ID NO: 1599) (VOYPC16), an AAV genome containing one copy of VOYHTmiR-104.016 (SEQ ID NO: 1589) followed by one copy of VOYHTmiR-127.579 (SEQ ID NO: 1599) (VOYPC15), and an AAV genome containing one copy of VOYHTmiR-127.579 (SEQ ID NO: 1599) followed by one copy of VOYHTmiR-104.016 (SEQ ID NO: 1589) (VOYPC14), respectively.

TABLE 64
Pri-miRNA Processing in HEK293T Cultures after AAV Infection
(CMV Promoter) - Precision of Guide Strand 5′-Processing

| Modulatory | Modulatory | | % N (Guide) | | | |
|---|---|---|---|---|---|---|
| Polynucleotide | polynucleotide | Sequence | 127.579 | | 104.016 | |
| Name | SEQ ID | Name | Rep1 | Rep2 | Rep1 | Rep2 |
| VOYHTmiR-127.579 | 1599 (ITR to | N/A | 59 | 59.8 | N/A | N/A |
| | ITR sequence: | | | | | |
| | SEQ ID NO: 2692) | | | | | |
| VOYHTmiR-104.016 | 1589 (ITR to | N/A | N/A | N/A | 95.5 | 95 |
| | ITR sequence: | | | | | |
| | SEQ ID NO: 2693) | | | | | |
| Construct 1: | Construct 1: | N/A | 58.9 | 60 | 95.3 | 94.6 |
| VOYHTmiR-104.016 | 1589 (ITR to | | | | | |
| Construct 2: | ITR sequence: | | | | | |
| VOYHTmiR-127.579 | SEQ ID NO: 2693) | | | | | |
| | Construct 2: | | | | | |
| | 1599 (ITR to | | | | | |
| | ITR sequence: | | | | | |
| | SEQ ID NO: 2692) | | | | | |
| A: VOYHTmiR-104.016 | A: 1589 | VOYPC13 | N/A | N/A | 94.9 | 95.4 |
| B: VOYHTmiR-104.016 | B: 1589 | | | | | |
| A: VOYHTmiR-127.579 | A: 1599 | VOYPC14 | 61 | 61.2 | 95.6 | 95.3 |
| B: VOYHTmiR-104.016 | B: 1589 | | | | | |
| A: VOYHTmiR-104.016 | A: 1589 | VOYPC15 | 59.9 | 61.5 | 95.7 | 95.7 |
| B: VOYHTmiR-127.579 | B: 1599 | | | | | |
| A: VOYHTmiR-127.579 | A: 1599 | VOYPC16 | 60.1 | 60.8 | N/A | N/A |
| B: VOYHTmiR-127.579 | B: 1599 | | | | | |

[1166] With the H1 promoter (Table 65), the precision of processing at the 5′-end of the guide strand was the same whether or not a second modulatory polynucleotide was present in the AAV genome. With the H1 promoter, the precision of processing at the 5′-end of the guide strand for VOYHTmiR-104.016 was 92.6 and 92.6%, 92.6 and 92.1%, 92.1 and 91.8%, and 93 and 92.9% for an AAV genome containing one copy of VOYHTmiR-104.016 (SEQ ID NO: 1589), an AAV genome containing two copies of VOYHTmiR-104.016 (SEQ ID NO: 1589) (VOYPC59), an AAV genome containing one copy of VOYHTmiR-104.016 (SEQ ID NO: 1589) followed by one copy of VOYHTmiR-127.579 (SEQ ID NO: 1599) (VOYPC60), and an AAV genome containing one copy of VOYHTmiR-127.579 (SEQ ID NO: 1599) followed by one copy of VOYHTmiR-104.016 (SEQ ID NO: 1589) (VOYPC61), respectively. With the H1 promoter, the precision of processing at the 5′-end of the guide strand for VOYHTmiR-127.579 (SEQ ID NO: 1599) was 59.5 and 59.6%, 58.5 and 59.3%, 59 and 59.8%, and 58.5 and 58.7% for an AAV genome containing one copy of VOYHTmiR-127.579 (SEQ ID NO: 1599) an AAV genome containing two copies of VOYHTmiR-127.579 (SEQ ID NO: 1599) (VOYPC62), an AAV genome containing one copy of VOYHTmiR-104.016 (SEQ ID NO: 1589) followed by one copy of VOYHTmiR-127.579 (SEQ ID NO: 1599) (VOYPC60), and an AAV genome containing one copy of VOYHTmiR-127.579 (SEQ ID NO: 1599) followed by one copy of VOYHTmiR-104.016 (SEQ ID NO: 1589) (VOYPC61), respectively.

[1167] These results demonstrate that with the CMV (Table 64) or H1 (Table 65) promoter, the precision of processing at the 5′-end of the guide strand was the same whether a second modulatory polynucleotide was present or not.

TABLE 65
Pri-miRNA Processing in HEK293T Cultures after AAV Infection
(H1 Promoter) - Precision of Guide Strand 5′-Processing

| Modulatory | Modulatory | | % N (Guide) | | | |
|---|---|---|---|---|---|---|
| Polynucleotide | polynucleotide | Sequence | 127.579 | | 104.016 | |
| Name | SEQ ID | Name | Rep1 | Rep2 | Rep1 | Rep2 |
| VOYHTmiR-127.579 | 1599 (ITR to | N/A | 59.5 | 59.6 | N/A | N/A |
| | ITR sequence: | | | | | |
| | SEQ ID NO: 2690) | | | | | |
| VOYHTmiR-104.016 | 1589 (ITR to | N/A | N/A | N/A | 92.6 | 92.6 |
| | ITR sequence: | | | | | |
| | SEQ ID NO: 2691) | | | | | |
| Construct 1: | Construct 1: | N/A | 59.5 | 60 | 92.6 | 92.4 |
| VOYHTmiR-104.016 | 1589 (ITR to | | | | | |
| Construct 2: | ITR sequence: | | | | | |
| VOYHTmiR-127.579 | SEQ ID NO: 2691) | | | | | |
| | Construct 2: | | | | | |
| | 1599 (ITR to | | | | | |
| | ITR sequence: | | | | | |
| | SEQ ID NO: 2690) | | | | | |
| A: VOYHTmiR-104.016 | A: 1589 | VOYPC59 | N/A | N/A | 92.6 | 92.1 |
| B: VOYHTmiR-104.016 | B: 1589 | | | | | |
| A: VOYHTmiR-127.579 | A: 1599 | VOYPC61 | 58.5 | 58.7 | 93 | 92.9 |
| B: VOYHTmiR-104.016 | B: 1589 | | | | | |
| A: VOYHTmiR-104.016 | A: 1589 | VOYPC60 | 59 | 59.8 | 92.1 | 91.8 |
| B: VOYHTmiR-127.579 | B: 1599 | | | | | |
| A: VOYHTmiR-127.579 | A: 1599 | VOYPC62 | 58.5 | 59.3 | N/A | N/A |
| B: VOYHTmiR-127.579 | B: 1599 | | | | | |

[1168] While the present invention has been described at some length and with some particularity with respect to the several described embodiments, it is not intended that it should be limited to any such particulars or embodiments or any particular embodiment, but it is to be construed with references to the appended claims so as to provide the broadest possible interpretation of such claims in view of the prior art and, therefore, to effectively encompass the intended scope of the invention.

[1169] All publications, patent applications, patents, and other references mentioned herein are incorporated by reference in their entirety. In case of conflict, the present specification, including definitions, will control. In addition, section headings, the materials, methods, and examples are illustrative only and not intended to be limiting.

The application's sequence listing, which the Patent Office published only in electronic form, follows.

SEQUENCE LISTING (2693 sequences)

SEQ ID NO: 1 - DNA, 2211 bp, Adeno-associated virus 1
atggctgccgatggttatcttccagattggctcgaggacaacctctctgagggcattcgcgagtggtgggacttgaaacctggagccccgaagcccaaagccaaccagcaaaagcaggacgacggccggggtctggtgcttcctggctacaagtacctcggacccttcaacggactcgacaagggggagcccgtcaacgcggcggacgcagcggccctcgagcacgacaaggcctacgaccagcagctcaaagcgggtgacaatccgtacctgcggtataaccacgccgacgccgagtttcaggagcgtctgcaagaagatacgtcttttgggggcaacctcgggcgagcagtcttccaggccaagaagcgggttctcgaacctctcggtctggttgaggaaggcgctaagacggctcctggaaagaaacgtccggtagagcagtcgccacaagagccagactcctcctcgggcatcggcaagacaggccagcagcccgctaaaaagagactcaattttggtcagactggcgactcagagtcagtccccgatccacaacctctcggagaacctccagcaacccccgctgctgtgggacctactacaatggcttcaggcggtggcgcaccaatggcagacaataacgaaggcgccgacggagtgggtaatgcctcaggaaattggcattgcgattccacatggctgggcgacagagtcatcaccaccagcacccgcacctgggccttgcccacctacaataaccacctctacaagcaaatctccagtgcttcaacgggggccagcaacgacaaccactacttcggctacagcaccccctgggggtattttgatttcaacagattccactgccacttttcaccacgtgactggcagcgactcatcaacaacaattggggattccggcccaagagactcaacttcaaactcttcaacatccaagtcaaggaggtcacgacgaatgatggcgtcacaaccatcgctaataaccttaccagcacggttcaagtcttctcggactcggagtaccagcttccgtacgtcctcggctctgcgcaccagggctgcctccctccgttcccggcggacgtgttcatgattccgcaatacggctacctgacgctcaacaatggcagccaagccgtgggacgttcatccttttactgcctggaatatttcccttctcagatgctgagaacgggcaacaactttaccttcagctacacctttgaggaagtgcctttccacagcagctacgcgcacagccagagcctggaccggctgatgaatcctctcatcgaccaatacctgtattacctgaacagaactcaaaatcagtccggaagtgcccaaaacaaggacttgctgtttagccgtgggtctccagctggcatgtctgttcagcccaaaaactggctacctggaccctgttatcggcagcagcgcgtttctaaaacaaaaacagacaacaacaacagcaattttacctggactggtgcttcaaaatataacctcaatgggcgtgaatccatcatcaaccctggcactgctatggcctcacacaaagacgacgaagacaagttctttcccatgagcggtgtcatgatttttggaaaagagagcgccggagcttcaaacactgcattggacaatgtcatgattacagacgaagaggaaattaaagccactaaccctgtggccaccgaaagatttgggaccgtggcagtcaatttccagagcagcagcacagaccctgcgaccggagatgtgcatgctatgggagcattacctggcatggtgtggcaagatagagacgtgtacctgcagggtcccatttgggccaaaattcctcacacagatggacactttcacccgtctcctcttatgggcggctttggactcaagaacccgcctcctcagatcctcatcaaaaacacgcctgttcctgcgaatcctccggcggagttttcagctacaaagtttgcttcattcatcacccaatactccacaggacaagtgagtgtggaaattgaatgggagctgcagaaagaaaacagcaagcgctggaatcccgaagtgcagtacacatccaattatgcaaaatctgccaacgttgattttactgtggacaacaatggactttatactgagcctcgccccattggcacccgttaccttacccgtcccctgtaa

SEQ ID NO: 2 - protein, 736 aa, Adeno-associated virus 1
MAADGYLPDWLEDNLSEGIREWWDLKPGAPKPKANQQKQDDGRGLVLPGYKYLGPFNGLDKGEPVNAADAAALEHDKAYDQQLKAGDNPYLRYNHADAEFQERLQEDTSFGGNLGRAVFQAKKRVLEPLGLVEEGAKTAPGKKRPVEQSPQEPDSSSGIGKTGQQPAKKRLNFGQTGDSESVPDPQPLGEPPATPAAVGPTTMASGGGAPMADNNEGADGVGNASGNWHCDSTWLGDRVITTSTRTWALPTYNNHLYKQISSASTGASNDNHYFGYSTPWGYFDFNRFHCHFSPRDWQRLINNNWGFRPKRLNFKLFNIQVKEVTTNDGVTTIANNLTSTVQVFSDSEYQLPYVLGSAHQGCLPPFPADVFMIPQYGYLTLNNGSQAVGRSSFYCLEYFPSQMLRTGNNFTFSYTFEEVPFHSSYAHSQSLDRLMNPLIDQYLYYLNRTQNQSGSAQNKDLLFSRGSPAGMSVQPKNWLPGPCYRQQRVSKTKTDNNNSNFTWTGASKYNLNGRESIINPGTAMASHKDDEDKFFPMSGVMIFGKESAGASNTALDNVMITDEEEIKATNPVATERFGTVAVNFQSSSTDPATGDVHAMGALPGMVWQDRDVYLQGPIWAKIPHTDGHFHPSPLMGGFGLKNPPPQILIKNTPVPANPPAEFSATKFASFITQYSTGQVSVEIEWELQKENSKRWNPEVQYTSNYAKSANVDFTVDNNGLYTEPRPIGTRYLTRPL

SEQ ID NO: 3 - DNA, 4718 bp, Adeno-associated virus 1
ttgcccactccctctctgcgcgctcgctcgctcggtggggcctgcggaccaaaggtccgcagacggcagagctctgctctgccggccccaccgagcgagcgagcgcgcagagagggagtgggcaactccatcactaggggtaatcgcgaagcgcctcccacgctgccgcgtcagcgctgacgtaaattacgtcataggggagtggtcctgtattagctgtcacgtgagtgcttttgcgacattttgcgacaccacgtggccatttagggtatatatggccgagtgagcgagcaggatctccattttgaccgcgaaatttgaacgagcagcagccatgccgggcttctacgagatcgtgatcaaggtgccgagcgacctggacgagcacctgccgggcatttctgactcgtttgtgagctgggtggccgagaaggaatgggagctgcccccggattctgacatggatctgaatctgattgagcaggcacccctgaccgtggccgagaagctgcagcgcgacttcctggtccaatggcgccgcgtgagtaaggccccggaggccctcttctttgttcagttcgagaagggcgagtcctacttccacctccatattctggtggagaccacgggggtcaaatccatggtgctgggccgcttcctgagtcagattagggacaagctggtgcagaccatctaccgcgggatcgagccgaccctgcccaactggttcgcggtgaccaagacgcgtaatggcgccggaggggggaacaaggtggtggacgagtgctacatccccaactacctcctgcccaagactcagcccgagctgcagtgggcgtggactaacatggaggagtatataagcgcctgtttgaacctggccgagcgcaaacggctcgtggcgcagcacctgacccacgtcagccagacccaggagcagaacaaggagaatctgaaccccaattctgacgcgcctgtcatccggtcaaaaacctccgcgcgctacatggagctggtcgggtggctggtggaccggggcatcacctccgagaagcagtggatccaggaggaccaggcctcgtacatctccttcaacgccgcttccaactcgcggtcccagatcaaggccgctctggacaatgccggcaagatcatggcgctgaccaaatccgcgcccgactacctggtaggccccgctccgcccgcggacattaaaaccaaccgcatctaccgcatcctggagctgaacggctacgaacctgcctacgccggctccgtctttctcggctgggcccagaaaaggttcgggaagcgcaacaccatctggctgtttgggccggccaccacgggcaagaccaacatcgcggaagccatcgcccacgccgtgcccttctacggctgcgtcaactggaccaatgagaactttcccttcaatgattgcgtcgacaagatggtgatctggtgggaggagggcaagatgacggccaaggtcgtggagtccgccaaggccattctcggcggcagcaaggtgcgcgtggaccaaaagtgcaagtcgtccgcccagatcgaccccacccccgtgatcgtcacctccaacaccaacatgtgcgccgtgattgacgggaacagcaccaccttcgagcaccagcagccgttgcaggaccggatgttcaaatttgaactcacccgccgtctggagcatgactttggcaaggtgacaaagcaggaagtcaaagagttcttccgctgggcgcaggatcacgtgaccgaggtggcgcatgagttctacgtcagaaagggtggagccaacaaaagacccgcccccgatgacgcggataaaagcgagcccaagcgggcctgcccctcagtcgcggatccatcgacgtcagacgcggaaggagctccggtggactttgccgacaggtaccaaaacaaatgttctcgtcacgcgggcatgcttcagatgctgtttccctgcaagacatgcgagagaatgaatcagaatttcaacatttgcttcacgcacgggacgagagactgttcagagtgcttccccggcgtgtcagaatctcaaccggtcgtcagaaagaggacgtatcggaaactctgtgccattcatcatctgctggggcgggctcccgagattgcttgctcggcctgcgatctggtcaacgtggacctggatgactgtgtttctgagcaataaatgacttaaaccaggtatggctgccgatggttatcttccagattggctcgaggacaacctctctgagggcattcgcgagtggtgggacttgaaacctggagccccgaagcccaaagccaaccagcaaaagcaggacgacggccggggtctggtgcttcctggctacaagtacctcggacccttcaacggactcgacaagggggagcccgtcaacgcggcggacgcagcggccctcgagcacgacaaggcctacgaccagcagctcaaagcgggtgacaatccgtacctgcggtataaccacgccgacgccgagtttcaggagcgtctgcaagaagatacgtcttttgggggcaacctcgggcgagcagtcttccaggccaagaagcgggttctcgaacctctcggtctggttgaggaaggcgctaagacggctcctggaaagaaacgtccggtagagcagtcgccacaagagccagactcctcctcgggcatcggcaagacaggccagcagcccgctaaaaagagactcaattttggtcagactggcgactcagagtcagtccccgatccacaacctctcggagaacctccagcaacccccgctgctgtgggacctactacaatggcttcaggcggtggcgcaccaatggcagacaataacgaaggcgccgacggagtgggtaatgcctcaggaaattggcattgcgattccacatggctgggcgacagagtcatcaccaccagcacccgcacctgggccttgcccacctacaataaccacctctacaagcaaatctccagtgcttcaacgggggccagcaacgacaaccactacttcggctacagcaccccctgggggtattttgatttcaacagattccactgccacttttcaccacgtgactggcagcgactcatcaacaacaattggggattccggcccaagagactcaacttcaaactcttcaacatccaagtcaaggaggtcacgacgaatgatggcgtcacaaccatcgctaataaccttaccagcacggttcaagtcttctcggactcggagtaccagcttccgtacgtcctcggctctgcgcaccagggctgcctccctccgttcccggcggacgtgttcatgattccgcaatacggctacctgacgctcaacaatggcagccaagccgtgggacgttcatccttttactgcctggaatatttcccttctcagatgctgagaacgggcaacaactttaccttcagctacacctttgaggaagtgcctttccacagcagctacgcgcacagccagagcctggaccggctgatgaatcctctcatcgaccaatacctgtattacctgaacagaactcaaaatcagtccggaagtgcccaaaacaaggacttgctgtttagccgtgggtctccagctggcatgtctgttcagcccaaaaactggctacctggaccctgttatcggcagcagcgcgtttctaaaacaaaaacagacaacaacaacagcaattttacctggactggtgcttcaaaatataacctcaatgggcgtgaatccatcatcaaccctggcactgctatggcctcacacaaagacgacgaagacaagttctttcccatgagcggtgtcatgatttttggaaaagagagcgccggagcttcaaacactgcattggacaatgtcatgattacagacgaagaggaaattaaagccactaaccctgtggccaccgaaagatttgggaccgtggcagtcaatttccagagcagcagcacagaccctgcgaccggagatgtgcatgctatgggagcattacctggcatggtgtggcaagatagagacgtgtacctgcagggtcccatttgggccaaaattcctcacacagatggacactttcacccgtctcctcttatgggcggctttggactcaagaacccgcctcctcagatcctcatcaaaaacacgcctgttcctgcgaatcctccggcggagttttcagctacaaagtttgcttcattcatcacccaatactccacaggacaagtgagtgtggaaattgaatgggagctgcagaaagaaaacagcaagcgctggaatcccgaagtgcagtacacatccaattatgcaaaatctgccaacgttgattttactgtggacaacaatggactttatactgagcctcgccccattggcacccgttaccttacccgtcccctgtaattacgtgttaatcaataaaccggttgattcgtttcagttgaactttggtctcctgtccttcttatcttatcggttaccatggttatagcttacacattaactgcttggttgcgcttcgcgataaaagacttacgtcatcgggttacccctagtgatggagttgcccactccctctctgcgcgctcgctcgctcggtggggcctgcggaccaaaggtccgcagacggcagagctctgctctgccggccccaccgagcgagcgagcgcgcagagagggagtgggcaa

SEQ ID NO: 4 - DNA, 3131 bp, Adeno-associated virus
gcggccgcgaattcgcccttggctgcgtcaactggaccaatgagaactttcccttcaatgattgcgtcgacaagatggtgatctggtgggaggagggcaagatgacggccaaggtcgtggagtccgccaaggccattctcggcggcagcaaggtgcgcgtggaccaaaagtgcaagtcgtccgcccagatcgaccccacccccgtgatcgtcacctccaacaccaacatgtgcgccgtgattgacgggaacagcaccaccttcgagcaccagcagcctctccaggaccggatgtttaagttcgaactcacccgccgtctggagcacgactttggcaaggtgacaaagcaggaagtcaaagagttcttccgctgggccagtgatcacgtgaccgaggtggcgcatgagttttacgtcagaaagggcggagccagcaaaagacccgcccccgatgacgcggataaaagcgagcccaagcgggcctgcccctcagtcgcggatccatcgacgtcagacgcggaaggagctccggtggactttgccgacaggtaccaaaacaaatgttctcgtcacgcgggcatgcttcagatgctgtttccctgcaaaacgtgcgagagaatgaatcggaatttcaacatttgcttcacacacggggtcagagactgctcagagtgtttccccggcgtgtcagaatctcaaccggtcgtcagaaagaggacgtatcggaaactccgtgcgattcatcatctgctggggcgggctcccgagattgcttgctcggcctgcgatctggtcaacgtggacctggatgactgtgtttctgagcaataaatgacttaaaccaggtatggctgccgatggttatcttccagattggctcgaggacaacctctctgagggcattcgcgagtggtgggcgctgaaacctggagccccgaagcccaaagccaaccagcaaaagcaggacgacggccggggtctggtgcttcctggctacaagtacctcggacccttcaacggactcgacaagggggagcccgtcaacgcggcggacgcagcggccctcgagcacgacaaggcttacgaccagcagctgcaggcgggtgacaatccgtacctgcggtataaccacgccgacgccgagtttcaggagcgtctgcaagaagatacgtcttttgggggcaacctcgggcgagcagtcttccaggccaagaagcgggttctcgaacctctcggtctggttgaggaaggcgctaagacggctcctggaaagaagagaccggtagagccatcaccccagcgttctccagactcctctacgggcatcggcaagaaaggccaacagcccgccagaaaaagactcaattttggtcagactggcgactcagagtcagttccagaccctcaacctctcggagaacctccagcagcgccctctggtgtgggacctaatacaatggctgcaggcggtggcgcaccaatggcagacaataacgaaggcgccgacggagtgggtagttcctcgggaaattggcattgcgattccacatggctgggcgacagagtcatcaccaccagcacccgaacctgggccctgcccacctacaacaaccacctctacaagcaaatctccaacgggacatcgggaggagccaccaacgacaacacctacttcggctacagcaccccctgggggtattttgactttaacagattccactgccacctttcaccacgtgactggcagcgactcatcaacaacaactggggattccgacccaagagactcagcttcaagctcttcaacatccaggtcaaggaggtcacgcagaatgaaggcaccaagaccatcgccaataacctcaccagcaccatccaggtgtttacggactcggagtaccagctgccgtacgttctcggctctgtccaccagggctgcctgcctccgttcccggcggacgtgttcatgattccccagtacggctacctaacactcaacaacggtagtcaggccgtgggacgctcctccttctactgcctggaatactttccttcgcagatgctgagaaccggcaacaacttccagtttacttacaccttcgaggacgtgcctttccacagcagctacgcccacagctagagcttggaccggctgatgaatcctctgattgaccagtacctgtactacttgtctcggactcaaacaacaggaggcacggcaaatacgcagactctgggcttcagccaaggtgggcctaatacaatggccaatcaggcaaagaactggctgccaggaccctgttaccgccaacaacgcgtctcaacgacaaccgggcaaaacaacaatagcaactttgcctggactgctgggaccaaataccatctgaatggaagaaattcattggctaatcctggcatcgctatggcaacacacaaagacgacgaggagcgtttttttcccagtaacgggatcctgatttttggcaaacaaaatgctgccagagacaatgcggattacagcgatgtcatgctcaccagcgaggaagaaatcaaaaccactaaccctgtggctacagaggaatacggtatcgtggcagataacttgcagcagcaaaacacggctcctcaaattggaactgtcaacagccagggggccttacccggtatggtctggcagaaccgggacgtgtacctgcagggtcccatctgggccaagattcctcacacggacggcaacttccacccgtctccgctgatgggcggctttggcctgaaacatcctccgcctcagatcctgatcaagaacacgcctgtacctgcggatcctccgaccaccttcaaccagtcaaagctgaactctttcatcacgcaatacagcaccggacaggtcagcgtggaaattgaatgggagctgcagaaggaaaacagcaagcgctggaaccccgagatccagtacacctccaactactacaaatctataagtgtggactttgctgttaatacagaaggcgtgtactctgaaccccgccccattggcacccgttacctcacccgtaatctgtaattgcctgttaatcaataaaccggttgattcgtttcagttgaactttggtctctgcgaagggcgaattc

SEQ ID NO: 5 - DNA, 255 bp, Adeno-associated virus 10
ggtaattcctccggaaattggcattgcgattccacatggctgggcgacagagtcatcaccaccagcacccgaacctgggtcctgcccacctacaacaaccacatctacaagcaaatctccagcgagacaggagccaccaacgacaaccactacttcggctacagcaccccctgggggtattttgactttaacagattccactgccacttttcaccacgtgactggcagcgactcatcaacaacaactggggattc

SEQ ID NO: 6 - protein, 738 aa, Adeno-associated virus 10
MAADGYLPDWLEDNLSEGIREWWDLKPGAPKPKANQQKQDDGRGLVLPGYKYLGPFNGLDKGEPVNAADAAALEHDKAYDQQLKAGDNPYLRYNHADAEFQERLQEDTSFGGNLGRAVFQAKKRVLEPLGLVEEAAKTAPGKKRPVEPSPQRSPDSSTGIGKKGQQPAKKRLNFGQTGESESVPDPQPIGEPPAGPSGLGSGTMAAGGGAPMADNNEGADGVGSSSGNWHCDSTWLGDRVITTSTRTWALPTYNNHLYKQISNGTSGGSTNDNTYFGYSTPWGYFDFNRFHCHFSPRDWQRLINNNWGFRPKRLSFKLFNIQVKEVTQNEGTKTIANNLTSTIQVFTDSEYQLPYVLGSAHQGCLPPFPADVFMIPQYGYLTLNNGSQAVGRSSFYCLEYFPSQMLRTGNNFEFSYTFEDVPFHSSYAHSQSLDRLMNPLIDQYLYYLSRTQSTGGTQGTQQLLFSQAGPANMSAQAKNWLPGPCYRQQRVSTTLSQNNNSNFAWTGATKYHLNGRDSLVNPGVAMATHKDDEERFFPSSGVLMFGKQGAGRDNVDYSSVMLTSEEEIKTTNPVATEQYGVVADNLQQANTGPIVGNVNSQGALPGMVWQNRDVYLQGPIWAKIPHTDGNFHPSPLMGGFGLKHPPPQILIKNTPVPADPPTTFSQAKLASFITQYSTGQVSVEIEWELQKENSKRWNPEIQYTSNYYKSTNVDFAVNTEGTYSEPRPIGTRYLTRNL

SEQ ID NO: 7 - protein, 738 aa, Adeno-associated virus 10
MAADGYLPDWLEDNLSEGIREWWDLKPGAPKPKANQQKQDDGRGLVLPGYKYLGPFNGLDKGEPVNAADAAALEHDKAYDQQLKAGDNPYLRYNHADAEFQERLQEDTSFGGNLGRAVFQAKKRVLEPLGLVEEGAKTAPGKKRPVEPSPQRSPDSSTGIGKKGQQPAKKRLNFGQTGDSESVPDPQPIGEPPAGPSGLGSGTMAAGGGAPMADNNEGADGVGSSSGNWHCDSTWLGDRVITTSTRTWALPTYNNHLYKQISNGTSGGSTNDNTYFGYSTPWGYFDFNRFHCHFSPRDWQRLINNNWGFRPKRLNFKLFNIQVKEVTQNEGTKTIANNLTSTIQVFTDSEYQLPYVLGSAHQGCLPPFPADVFMIPQYGYLTLNNGSQAVGRSSFYCLEYFPSQMLRTGNNFEFSYQFEDVPFHSSYAHSQSLDRLMNPLIDQYLYYLSRTQSTGGTAGTQQLLFSQAGPNNMSAQAKNWLPGPCYRQQRVSTTLSQNNNSNFAWTGATKYHLNGRDSLVNPGVAMATHKDDEERFFPSSGVLMFGKQGAGKDNVDYSSVMLTSEEEIKTTNPVATEQYGVVADNLQQQNAAPIVGAVNSQGALPGMVWQNRDVYLQGPIWAKIPHTDGNFHPSPLMGGFGLKHPPPQILIKNTPVPADPPTTFSQAKLASFITQYSTGQVSVEIEWELQKENSKRWNPEIQYTSNYYKSTNVDFAVNTDGTYSEPRPIGTRYLTRNL

SEQ ID NO: 8 - DNA, 258 bp, Adeno-associated virus 11
ggtaattcctccggaaattggcattgcgattccacatggctgggcgacagagtcatcaccaccagcacccgaacctgggccctgccaacctacaacaaccacctctacaaacaaatctccagcgcttcaacgggggccagcaacgacaaccactactttggctacagcaccccctgggggtattttgactttaacagattccactgccacttctcaccacgtgactggcagcgactcatcaacaacaactggggattc

SEQ ID NO: 9 - DNA, 255 bp, Adeno-associated virus 12
ggtaattcctccggaaattggcattgcgattccacatggctgggcgaccgagtcattaccaccagcacccggacttgggccctgcccacctacaacaaccacctctacaagcaaatctccagccaatcgggtgccaccaacgacaaccactacttcggctacagcaccccttgggggtattttgatttcaacagattccactgccatttctcaccacgtgactggcagcgactcatcaacaacaactggggattc

SEQ ID NO: 10 - DNA, 2208 bp, Adeno-associated virus 2
atggctgccgatggttatcttccagattggctcgaggacactctctctgaaggaataagacagtggtggaagctcaaacctggcccaccaccaccaaagcccgcagagcggcataaggacgacagcaggggtcttgtgcttcctgggtacaagtacctcggacccttcaacggactcgacaagggagagccggtcaacgaggcagacgccgcggccctcgagcacgacaaagcctacgaccggcagctcgacagcggagacaacccgtacctcaagtacaaccacgccgacgcggagtttcaggagcgccttaaagaagatacgtcttttgggggcaacctcggacgagcagtcttccaggcgaaaaagagggttcttgaacctctgggcctggttgaggaacctgttaagacggctccgggaaaaaagaggccggtagagcactctcctgtggagccagactcctcctcgggaaccggaaaggcgggccagcagcctgcaagaaaaagattgaattttggtcagactggagacgcagactcagtacctgacccccagcctctcggacagccaccagcagccccctctggtctgggaactaatacgatggctacaggcagtggcgcaccaatggcagacaataacgagggcgccgacggagtgggtaattcctcgggaaattggcattgcgattccacatggatgggcgacagagtcatcaccaccagcacccgaacctgggccctgcccacctacaacaaccacctctacaaacaaatttccagccaatcaggagcctcgaacgacaatcactactttggctacagcaccccttgggggtattttgacttcaacagattccactgccacttttcaccacgtgactggcaaagactcatcaacaacaactggggattccgacccaagagactcaacttcaagctctttaacattcaagtcaaagaggtcacgcagaatgacggtacgacgacgattgccaataaccttaccagcacggttcaggtgtttactgactcggagtaccagctcccgtacgtcctcggctcggcgcatcaaggatgcctcccgccgttcccagcagacgtcttcatggtgccacagtatggatacctcaccctgaacaacgggagtcaggcagtaggacgctcttcattttactgcctggagtactttccttctcagatgctgcgtaccggaaacaactttaccttcagctacacttttgaggacgttcctttccacagcagctacgctcacagccagagtctggaccgtctcatgaatcctctcatcgaccagtacctgtattacttgagcagaacaaacactccaagtggaaccaccacgcagtcaaggcttcagttttctcaggccggagcgagtgacattcgggaccagtctaggaactggcttcctggaccctgttaccgccagcagcgagtatcaaagacatctgcggataacaacaacagtgaatactcgtggactggagctaccaagtaccacctcaatggcagagactctctggtgaatccgggcccggccatggcaagccacaaggacgatgaagaaaagttttttcctcagagcggggttctcatctttgggaagcaaggctcagagaaaacaaatgtggacattgaaaaggtcatgattacagacgaagaggaaatcaggacaaccaatcccgtggctacggagcagtatggttctgtatctaccaacctccagagaggcaacagacaagcagctaccgcagatgtcaacacacaaggcgttcttccaggcatggtctggcaggacagagatgtgtaccttcaggggcccatctgggcaaagattccacacacggacggacattttcacccctctcccctcatgggtggattcggacttaaacaccctcctccacagattctcatcaagaacaccccggtacctgcgaatccttcgaccaccttcagtgcggcaaagtttgcttccttcatcacacagtactccacgggacaggtcagcgtggagatcgagtgggagctgcagaaggaaaacagcaaacgctggaatcccgaaattcagtacacttccaactacaacaagtctgttaatgtggactttactgtggacactaatggcgtgtattcagagcctcgccccattggcaccagatacctgactcgtaatctgtaa

SEQ ID NO: 11 - protein, 735 aa, Adeno-associated virus 2 [sequence omitted]

SEQ ID NO: 12 - protein, 621 aa, Adeno-associated virus 2
MPGFYEIVIKVPSDLDGHLPGISDSFVNWVAEKEWELPPDSDMDLNLIEQAPLTVAEKLQRDFLTEWRRVSKAPEALFFVQFEKGESYFHMHVLVETTGVKSMVLGRFLSQIREKLIQRIYRGIEPTLPNWFAVTKTRNGAGGGNKVVDECYIPNYLLPKTQPELQWAWTNMEQYLSACLNLTERKRLVAQHLTHVSQTQEQNKENQNPNSDAPVIRSKTSARYMELVGWLVDKGITSEKQWIQEDQASYISFNAASNSRSQIKAALDNAGKIMSLTKTAPDYLVGQQPVEDISSNRIYKILELNGYDPQYAASVFLGWATKKFGKRNTIWLFGPATTGKTNIAEAIAHTVPFYGCVNWTNENFPFNDCVDKMVIWWEEGKMTAKVVESAKAILGGSKVRVDQKCKSSAQIDPTPVIVTSNTNMCAVIDGNSTTFEHQQPLQDRMFKFELTRRLDHDFGKVTKQEVKDFFRWAKDHVVEVEHEFYVKKGGAKKRPAPSDADISEPKRVRESVAQPSTSDAEASINYADRYQNKCSRHVGMNLMLFPCRQCERMNQNSNICFTHGQKDCLECFPVSESQPVSVVKKAYQKLCYIHHIMGKVPDACTACDLVNVDLDDCIFEQ

SEQ ID NO: 13 - DNA, 4675 bp, Adeno-associated virus 2
ttggccactccctctctgcgcgctcgctcgctcactgaggccgggcgaccaaaggtcgcccgacgcccgggctttgcccgggcggcctcagtgagcgagcgagcgcgcagagagggagtggccaactccatcactaggggttcctggaggggtggagtcgtgacgtgaattacgtcatagggttagggaggtcctgtattagaggtcacgtgagtgttttgcgacattttgcgacaccatgtggtcacgctgggtatttaagcccgagtgagcacgcagggtctccattttgaagcgggaggtttgaacgcgcagccgccatgccggggttttacgagattgtgattaaggtccccagcgaccttgacgggcatctgcccggcatttctgacagctttgtgaactgggtggccgagaaggaatgggagttgccgccagattctgacatggatctgaatctgattgagcaggcacccctgaccgtggccgagaagctgcagcgcgactttctgacggaatggcgccgtgtgagtaaggccccggaggcccttttctttgtgcaatttgagaagggagagagctacttccacatgcacgtgctcgtggaaaccaccggggtgaaatccatggttttgggacgtttcctgagtcagattcgcgaaaaactgattcagagaatttaccgcgggatcgagccgactttgccaaactggttcgcggtcacaaagaccagaaatggcgccggaggcgggaacaaggtggtggatgagtgctacatccccaattacttgctccccaaaacccagcctgagctccagtgggcgtggactaatatggaacagtatttaagcgcctgtttgaatctcacggagcgtaaacggttggtggcgcagcatctgacgcacgtgtcgcagacgcaggagcagaacaaagagaatcagaatcccaattctgatgcgccggtgatcagatcaaaaacttcagccaggtacatggagctggtcgggtggctcgtggacaaggggattacctcggagaagcagtggatccaggaggaccaggcctcatacatctccttcaatgcggcctccaactcgcggtcccaaatcaaggctgccttggacaatgcgggaaagattatgagcctgactaaaaccgcccccgactacctggtgggccagcagcccgtggaggacatttccagcaatcggatttataaaattttggaactaaacgggtacgatccccaatatgcggcttccgtctttctgggatgggccacgaaaaagttcggcaagaggaacaccatctggctgtttgggcctgcaactaccgggaagaccaacatcgcggaggccatagcccacactgtgcccttctacgggtgcgtaaactggaccaatgagaactttcccttcaacgactgtgtcgacaagatggtgatctggtgggaggaggggaagatgaccgccaaggtcgtggagtcggccaaagccattctcggaggaagcaaggtgcgcgtggaccagaaatgcaagtcctcggcccagatagacccgactcccgtgatcgtcacctccaacaccaacatgtgcgccgtgattgacgggaactcaacgaccttcgaacaccagcagccgttgcaagaccggatgttcaaatttgaactcacccgccgtctggatcatgactttgggaaggtcaccaagcaggaagtcaaagactttttccggtgggcaaaggatcacgtggttgaggtggagcatgaattctacgtcaaaaagggtggagccaagaaaagacccgcccccagtgacgcagatataagtgagcccaaacgggtgcgcgagtcagttgcgcagccatcgacgtcagacgcggaagcttcgatcaactacgcagacaggtaccaaaacaaatgttctcgtcacgtgggcatgaatctgatgctgtttccctgcagacaatgcgagagaatgaatcagaattcaaatatctgcttcactcacggacagaaagactgtttagagtgctttcccgtgtcagaatctcaacccgtttctgtcgtcaaaaaggcgtatcagaaactgtgctacattcatcatatcatgggaaaggtgccagacgcttgcactgcctgcgatctggtcaatgtggatttggatgactgcatctttgaacaataaatgatttaaatcaggtatggctgccgatggttatcttccagattggctcgaggacactctctctgaaggaataagacagtggtggaagctcaaacctggcccaccaccaccaaagcccgcagagcggcataaggacgacagcaggggtcttgtgcttcctgggtacaagtacctcggacccttcaacggactcgacaagggagagccggtcaacgaggcagacgccgcggccctcgagcacgtacaaagcctacgaccggcagctcgacagcggagacaacccgtacctcaagtacaaccacgccgacgcggagtttcaggagcgccttaaagaagatacgtcttttgggggcaacctcggacgagcagtcttccaggcgaaaaagagggttcttgaacctctgggcctggttgaggaacctgttaagacggctccgggaaaaaagaggccggtagagcactctcctgtggagccagactcctcctcgggaaccggaaaggcgggccagcagcctgcaagaaaaagattgaattttggtcagactggagacgcagactcagtacctgacccccagcctctcggacagccaccagcagccccctctggtctgggaactaatacgatggctacaggcagtggcgcaccaatggcagacaataacgagggcgccgacggagtgggtaattcctccggaaattggcattgcgattccacatggatgggcgacagagtcatcaccaccagcacccgaacctgggccctgcccacctacaacaaccacctctacaaacaaatttccagccaatcaggagcctcgaacgacaatcactactttggctacagcaccccttgggggtattttgacttcaacagattccactgccacttttcaccacgtgactggcaaagactcatcaacaacaactggggattccgacccaagagactcaacttcaagctctttaacattcaagtcaaagaggtcacgcagaatgacggtacgacgacgattgccaataaccttaccagcacggttcaggtgtttactgactcggagtaccagctcccgtacgtcctcggctcggcgcatcaaggatgcctcccgccgttcccagcagacgtcttcatggtgccacagtatggatacctcaccctgaacaacgggagtcaggcagtaggacgctcttcattttactgcctggagtactttccttctcagatgctgcgtaccggaaacaactttaccttcagctacacttttgaggacgttcctttccacagcagctacgctcacagccagagtctggaccgtctcatgaatcctctcatcgaccagtacctgtattacttgagcagaacaaacactccaagtggaaccaccacgcagtcaaggcttcagttttctcaggccggagcgagtgacattcgggaccagtctaggaactggcttcctggaccctgttaccgccagcagcgagtatcaaagacatctgcggataacaacaacagtgaatactcgtggactggagctaccaagtaccacctcaatggcagagactctctggtgaatccggccatggcaagccacaaggacgatgaagaaaagttttttcctcagagcggggttctcatctttgggaagcaaggctcagagaaaacaaatgtgaacattgaaaaggtcatgattacagacgaagaggaaatcggaacaaccaatcccgtggctacggagcagtatggttctgtatctaccaacctccagagaggcaacagacaagcagctaccgcagatgtcaacacacaaggcgttcttccaggcatggtctggcaggacagagatgtgtaccttcaggggcccatctgggcaaagattccacacacggacggacattttcacccctctcccctcatgggtggattcggacttaaacaccctcctccacagattctcatcaagaacaccccggtacctgcgaatccttcgaccaccttcagtgcggcaaagtttgcttccttcatcacacagtactccacgggacacggtcagcgtggagatcgagtgggagctgcagaaggaaaacagcaaacgctggaatcccgaaattcagtacacttccaactacaacaagtctgttaatcgtggacttaccgtggatactaatggcgtgtattcagagcctcgccccattggcaccagatacctgactcgtaatctgtaattgcttgttaatcaataaaccgtttaattcgtttcagttgaactttggtctctgcgtatttctttcttatctagtttccatggctacgtagataagtagcatggcgggttaatcattaactacaaggaacccctagtgatggagttggccactccctctctgcgcgctcgctcgctcactgaggccgggcgaccaaaggtcgcccgacgcccgggctttgcccgggcggcctcagtgagcgagcgagcgcgcagagagggagtggccaa

SEQ ID NO: 14 - DNA, 4679 bp, Adeno-associated virus 2
ttggccactccctctctgcgcgctcgctcgctcactgaggccgggcgaccaaaggtcgcccgacgcccgggctttgcccgggcggcctcagtgagcgagcgagcgcgcagagagggagtggccaactccatcactaggggttcctggaggggtggagtcgtgacgtgaattacgtcatagggttagggaggtcctgtattagaggtcacgtgagtgttttgcgacattttgcgacaccatgtggtcacgctgggtatttaagcccgagtgagcacgcagggtctccattttgaagcgggaggtttgaacgcgcagccgccatgccggggttttacgagattgtgattaaggtccccagcgaccttgacgggcatctgcccggcatttctgacagctttgtgaactgggtggccgagaaggaatgggagttgccgccagattctgacatggatctgaatctgattgagcaggcacccctgaccgtggccgagaagctgcagcgcgactttctgacggaatggcgccgtgtgagtaaggccccggaggcccttttctttgtgcaatttgagaagggagagagctacttccacatgcacgtgctcgtggaaaccaccggggtgaaatccatggttttgggacgtttcctgagtcagattcgcgaaaaactgattcagagaatttaccgcgggatcgagccgactttgccaaactggttcgcggtcacaaagaccagaaatggcgccggaggcgggaacaaggtggtggatgagtgctacatccccaattacttgctccccaaaacccagcctgagctccagtgggcgtggactaatatggaacagtatttaagcgcctgtttgaatctcacggagcgtaaacggttggtggcgcagcatctgacgcacgtgtcgcagacgcaggagcagaacaaagagaatcagaatcccaattctgatgcgccggtgatcagatcaaaaacttcagccaggtacatggagctggtcgggtggctcgtggacaaggggattacctcggagaagcagtggatccaggaggaccaggcctcatacatctccttcaatgcggcctccaactcgcggtcccaaatcaaggctgccttggacaatgcgggaaagattatgagcctgactaaaaccgcccccgactacctggtgggccagcagcccgtggaggacatttccagcaatcggatttataaaattttggaactaaacgggtacgatccccaatatgcggcttccgtctttctgggatgggccacgaaaaagttcggcaagaggaacaccatctggctgtttgggcctgcaactaccgggaagaccaacatcgcggaggccatagcccacactgtgcccttctacgggtgcgtaaactggaccaatgagaactttcccttcaacgactgtgtcgacaagatggtgatctggtgggaggaggggaagatgaccgccaaggtcgtggagtcggccaaagccattctcggaggaagcaaggtgcgcgtggaccagaaatgcaagtcctcggcccagatagacccgactcccgtgatcgtcacctccaacaccaacatgtgcgccgtgattgacgggaactcaacgaccttcgaacaccagcagccgttgcaagaccggatgttcaaatttgaactcacccgccgtctggatcatgactttgggaaggtcaccaagcaggaagtcaaagactttttccggtgggcaaaggatcacgtggttgaggtggagcatgaattctacgtcaaaaagggtggagccaagaaaagacccgcccccagtgacgcagatataagtgagcccaaacgggtgcgcgagtcagttgcgcagccatcgacgtcagacgcggaagcttcgatcaactacgcagacaggtaccaaaacaaatgttctcgtcacgtgggcatgaatctgatgctgtttccctgcagacaatgcgagagaatgaatcagaattcaaatatctgcttcactcacggacagaaagactgtttagagtgctttcccgtgtcagaatctcaacccgtttctgtcgtcaaaaaggcgtatcagaaactgtgctacattcatcatatcatgggaaaggtgccagacgcttgcactgcctgcgatctggtcaatgtggatttggatgactgcatctttgaacaataaatgatttaaatcaggtatggctgccgatggttatcttccagattggctcgaggacactctctctgaaggaataagacagtggtggaagctcaaacctggcccaccaccaccaaagcccgcagagcggcataaggacgacagcaggggtcttgtgcttcctgggtacaagtacctcggacccttcaacggactcgacaagggagagccggtcaacgaggcagacgccgcggccctcgagcacgacaaagcctacgaccggcagctcgacagcggagacaacccgtacctcaagtacaaccacgccgacgcggagtttcaggagcgccttaaagaagatacgtcttttgggggcaacctcggacgagcagtcttccaggcgaaaaagagggttcttgaacctctgggcctggttgaggaacctgttaagacggctccgggaaaaaagaggccggtagagcactctcctgtggagccagactcctcctcgggaaccggaaaggcgggccagcagcctgcaagaaaaagattgaattttggtcagactggagacgcagactcagtacctgacccccagcctctcggacagccaccagcagccccctctggtctgggaactaatacgatggctacaggcagtggcgcaccaatggcagacaataacgagggcgccgacggagtgggtaattcctccggaaattggcattgcgattccacatggatgggcgacagagtcatcaccaccagcacccgaacctgggccctgcccacctacaacaaccacctctacaaacaaatttccagccaatcaggagcctcgaacgacaatcactactttggctacagcaccccttgggggtattttgacttcaacagattccactgccacttttcaccacgtgactggcaaagactcatcaacaacaactggggattccgacccaagagactcaacttcaagctctttaacattcaagtcaaagaggtcacgcagaatgacggtacgacgacgattgccaataaccttaccagcacggttcaggtgtttactgactcggagtaccagctcccgtacgtcctcggctcggcgcatcaaggatgcctcccgccgttcccagcagacgtcttcatggtgccacagtatggatacctcaccctgaacaacgggagtcaggcagtaggacgctcttcattttactgcctggagtactttccttctcagatgctgcgtaccggaaacaactttaccttcagctacacttttgaggacgttcctttccacagcagctacgctcacagccagagtctggaccgtctcatgaatcctctcatcgaccagtacctgtattacttgagcagaacaaacactccaagtggaaccaccacgcagtcaaggcttcagttttctcaggccggagcgagtgacattcgggaccagtctaggaactggcttcctggaccctgttaccgccagcagcgagtatcaaagacatctgcggataacaacaacagtgaatactcgtggactggagctaccaagtaccacctcaatggcagagactctctggtgaatccgggcccggccatggcaagccacaaggacgatgaagaaaagttttttcctcagagcggggttctcatctttgggaagcaaggctcagagaaaacaaatgtggacattgaaaaggtcatgattacagacgaagaggaaatcaggacaaccaatcccgtggctacggagcagtatggttctgtatctaccaacctccagagaggcaacagacaagcagctaccgcagatgtcaacacacaaggcgttcttccaggcatggtctggcaggacagagatgtgtaccttcaggggcccatctgggcaaagattccacacacggacggacattttcacccctctcccctcatgggtggattcggacttaaacaccctcctccacagattctcatcaagaacaccccggtacctgcgaatccttcgaccaccttcagtgcggcaaagtttgcttccttcatcacacagtactccacgggacaggtcagcgtggagatcgagtgggagctgcagaaggaaaacagcaaacgctggaatcccgaaattcagtacacttccaactacaacaagtctgttaatgtggactttactgtggacactaatggcgtgtattcagagcctcgccccattggcaccagatacctgactcgtaatctgtaattgcttgttaatcaataaaccgtttaattcgtttcagttgaactttggtctctgcgtatttctttcttatctagtttccatggctacgtagataagtagcatggcgggttaatcattaactacaaggaacccctagtgatggagttggccactccctctctgcgcgctcgctcgctcactgaggccgggcgaccaaaggtcgcccgacgcccgggctttgcccgggcggcctcagtgagcgagcgagcgcgcagagagggagtggccaa

SEQ ID NO: 15 - protein, 725 aa, Adeno-associated virus 5
MAADGYLPDWLEDTLSEGIRQWWKLKPGPPPPKPAERHKDDSRGLVLPGYKYLGPFNGLDKGEPVNEADAAALEHDKAYDRQLDSGDNPYLKYNHADAEFQERLKEDTSFGGNLGRAVFQAKKRVLEPFGLVEEGAKTAPTGKRIDDHFPKRKKARTEEDSKPSTSSDAEAGPSGSQQLQIPAQPASSLGADTMSAGGGGPLGDNNQGADGVGNASGDWHCDSTWMGDRVVTKSTRTWVLPSYNNHQYREIKSGSVDGSNANAYFGYSTPWGYFDFNRFHSHWSPRDWQRLINNYWGFRPRSLRVKIFNIQVKEVTVQDSTTTIANNLTSTVQVFTDDDYQLPYVVGNGTEGCLPAFPPQVFTLPQYGYATLNRDNTENPTERSSFFCLEYFPSKMLRTGNNFEFTYNFEEVPFHSSFAPSQNLFKLANPLVDQYLYRFVSTNNTGGVQFNKNLAGRYANTYKNWFPGPMGRTQGWNLGSGVNRASVSAFATTNRMELEGASYQVPPQPNGMTNNLQGSNTYALENTMIFNSQPANPGTTATYLEGNMLITSESETQPVNRVAYNVGGQMATNNQSSTTAPTTGTYNLQEIVPGSVWMERDVYLQGPIWAKIPETGAHFHPSPAMGGFGLKHPPPMMLIKNTPVPGNITSFSDVPVSSFITQYSTGQVTVEMEWELKKENSKRWNPEIQYTNNYNDPQFVDFAPDSTGEYRTTRPIGTRYLTRPL

SEQ ID NO: 16 - protein, 644 aa, Artificial Sequence
  Description of Artificial Sequence: Synthetic polypeptide
  MOD_RES (434)..(434): Xaa = any amino acid
KAYDQQLKAGDNPYLRYNHADAEFQERLQEDTSFGGNLGRAVFQAKKRVLEPLGLVETPAKTAPGKKRPVDSPDSTSGIGKKGQQPAKKRLNFGQTGDSESVPDPQPIGEPPAGPSGLGSGTMAAGGGAPMADNNEGADGVGNASGNWHCDSTWLGDRVITTSTRTWALPTYNNHLYKQISSQSAGSTNDNVYFGYSTPWGYFDFNRFHCHFSPRDWQRLINNNWGFRPKKLNFKLFNIQVKEVTTNDGVTTIANNLTSTVQVFSDSEYQLPYVLGSAHQGCLPPFPADVFMIPQYGYLTLNNGSQSVGRSSFYCLEYFPSQMLRTGNNFTFSYTFEDVPFHSSYAHSQSLDRLMNPLIDQYLYYLARTQSNAGGTAGNRELQFYQGGPTTMAEQAKNWLPGPCFRQQRVSKTLDQNNNSNFAWTGATKYHLNXRNSLVNPGVAMATHKDDEERFFPSSGVLIFGKTGAANKTTLENVLMTNEEEIRPTNPVATEEYGIVSSNLQAASTAAQTQVVNNQGALPGMVWQNRDVYLQGPIWAKIPHTDGNFHPSPLMGGFGLKHPPPQILIKNTPVPANPPEVFTPAKFASFITQYSTGQVSVEIEWELQKENSKRWNPEIQYTSNFDKQTGVDFAVDSQGVYSEP

SEQ ID NO: 17 - DNA, 1933 bp, Adeno-associated virus
caaggcctacgaccagcagctcaaagcgggtgacaatccgtacctgcggtataaccacgccgacgccgagtttcaggagtgtcttcaagaagatacgtcttttgggggcaacctcgggcgagcagtcttccaggccaaaaagcgggttctcgaacctcttggtctggttgagacgccagctaagacggcacctggaaagaagcgaccggtagactcgccagactccacctcgggcatcggcaagaaaggccagcagcccgcgaaaaagagactcaactttgggcagactggcgactcagagtcagtccccgaccctcaaccaatcggagaaccaccagcaggcccctctggtctgggatctggtacaatggttgcaggcggtggcgcaccaatggctgacaataacgagggcgccgacggagtgggtaatgcctcaggaaattggcattgcgattccacatggctgggcgacagagtcatcaccaccagcacccgaacctgggccctgcccacctacaacaaccacctctacaagcaaatctccagtcagtcagcagggagcaccaacgataacgtctatttcggctacagcaccccctgggggtattttgacttcaacagattccattgccacttctcaccacgtgactggcagcgacttatcaacaacaactggggattccggcccaagaagctcaacttcaagctcttcaacatccaggtcaaggaggtcacgacgaatgacggtgtcacaaccatcgctaataaccttaccagcacggttcaggtcttttcggactcggaatatcaactgccgtacgtcctcggctccgcgcaccagggctgcctgcctccgttcccggcagacgtgttcatgattccgcagtacggatacctgactctgaacaatggcagccaatcggtaggccgttcctccttctactgcctggagtactttccttctcagatgctgagaacgggcaacaacttcacctttagctacaccttcgaggacgtgcctttccacagcagctacgcgcacagccagagtctggaccggctgatgaatcccctcatcgaccagtacctgtactacttggccagaacacagagcaacgcaggaggtactgctggcaatcgggaactgcagttttatcagggcggacctaccaccatggccgaacaagcaaagaactggctgcccggaccttgcttccggcaacagagagtatccaagacgctggatcaaaataacaacagcaactttgcctggactggtgccacaaaataccatttaaatggaagaaattcattggttaatcccggtgtcgccatggcaacccacaaggacgacgaggaacgcttctccccttcgagcggagttctaatttttggcaaaactggagcagctaataaaactacattagaaaacgtgctcatgacaaatgaagaagaaattcgtcctaccaacccggtagctaccgaggaatacgggattgtaagcagcaacttgcaggcggctagcaccgcagcccagacacaagttgttaacaaccagggagccttacctggcatggtctggcagaaccgggacgtgtacctgcaaggtcccatttgggccaagattcctcacacggacggcaactttcacccgtctcctctaatgggtggctttggactgaaacacccgcctccccagatcctgatcaaaaacacgccggtacctgctaatcctccagaagtgtttactcctgccaagtttgcttccttcatcacgcagtacagcaccgggcaagtcagcgttgagatcgagtgggagctgcagaaagagaacagcaagcgctggaacccagagattcagtacacctccaactttgacaaacagactggagtggactttgctgttgacagccagggtgtttactctgagcct

SEQ ID NO: 18 - protein, 644 aa, Artificial Sequence
  Description of Artificial Sequence: Synthetic polypeptide
KAYDQQLKAGDNPYLRYNHADAEFQECLQEDTSFGGNLGRAVFQAKKRVLEPLGLVETPAKTAPGKKRPVDSPDSTSGIGKKGQQPAKKRLNFGQTGDSESVPDPQPIGEPPAGPSGLGSGTMVAGGGAPMADNNEGADGVGNASGNWHCDSTWLGDRVITTSTRTWALPTYNNHLYKQISSQSAGSTNDNVYFGYSTPWGYFDFNRFHCHFSPRDWQRLINNNWGFRPKKLNFKLFNIQVKEVTTNDGVTTIANNLTSTVQVFSDSEYQLPYVLGSAHQGCLPPFPADVFMIPQYGYLTLNNGSQSVGRSSFYCLEYFPSQMLRTGNNFTFSYTFEDVPFHSSYAHSQSLDRLMNPLIDQYLYYLARTQSNAGGTAGNRELQFYQGGPTTMAEQAKNWLPGPCFRQQRVSKTLDQNNNSNFAWTGATKYHLNGRNSLVNPGVAMATHKDDEERFSPSSGVLIFGKTGAANKTTLENVLMTNEEEIRPTNPVATEEYGIVSSNLQAASTAAQTQVVNNQGALPGMVWQNRDVYLQGPIWAKIPHTDGNFHPSPLMGGFGLKHPPPQILIKNTPVPANPPEVFTPAKFASFITQYSTGQVSVEIEWELQKENSKRWNPEIQYTSNFDKQTGVDFAVDSQGVYSEP

SEQ ID NO: 19 - DNA, 1933 bp, Adeno-associated virus
caaggcctacgaccagcagctcaaagcgggtgacaatccgtacctgcggtataaccacgccgacgccgagtttcaggagcgtcttcaagaagatacgtcttttgggggcaacctcgggcgagcagtcttccaggccaaaaagcgggttctcgaacctcttggtctggttgagacgccagctaagacggcacctggaaagaagcgaccggtagactcgccagactccacctcgggcatcggcaagaaaggccagcagcccgcgaaaaagagactcaactttgggcagactggcgactcagagccagtccccgaccctcaaccaatcggagaaccaccagcaggcccctctggtctgggatctggtacaatggctgcaggcggtggcgcaccaatggctgacaataacgagggcgccgacggagtgggtaatgcctcaggaaattggcattgcgattccacacggctgggcgacagagtcatcaccaccagcacccgaacctgggccctgcccacctacaacaaccacctctacaagcaaatctccagtcagtcagcagggagcaccaacgataacgtctatttcggctacagcaccccctgggggtattttgacttcaacagattccattgccacttctcaccacgtgactggcagcgacttatcaacaacaactggggattccggcccaagaagctcaacttcaagctcttcaacatccaggtcaaggaggtcacgacgaatgacggcgtcacaaccatcgctaataaccttaccagcacggttcaggtcttttcggactcggaatatcaactgccgtacgtcctcggctccgcgcaccagggctgcctgcctccgttcccggcagacgtgttcatgattccgcagtacggatacctgactctgaacaatggcagccaatcggtaggccgttcctccttctactgcctggagtactttccttctcagatgctgagaacgggcaacaacttcacctttagctacaccttcgaggacgtgcctttccacagcagctacgcgcacagccagagtctgggccggctgatgaatcccctcatcgaccagtacctgtactacttggccagaacacagagcaacgcaggaggtactgctggcaatcgggaactgcagttttatcagggcggacctaccaccatggccgaacaagcaaagaactggctgcccggaccttgcttccggcaacagagagtatccaagacgctggatcaaaataacaacagcaactttgcctggactggtgccacaaaataccatttaaatggaagaaattcattggttaatcccggtgtcgccatggcaacccacaaggacgacgaggaacgcttcttcccttcgagcggagttctaatttttggcaaaactggagcagctaataaaactacattagaaaacgtgctcatgacaaatgaagaagaaattcgtcctaccaacccggtagctaccgaggaatacgggattgtaagcagcaacttgcaggcggctagcaccgcagcccagacacaagttgttaacaaccagggagccttacctggcatggtctggcagaaccgggacgtgtacctgcaaggtcccatttgggccaagattcctcacacggacggcaactttcacccgtctcctctaatgggtggctttggactgaaacacccgcctccccagatcctgatcaaaaacacaccggtacctgctaatcctccagaagtgtttactcctgccaagtttgcttccttcatcacgcagtacagcaccgggcaagtcagcgttgagatcgaatgggagctgcagaaagagaacagcaagcgctggaacccagagattcagtacacctccaactttgacaaacagactggagtggactttgctgttgacagccagggtgtttactctgagcct

SEQ ID NO: 20 - protein, 644 aa, Artificial Sequence
  Description of Artificial Sequence: Synthetic polypeptide
KAYDQQLKAGDNPYLRYNHADAEFQERLQEDTSFGGNLGRAVFQAKKRVLEPLGLVETPAKTAPGKKRPVDSPDSTSGIGKKGQQPAKKRLNFGQTGDSEPVPDPQPIGEPPAGPSGLGSGTMAAGGGAPMADNNEGADGVGNASGNWHCDSTRLGDRVITTSTRTWALPTYNNHLYKQISSQSAGSTNDNVYFGYSTPWGYFDFNRFHCHFSPRDWQRLINNNWGFRPKKLNFKLFNIQVKEVTTNDGVTTIANNLTSTVQVFSDSEYQLPYVLGSAHQGCLPPFPADVFMIPQYGYLTLNNGSQSVGRSSFYCLEYFPSQMLRTGNNFTFSYTFEDVPFHSSYAHSQSLGRLMNPLIDQYLYYLARTQSNAGGTAGNRELQFYQGGPTTMAEQAKNWLPGPCFRQQRVSKTLDQNNNSNFAWTGATKYHLNGRNSLVNPGVAMATHKDDEERFFPSSGVLIFGKTGAANKTTLENVLMTNEEEIRPTNPVATEEYGIVSSNLQAASTAAQTQVVNNQGALPGMVWQNRDVYLQGPIWAKIPHTDGNFHPSPLMGGFGLKHPPPQILIKNTPVPANPPEVFTPAKFASFITQYSTGQVSVEIEWELQKENSKRWNPEIQYTSNFDKQTGVDFAVDSQGVYSEP

SEQ ID NO: 21 - DNA, 1933 bp, Adeno-associated virus; identical to SEQ ID NO: 19

SEQ ID NO: 22 - protein, 644 aa, Artificial Sequence; identical to SEQ ID NO: 20
  Description of Artificial Sequence: Synthetic polypeptide

SEQ ID NO: 23 - DNA, 1933 bp, Adeno-associated virus
caaggcctacgaccagcagctcaaagcgggtgacaatccgtacctgcggtataaccacgccgacgccgagtttcaggagcgtcttcaagaagatacgtcttttgggggcaacctcgggcgagcagtcttccaggccaaaaagcgggttctcgaacctcttggtctggttgagacgccagctaagacggcacctggaaagaagcgaccggtagactcgccagactccacctcgggcatcggcaagaaaggccagcagcccgcgaaaaagagactcaactttgggcagactggcgactcagagtcagtccccgaccctcaaccaatcggagaaccaccagcaggcccctctggtctgggatctggtacaatggctgcaggcggtggcgcaccaatggctgacaatagcgagggcgccgacggagtgggtaatgcctcaggaaattggcattgcgattccacatggctgggcgacagagtcatcaccaccagcacccgaacctgggccctgcccacctacaacaaccacctctacaagcaaatctccagtcagtcagcagggagcaccaacgataacgtctatttcggctacagcaccccctgggggtattttgacttcaacagattccattgccacttctcaccacgtgactggcagcgacttatcaacaacaactggggattccggcccaagaagctcaacttcaagctcttcaacatccaggtcaaggaggtcacgacgaatgacggtgtcacaaccatcgctaataaccttaccagcacggttcaggtcttttcggactcggaatatcaactgccgtacgtcctcggctccgcgcaccagggctgcctgcctccgttcccggcagacgtgttcatgattccgcagtacggatacctgactctgaacaatggcagccaatcggtaggccgttcctccttctactgcctggagtactttccttctcagatgctgagaacgggcaacaacttcacctttagctacaccttcgaggacgtgcctttccacagcagctacgcgcacagccagagtctggaccggctgatgaatcccctcatcgaccagtacctgtactacttggccagaacacagagcaacgcaggaggtactgctggcaatcgggaactgcagttttatcagggcggacctaccaccatggccgaacaagcaaagaactggctgcccggaccttgcttccggcaacagagagtatccaagacgctggatcaaaataacaacagcaactttgcctggactggtgccacaaaataccatttaaatggaagaaattcattggttaatcccggtgtcgccatggcaacccacaaggacgacgaggaacgcttcttcccttcgagcggagttctaatttttggcaaaactggagcagctaataaaactacattagaaaacgtgctcatgacaaatgaagaagaaattcgtcctaccaacccggtagctaccgaggaatacgggattgtaagcagcaacttgcaggcggctagcaccgcagcccagacacaagttgttaacaaccagggagccttacctggcatggtctggcagaaccgggacgtgtacctgcaaggtcccatttgggccaagattcctcacacggacggcaactttcacccgtctcctctaatgggtggctttggactgaaacacccgcctccccagatcctgatcaaaaacacaccggtacctgctaatcctccagaagtgtttactcctgccaagcttgcttccttcatcacgcagtacagcaccgggcaagtcagcgttgagatcgagtgggagctgcagaaagagaacagcaagcgctggaacccagagattcagtacacctccaactttgacaaacagactggagtggactttgctgttgacagccagggtgtttactctgagcct

SEQ ID NO: 24 - protein, 644 aa, Artificial Sequence
  Description of Artificial Sequence: Synthetic polypeptide
KAYDQQLKAGDNPYLRYNHADAEFQERLQEDTSFGGNLGRAVFQAKKRVLEPLGLVETPAKTAPGKKRPVDSPDSTSGIGKKGQQPAKKRLNFGQTGDSESVPDPQPIGEPPAGPSGLGSGTMAAGGGAPMADNSEGADGVGNASGNWHCDSTWLGDRVITTSTRTWALPTYNNHLYKQISSQSAGSTNDNVYFGYSTPWGYFDFNRFHCHFSPRDWQRLINNNWGFRPKKLNFKLFNIQVKEVTTNDGVTTIANNLTSTVQVFSDSEYQLPYVLGSAHQGCLPPFPADVFMIPQYGYLTLNNGSQSVGRSSFYCLEYFPSQMLRTGNNFTFSYTFEDVPFHSSYAHSQSLDRLMNPLIDQYLYYLARTQSNAGGTAGNRELQFYQGGPTTMAEQAKNWLPGPCFRQQRVSKTLDQNNNSNFAWTGATKYHLNGRNSLVNPGVAMATHKDDEERFFPSSGVLIFGKTGAANKTTLENVLMTNEEEIRPTNPVATEEYGIVSSNLQAASTAAQTQVVNNQGALPGMVWQNRDVYLQGPIWAKIPHTDGNFHPSPLMGGFGLKHPPPQILIKNTPVPANPPEVFTPAKLASFITQYSTGQVSVEIEWELQKENSKRWNPEIQYTSNFDKQTGVDFAVDSQGVYSEP

SEQ ID NO: 25 - DNA, 1933 bp, Adeno-associated virus
caaggcctacgaccagcagctcaaagcgggtgacaatccgtacctgcggtataaccacgccgacgccgagtttcaggagcgtcttcaagaagatacgtcttttgggggcaacctcgggcgagcagtcttccaggccaaaaagcgggttctcgaacctcttggtctggttgagacgccagctaagacggcacctggaaagaagcgaccggtagactcgccagactccacctcgggcatcggcaagaaaggccagcagcccgcgaaaaagagactcaactttgggcagactggcgactcagagtcagtccccgaccctcaaccaatcggagaaccaccagcaggcccctctggtctgggatctggtacaatggctgcaggcggtggcgcaccaatggctgacaataacgagggcgccgacggagtgggtaatgcctcaggaaattggcattgcgattccacatggctgggcgacagagtcatcaccaccagcacccgaacctgggccctgcccacctacaacaaccacctctacaagcaaatctccagtcagtcagcagggagcaccaacgataacgtctatttcggctacagcaccccctgggggtattttgacttcaacagattccattgccacttctcaccacgtgactggcagcgacttatcaacaacaactggggattccggcccaagaagctcaacttcaagctcttcaacatccaggtcaaggaggtcacgacgaatgacggcgtcacaaccatcgctaataaccttaccagcacggttcaggtcttttcggacccggaatatcaactgccgtacgtcctcggctccgcgcaccagggctgcctgcctccgttcccggcagacgtgttcatgattccgcagtacggatacctgactctgaacaatggcagccaatcggtaggccgttcctccttctactgcctggagtactttccttctcagatgctgagaacgggcaacaacttcacctttagctacaccttcgaggacgtgcctttccacagcagctacgcgcacagccagagtctggaccggctgatgaatcccctcatcgaccagtacctgtactacttggccagaacacagagcaacgcaggaggtactgctggcaatcgggaactgcagttttatcagggcggacctaccaccatggccgaacaagcaaagaactggctgcccggaccttgcttccggcaacagagagtatccaagacgctggatcaaaataacaacagcaactttgcctggactggtgccacaaaataccatttaaatggaagaaattcattggttaatcccggtgtcgccatggcaacccacaaggacgacgaggaacgcttcttcccttcgagcggagttctaatttttggcaaaactggagcagctaataaaactacattagaaaacgtgctcatgacaaatgaagaagaaattcgtcctaccaacccggtagctaccgaggaatacgggattgtaagcagcaacttgcaggcggctagcaccgcagcccagacacaagttgttaacaaccagggagccttacctggcatggtctggcagaaccgggacgtgtacctgcaaggtcccatttgggccaagattcctcacacggacggcaactttcacccgtctcctctaatgggtggctttggactgaaacacccgcctccccagatcctgatcaaaaacacaccggtacctgctaatcctccagaagtgtttactcctgccaagattgcttccttcatcacgcagtacagcaccgggcaagtcagcgttgagatcgagtgggagctgcagaaagagaacagcaagcgctggaacccagagattcagtacacctccaactttgacaaacagactggagtggactttgctgttgacagccagggtgtttactctgagcct

SEQ ID NO: 26 - protein, 644 aa, Artificial Sequence
  Description of Artificial Sequence: Synthetic polypeptide
KAYDQQLKAGDNPYLRYNHADAEFQERLQEDTSFGGNLGRAVFQAKKRVLEPLGLVETPAKTAPGKKRPVDSPDSTSGIGKKGQQPAKKRLNFGQTGDSESVPDPQPIGEPPAGPSGLGSGTMAAGGGAPMADNNEGADGVGNASGNWHCDSTWLGDRVITTSTRTWALPTYNNHLYKQISSQSAGSTNDNVYFGYSTPWGYFDFNRFHCHFSPRDWQRLINNNWGFRPKKLNFKLFNIQVKEVTTNDGVTTIANNLTSTVQVFSDPEYQLPYVLGSAHQGCLPPFPADVFMIPQYGYLTLNNGSQSVGRSSFYCLEYFPSQMLRTGNNFTFSYTFEDVPFHSSYAHSQSLDRLMNPLIDQYLYYLARTQSNAGGTAGNRELQFYQGGPTTMAEQAKNWLPGPCFRQQRVSKTLDQNNNSNFAWTGATKYHLNGRNSLVNPGVAMATHKDDEERFFPSSGVLIFGKTGAANKTTLENVLMTNEEEIRPTNPVATEEYGIVSSNLQAASTAAQTQVVNNQGALPGMVWQNRDVYLQGPIWAKIPHTDGNFHPSPLMGGFGLKHPPPQILIKNTPVPANPPEVFTPAKIASFITQYSTGQVSVEIEWELQKENSKRWNPEIQYTSNFDKQTGVDFAVDSQGVYSEP

SEQ ID NO: 27 - protein, 738 aa, Artificial Sequence
  Description of Artificial Sequence: Synthetic polypeptide
MAADGYLPDWLEDNLSEGIREWWALKPGAPKPKANQQKQDDGRGLVLPGYKYLGPFNGLDKGEPVNAADAAALEHDKAYDQQLKAGDNPYLRYNHADAEFQERLQEDTSFGGNLGRAVFQAKKRVLEPLGLVEEGAKTAPGKKRPVEPSPQRSPDSTTGIGKKGQQPAKKRLNFGQTGDSESVPDPQPIGEPPAGPSGLGSGTMAAGGGAPMADNNEGADGVGSSSGNWHCDSTWLGDRVITTSTRTWALPTYNNHLYKQISNGTSGGSTNDNTYFGYSTPWGYFDFNRFHCHFSPRDWQRLINNNWGFRPKRLNFKLFNIQVKEVTQNEGTKTIANNLTSTIQVFTDSEYQLPYVLGSARQGCLPPFPADVFMIPQYGYLTLNNGSQAVGRSSFYCLEYFPSQMLRTGNNFEFSYQFEDVPFHSSYAHSQSLDRLMNPLIDQYLYYLSRTQSTGGTAGTQQLLFSQAGPNNMSAQAKNWLPGPCYRQQRVSTTLSQNNNSNFAWTGATKYHLNGRDSLVNPGVAMATHKDDEERFFPSSGVLMFGKQGAGKGNVDYSSVMLTSEEEIKTTNPVATEQYGVVADNLQQQNAAPIVGAVNSQGALPGMVWQNRDVYLQGPIWAKIPHTDGNFHPSPLMGGFGLKHPPPQILIKNTPVPADPPTTFSQAKLASFITQYSTGQVSVEIEWELQKENSKRWNPEIQYTSNYYKSTNVDFAVNTDGTYSEPRPIGTRYLTRNL

SEQ ID NO: 28 - DNA, 3121 bp, Adeno-associated virus
gaattcgcccttctacggctgcgtcaactggaccaatgagaactttcccttcaacgactgtgtcgacaagatggtgatctggtgggaggaggggaagatgaccgccaaggtcgtggagtcggccaaagccattctcggaggaagcaaggtgcgcgtggaccagaaatgcaagtcctcggcccagatagacccgactcccgtgatcgtcacctccaacaccaacatgtgcgccgtgattgacgggaactcaacgaccttcgaacaccagcagccgttgcaagaccggatgttcaaatttgaactcacccgccgtctggatcatgactttgggaaggtcaccaagcaggaagtcaaagactttttccggtgggcaaaggatcacgtggttgaggtggagcacgaattctacgtcaaaaagggtggagccaagaaaagacccgcccccagtgacgcagatataagtgagcccaaacgggtgcgcgagtcagttgcgcagccatcgacgtcagacgcggaagcttcgatcaactacgcagacaggtaccaaaacaaatgttctcgtcacgcgggcatgaatctgatgctgtttccctgcagacaatgcgagagaatgaatcagaattcaaatatctgcttcactcacggacagaaagactgtttagagtgctttcccgtgtcagaatctcaacccgtttctgtcgtcaaaaaggcgtatcagaaactgtgctacattcatcatatcatgggaaaggtgccagacgcttgcactgcctgcgatctggtcgatgtggatttggatgactgcatctttgaacaataaatgatttaaatcaggtatggctgccgatggttatcttccagattggctcgaggacaacctctctgagggcattcgcgagtggtgggcgctgaaacctggagccccgaagcccaaagccaaccagcaaaagcaggacggcggccggggtctggtgcttcctggctacaagtacctcggacccttcaacggactcgacaagggggagcccgtcaacgcggcggacgcagcggccctcgagcacgacaaggcctacgaccagcagctcaaagcgggtgacaatccgtacctgcggtataaccacgccgacgccgagtttcaggagcgtctgcaagaagatacgtcttttgggggcaacctcgggcgagcagtcttccaggccaagaagcgggttctcgaacctctcggtctggttgaggaaggcgctaagacggctcctggaaagaagagaccggtagagccatcaccccagcgttctccagactcctctacgggcatcggcaagaaaggccagcagcccgcgaaaaagagactcaactttgggcagactggcgactcagagtcagtgcccgaccctcaaccaatcggagaaccccccgcaggcccctctggtctgggatctggtacaatggctgcaggcggtggcgctccaatggcagacaataacgaaggcgccgacggagtgggtagttcctcaggaaattggcattgcgattccacatggctgggcgactgagtcatcaccaccagcacccgaacctgggccctccccacctacaacaaccacctctacaagcaaatctccaacgggacttcgggaggaagcaccaacgacaacacctacttcggctacagcaccccctgggggtattttgactttaacagattccactgccacttctcaccacgtgactggcagcgactcatcaacaacaactggggattccggcccaagagactcaacttcaagctcttcaacatccaggtcaaggaggtcacgcagaatgaaggcaccaagaccatcgccaataaccttaccagcacgattcaggtctttacggactcggaataccagctcccgtacgtcctcggctctgcgcaccagggctgcctgcctccgttcccggcggacgtcttcatgattcctcagtacgggtacctgactctgaacaatggcagtcaggccgtgggccgttcctccttctactgcctggagtactttccttctcaaatgctgagaacgggcaacaactttgagttcagctaccagtttgaggacgtgccttttcacagcagctacgcgcacagccaaagcctggaccggctgatgaaccccctcatcgaccagtacctgtactacctgtctcggactcagtccacgggaggtaccgcaggaactcagcagttgctattttctcaggccgggcctaataacatgtcggctcaggccaaaaactggctacccgggccctgctaccggcagtaacgcgtctccacgacactgtcgcaaaataacaacagcaactttgtctggaccggtgccaccaagtatcatctgaatggcagagactctctggtagatcccggtgtcgctatggcaacccacaaggacgacgaagagcgattttttccgtccagcggagtcataatgtttgggaaacagggagctggaaaagacaacgtggactatagcagcgtcatgctaaccagtgaggaagaaattaaaaccaccaacccagtggccacagaacagtacggcgtggtggccgataacctgcaacagcaaaacgccgctcctattgtaggggccgtcaacagtcaaggagccttacctggcatggtctggcagaaccgggacgtgtacctgcagggtcctacctgggccaagattcctcacacggacggaaactttcatccctcgccgctgatgggaggctttggactgaaacacccgcctcctcagatcctgattaagaatacacctgttcccgcggatcctccaactaccttcagtcaagctaagctggcgtcgttcatcacgcagtacagcaccggacaggtcagcgtggaaattgaatgggagctgcaggaagaaaacagcaaacgctggaacccagagattcaatacacttccaactactacaaatctacaaatgtggactttgctgttaacacagatggcacttattctgagcctcgccccatcggcacccgttacctcacccgtaatctgtaattgcttgttaatcaataaaccggttgattcgtttcagttgaactttggtctctgcgaagggcgaattc

SEQ ID NO: 29 - protein, 738 aa, Artificial Sequence
  Description of Artificial Sequence: Synthetic polypeptide
MAADGYLPDWLEDNLSEGIREWWALKPGAPKPKANQQKQDDGRGLVLPGYKYLGPFNGLDKGEPVNAADAAALEHDKAYDQQLKAGDNPYLRYNHADAEFQERLQEDTSFGGNLGRAVFQAKKRVLEPLGLVEEGAKTAPGKKRPVEPSPQRSPDSSTGIGKKGQQPAKKRLNFGQTGDSESVPDPQPIGEPPAGPSGLGSGTMAAGGGAPMADNNEGADGVGSSSGNWHCDSTWLGDGVITTSTRTWALPTYNNHLYKQISNGTSGGSTNDNTYFGYSTPWGYFDFNRFHCHFSPRDWQRLINNNWGFRPKSLNFKLFNIQVKEVTQNEGTKTIANNLTSTIQVFTDSEYQLPYVLGSAHQGCLPPFPADVFMIPQYGYLTLNNGSQAVGRSSFYCLEYFPSQMLRTGNNFEFSYQFEDVPFHSSYAHSQSLDRLMNPLIDQYLYYLSRTQSTGGTAGTQQLLFSQAGPNNMSAQAKNWLPGPCYRQQRVSTTLSQNDNSNFAWTGATKYHLNGRDSLVNPGVAMATHKDDEERFFPSSGVLMFGKQGAGKDNVDYSSVMLTSEEEIKTTNPVATEQYGVVADNLQQQNAAPIVGAVNSQGALPGMVWQNRDVYLQGPIWAKIPHTDGNFHPSPLMGGFGLKHPPPQILIKNTPVPADPPTTFSQAKLASFITQYSTGQVSVEIEWELQKENSKRWNPEIQYTSNYYKSTNVDFAVNTDGTYSEPRPIGTRYLTRNL

SEQ ID NO: 30 - DNA, 3121 bp, Adeno-associated virus
gaattcgcccttcgcgagaccaaagttcaactgaaacgaatcaaccggtttattgattaacaagcaattacagattacgggtgaggtaacgggtgccgatggggcgaggctcagaataagtgccatctgtgttaacagcaaagtccacatttgtagatttgtagtagttggaagtgtattgaatctctgggttccagcgtttgctgttttctttctgcagctcccattcaatttccacgctgacctgtccggtgctgtactgcgtgatgaacgacgccagcttagcttgactgaaggtagttggaggatccgcgggaacaggtgtattcttaatcaggatctgaggaggcgggtgtttcagtccaaagcctcccatcagcggcgagggatgaaagtttccgtccgtgtgaggaatcttggcccagataggaccctgcaggtacacgtcccggttctgccagaccatgccaggtaaggctccttgactgttgacggcccctacaataggagcggcgttttgctgttgcaggttatcggccaccacgccgtactgttctgtggccactgggttggtggttttaatttcttcctcactggttagcataacgctgctatagtccacgttgtcttttccagctccctgtttcccaaacattaagactccgctggacggaaaaaatcgctcttcgtcgtccttgtgggttgccatagcgacaccgggatttaccagagagtctctgccattcagatgatacttggtggcaccggtccaggcaaagttgctgttgtcattttgcgacagtgtcgtggagacgcgttgctgccggtagcagggcccgggtagccagtttttggcctgagccgacatgttattaggcccggcctgagaaaatagcaactgctgagttcctgcggtacctcccgtggactgagtccgagacaggtagtacaggtactggtcgatgagggggttcatcagccggtccaggctttggctgtgcgcgtagctgctgtgaaaaggcacgtcctcaaactggtagctgaactcaaagttgttgcccgttctcagcatttgagaaggaaagtactccaggcagtagaaggaggaacggcccacggcctgactgccattgttcagagtcaggtacccgtactgaggaatcatgaagacgtccgccgggaacggaggcaggcagccctggtgcgcagagccgaggacgtacgggagctggtattccgagtccgtaaagacctgaatcgtgctggtaaggttattggcgatggtcttggtgccttcattctgcgtgacctccttgacctggatgttgaagagcttgaagttgaggctcttgggccggaatccccagttgttgttgatgagtcgctgccagtcacgtggtgagaagtggcagtggaatctgttaaagtcaaaatacccccagggggtgctgtagccgaagtaggtgttgtcgttggtgcttcctcccgaagtcccgttggagatttgcttgtagaggtggttgttgtaggtggggagggcccaggttcgggtgctggtggtgatgactccgtcgcccagccatgtggaatcgcaatgccaatttcctgaggaactacccactccgtcggcgccttcgttattgtctgccattggagcgccaccgcctgcagccattgtaccagatcccagaccagaggggcctgcggggggttctccgattggttgagggtcgggcactgactctgagtcgccagtctgcccaaagttgagtctctttttcgcgggctgctggcctttcttgccgatgcccgtagaggagtctggagaacgctggggtgatggctctaccggtctcttctttccaggagccgtcttagcgccttcctcaaccagaccgagaggttcgagaacccgcttcttggcctggaagactgctcgcccgaggttgcccccaaaagacgtatcttcttgcagacgctcctgaaactcggcgtcggcgtggttataccgcaggtacggattgtcacccgctttgagctgctggtcgtaggccttgtcgtgctcgagggccgctgcgtccgccgcgttgacgggctcccccttgtcgagtccgttgaagggtccgaggtacttgtagccaggaagcaccagaccccggccgtcgtcctgcttttgctggttggctttgggcttcggggctccaggtttcagcgcccaccactcgcgaatgccctcagagaggttgtcctcgagccaatctggaagataaccatcggcagccatacctgatttaaatcatttattgttcaaagatgcagtcatccaaatccacattgaccagatcgcaggcagtgcaagcgtctggcacctttcccatgatatgatgaatgtagcacagtttctgatacgcctttttgacgacagaaacgggttgagattctgacacgggaaagcactctaaacagtctttctgtccgtgagtgaagcagatatttgaattctgattcattctctcgcattgtctgcagggaaacagcatcagattcatgcccacgtgacgagaacatttgttttggtacctgtctgcgtagttgatcgaagcttccgcgtctgacgtcgatggctgcgcaactgactcgcgcacccgtttgggctcacttatatctgcgtcactgggggcgggtcttttcttggctccaccctttttgacgtagaattcatgctccacctcaaccacgtgatcctttgcccaccggaaaaagtctttgacttcctgcttggtgaccttcccaaagtcatgatccagacggcgggtgagttcaaatttgaacatccggtcttgcaacggctgctggtgttcgaaggtcgttgagttcccgtcaatcacggcgcacatgttggtgttggaggtgacgatcacgggagtcgggtctatctgggccgaggacttgcatttctggtccacgcgcaccttgcttcctccgagaatggctttggccgactccacgaccttggcggtcatcttcccctcctcccaccagatcaccatcttgtcgacacagtcgttgaagggaaagttctcattggtccagttgacgcagccgtagaaagggcgaattc

SEQ ID NO: 31 - DNA, 2211 bp, Adeno-associated virus
atggctgctgacggttatcttccagattggctcgaggacaacctttctgaaggcattcgtgagtggtgggctctgaaacctggagtccctcaacccaaagcgaaccaacaacaccaggacaaccgtcggggtcttgtgcttccgggttacaaatacctcggacccggtaacggactcgacaaaggagagccggtcaacgaggcggacgcggcagccctcgaacacgacaaagcttacgaccagcagctcaaggccggtgacaacccgtacctcaagtacaaccacgccgacgccgagtttcaggagcgtcttcaagaagatacgtcttttgggggcaaccttggcagagcagtcttccaggccaaaaagaggatccttgagcctcttggtctggttgaggaagcagctaaaacggctcctggaaagaagggggctgtagatcagtctcctcaggaaccggactcatcatctggtgttggcaaatcgggcaaacagcctgccagaaaaagactaaatttcggtcagactggagactcagagtcagtcccagaccctcaacctctcggagaaccaccagcagcccccacaagtttgggatctaatacaatggcttcaggcggtggcgcaccaatggcagacaataacgagggtgccgatggagtgggtaattcctcaggaaattggcattgcgattcccaatggctgggcgacagagtcatcaccaccagcaccagaacctgggccctgcccacttacaacaaccatctctacaagcaaatctccagccaatcaggagcttcaaacgacaaccactactttggctacagcaccccttgggggtattttgactttaacagattccactgccacttctcaccacgtgactggcagcgactcattaacaacaactggggattccggcccaagaaactcagcttcaagctcttcaacatccaagttagaggggtcacgcagaacgatggcacgacgactattgccaataaccttaccagcacggttcaagtgtttacggactcggagtatcagctcccgtacgtgctcgggtcggcgcaccaaggctgtctcccgccgtttccagcggacgtcttcatggtccctcagtatggatacctcaccctgaacaacggaagtcaagcggtgggacgctcatccttttactgcctggagtacttcccttcgcagatgctaaggactggaaataacttccaattcagctataccttcgaggatgtaccttttcacagcagctacgctcacagccagagtttggatcgcttgatgaatcctcttattgatcagtatctgtactacctgaacagaacgcaaggaacaacctctggaacaaccaaccaatcacggctgctttttagccaggctgggcctcagtctatgtctttgcaggccagaaattggctacctgggccctgctaccggcaacagagactttcaaagactgctaacgacaacaacaacagtaactttccttggacagcggccagcaaatatcatctcaatggccgcgactcgctggtgaatccaggaccagctatggccagtcacaaggacgatgaagaaaaatttttccctatgcacggcaatctaatatttggcaaagaagggacaacggcaagtaacgcagaattagataatgtaatgattacggatgaagaagagattcgtaccaccaatcctgtggcaacagagcagtatggaactgtggcaaataacttgcagagctcaaatacagctcccacgactggaactgtcaatcatcagggggccttacctggcatggtgtggcaagatcgtgacgtgtaccttcaaggacctatctgggcaaagattcctcacacggatggacactttcatccttctcctctgatgggaggctttggactgaaacatccgcctcctcaaatcatgatcaaaaatactccggtaccggcaaatcctccgacgactttcagcccggccaagtttgcttcatttatcactcagtactccactggacaggtcagcgtggaaattgagtgggagctacagaaagaaaacagcaaacgttggaatccagagattcagtacacttccaactacaacaagtctgttaatgtggactttactgtagacactaatggtgtttatagtgaacctcgccctattggaacccggtatctcacacgaaacttgtga

SEQ ID NO: 32 - protein, 736 aa, Adeno-associated virus 3
MAADGYLPDWLEDNLSEGIREWWALKPGVPQPKANQQHQDNRRGLVLPGYKYLGPGNGLDKGEPVNEADAAALEHDKAYDQQLKAGDNPYLKYNHADAEFQERLQEDTSFGGNLGRAVFQAKKRILEPLGLVEEAAKTAPGKKGAVDQSPQEPDSSSGVGKSGKQPARKRLNFGQTGDSESVPDPQPLGEPPAAPTSLGSNTMASGGGAPMADNNEGADGVGNSSGNWHCDSQWLGDRVITTSTRTWALPTYNNHLYKQISSQSGASNDNHYFGYSTPWGYFDFNRFHCHFSPRDWQRLINNNWGFRPKKLSFKLFNIQVRGVTQNDGTTTIANNLTSTVQVFTDSEYQLPYVLGSAHQGCLPPFPADVFMVPQYGYLTLNNGSQAVGRSSFYCLEYFPSQMLRTGNNFQFSYTFEDVPFHSSYAHSQSLDRLMNPLIDQYLYYLNRTQGTTSGTTNQSRLLFSQAGPQSMSLQARNWLPGPCYRQQRLSKTANDNNNSNFPWTAASKYHLNGRDSLVNPGPAMASHKDDEEKFFPMHGNLIFGKEGTTASNAELDNVMITDEEEIRTTNPVATEQYGTVANNLQSSNTAPTTGTVNHQGALPGMVWQDRDVYLQGPIWAKIPHTDGHFHPSPLMGGFGLKHPPPQIMIKNTPVPANPPTTFSPAKFASFITQYSTGQVSVEIEWELQKENSKRWNPEIQYTSNYNKSVNVDFTVDTNGVYSEPRPIGTRYLTRNL

SEQ ID NO: 33 - DNA, 4726 bp, Adeno-associated virus 3
ttggccactccctctatgcgcactcgctcgctcggtggggcctggcgaccaaaggtcgccagacggacgtgctttgcacgtccggccccaccgagcgagcgagtgcgcatagagggagtggccaactccatcactagaggtatggcagtgacgtaacgcgaagcgcgcgaagcgagaccacgcctaccagctgcgtcagcagtcaggtgacccttttgcgacagtttgcgacaccacgtggccgctgagggtatatattctcgagtgagcgaaccaggagctccattttgaccgcgaaatttgaacgagcagcagccatgccggggttctacgagattgtcctgaaggtcccgagtgacctggacgagcgcctgccgggcatttctaactcgtttgttaactgggtggccgagaaggaatgggacgtgccgccggattctgacatggatccgaatctgattgagcaggcacccctgaccgtggccgaaaagcttcagcgcgagttcctggtggagtggcgccgcgtgagtaaggccccggaggccctcttttttgtccagttcgaaaagggggagacctacttccacctgcacgtgctgattgagaccatcggggtcaaatccatggtggtcggccgctacgtgagccagattaaagagaagctggtgacccgcatctaccgcggggtcgagccgcagcttccgaactggttcgcggtgaccaaaacgcgaaatggcgccgggggcgggaacaaggtggtggacgactgctacatccccaactacctgctccccaagacccagcccgagctccagtgggcgtggactaacatggaccagtatttaagcgcctgtttgaatctcgcggagcgtaaacggctggtggcgcagcatctgacgcacgtgtcgcagacgcaggagcagaacaaagagaatcagaaccccaattctgacgcgccggtcatcaggtcaaaaacctcagccaggtacatggagctggtcgggtggctggtggaccgcgggatcacgtcagaaaagcaatggattcaggaggaccaggcctcgtacatctccttcaacgccgcctccaactcgcggtcccagatcaaggccgcgctggacaatgcctccaagatcatgagcctgacaaagacggctccggactacctggtgggcagcaacccgccggaggacattaccaaaaatcggatctaccaaatcctggagctgaacgggtacgatccgcagtacgcggcctccgtcttcctgggctgggcgcaaaagaagttcgggaagaggaacaccatctggctctttgggccggccacgacgggtaaaaccaacatcgcggaagccatcgcccacgccgtgcccttctacggctgcgtaaactggaccaatgagaactttcccttcaacgattgcgtcgacaagatggtgatctggtgggaggagggcaagatgacggccaaggtcgtggagagcgccaaggccattctgggcggaagcaaggtgcgcgtggaccaaaagtgcaagtcatcggcccagatcgaacccactcccgtgatcgtcacctccaacaccaacatgtgcgccgtgattgacgggaacagcaccaccttcgagcatcagcagccgctgcaggaccggatgtttgaatttgaacttacccgccgtttggaccatgactttgggaaggtcaccaaacaggaagtaaaggactttttccggtgggcttccgatcacgtgactgacgtggctcatgagttctacgtcagaaagggtggagctaagaaacgccccgcctccaatgacgcggatgtaagcgagccaaaacgggagtgcacgtcacttgcgcagccgacaacgtcagacgcggaagcaccggcggactacgcggacaggtaccaaaacaaatgttctcgtcacgtgggcatgaatctgatgctttttccctgtaaaacatgcgagagaatgaatcaaatttccaatgtctgttttacgcatggtcaaagagactgtggggaatgcttccctggaatgtcagaatctcaacccgtttctgtcgtcaaaaagaagacttatcagaaactgtgtccaattcatcatatcctgggaagggcacccgagattgcctgttcggcctgcgatttggccaatgtggacttggatgactgtgtttctgagcaataaatgacttaaaccaggtatggctgctgacggttatcttccagattggctcgaggacaacctttctgaaggcattcgtgagtggtgggctctgaaacctggagtccctcaacccaaagcgaaccaacaacaccaggacaaccgtcggggtcttgtgcttccgggttacaaatacctcggacccggtaacggactcgacaaaggagagccggtcaacgaggcggacgcggcagccctcgaacacgacaaagcttacgaccagcagctcaaggccggtgacaacccgtacctcaagtacaaccacgccgacgccgagtttcaggagcgtcttcaagaagatacgtcttttgggggcaaccttggcagagcagtcttccaggccaaaaagaggatccttgagcctcttggtctggttgaggaagcagctaaaacggctcctggaaagaagggggctgtagatcagtctcctcaggaaccggactcatcatctggtgttggcaaatcgggcaaacagcctgccagaaaaagactaaatttcggtcagactggagactcagagtcagtcccagaccctcaacctctcggagaaccaccagcagcccccacaagtttgggatctaatacaatggcttcaggcggtggcgcaccaatggcagacaataacgagggtgccgatggagtgggtaattcctcaggaaattggcattgcgattcccaatggctgggcgacagagtcatcaccaccagcaccagaacctgggccctgcccacttacaacaaccatctctacaagcaaatctccagccaatcaggagcttcaaacgacaaccactactttggctacagcaccccttgggggtattttgactttaacagattccactgccacttctcaccacgtgactggcagcgactcattaacaacaactggggattccggcccaagaaactcagcttcaagctcttcaacatccaagttagaggggtcacgcagaacgatggcacgacgactattgccaataaccttaccagcacggttcaagtgtttacggactcggagtatcagctcccgtacgtgctcgggtcggcgcaccaaggctgtctcccgccgtttccagcggacgtcttcatggtccctcagtatggatacctcaccctgaacaacggaagtcaagcggtgggacgctcatccttttactgcctggagtacttcccttcgcagatgctaaggactggaaataacttccaattcagctataccttcgaggatgtaccttttcacagcagctacgctcacagccagagtttggatcgcttgatgaatcctcttattgatcagtatctgtactacctgaacagaacgcaaggaacaacctctggaacaaccaaccaatcacggctgctttttagccaggctgggcctcagtctatgtctttgcaggccagaaattggctacctgggccctgctaccggcaacagagactttcaaagactgctaacgacaacaacaacagtaactttccttggacagcggccagcaaatatcatctcaatggccgcgactcgctggtgaatccaggaccagctatggccagtcacaaggacgatgaagaaaaatttttccctatgcacggcaatctaatatttggcaaagaagggacaacggcaagtaacgcagaattagataatgtaatgattacggatgaagaagagattcgtaccaccaatcctgtggcaacagagcagtatggaactgtggcaaataacttgcagagctcaaatacagctcccacgactggaactgtcaatcatcagggggccttacctggcatggtgtggcaagatcgtgacgtgtaccttcaaggacctatctgggcaaagattcctcacacggatggacactttcatccttctcctctgatgggaggctttggactgaaacatccgcctcctcaaatcatgatcaaaaatactccggtaccggcaaatcctccgacgactttcagcccggccaagtttgcttcatttatcactcagtactccactggacaggtcagcgtggaaattgagtgggagctacagaaagaaaacagcaaacgttggaatccagagattcagtacacttccaactacaacaagtctgttaatgtggactttactgtagacactaatggtgtttatagtgaacctcgccctattggaacccggtatctcacacgaaacttgtgaatcctggttaatcaataaaccgtttaattcgtttcagttgaactttggctcttgtgcacttctttatctttatcttgtttccatggctactgcgtagataagcagcggcctgcggcgcttgcgcttcgcggtttacaactgctggttaatatttaactctcgccatacctctagtgatggagttggccactccctctatgcgcactcgctcgctcggtggggcctggcgaccaaaggtcgccagacggacgtgctttgcacgtccggccccaccgagcgagcgagtgcgcatagagggagtggccaa

SEQ ID NO: 34 - protein, 737 aa, Artificial Sequence
  Description of Artificial Sequence: Synthetic polypeptide
MAADGYLPDWLEDNLSEGIREWWDLKPGAPKPKANQQKQDNGRGLVLPGYKYLGPFNGLDKGEPVNAADAAALEHDKAYDQQLNAGDNPYLRYNHADAEFQERLQEDTSFGGNLGRAVFQAKKRVLEPLGLVEEGAKTAPAKKRPVEPSPQRSPDSSTGIGKKGQQPARKRLNFGQTGDSESVPDPQPLGEPPAAPSSVGSGTVAAGGGAPMADNNEGADGVGNASGNWHCDSTWLGDRVITTSTRTWALPTYNNHLYEQISSETAGSTNDNTYFGYSTPWGYFDFNRFHCHFSPRDWQRLINNNWGFRPKKLRFKLFNIQVKEVTTNDGVTTIANNLTSTIQVFSDSEYQLPYVLGSAHQGCLPPFPADVFMIPQYGYLTLNNGSQSVGRSSFYCLEYFPSQMLRTGNNFEFSYSFEDVPFHSSYAHSQSLDRLMNPLIDQYLYYLARTQSDPGGTAGNRELQFYQGGPSTMAEQAKNWLPGPCFRQQRVSKTLDQNNNSNFAWTGATKYHLNGRNSLVNPGVAMATHKDDEDRFFPSSGVLIFGKTGATNKTTLENVLMTNEEEIRPTNPVATEEYGIVSSNLQAANTAAQTQVVNNQGALPGMVWQNRDVYLQGPIWAKIPHTDGNFHPSPLMGGFGLKHPPPQILIKNTPVPANPPEVFTPAKFASFITQYSTGQVSVEIEWELQKENSKRWDPEIQYTSNFEKQTGVDFAVDSQGVYSEPRPIGTRYLTRNL

SEQ ID NO: 35 - DNA, 2211 bp, Adeno-associated virus
atggctgctgacggttatcttccagattggctcgaggacaacctttctgaaggcattcgtgagtggtgggctctgaaacctggagtccctcaacccaaagcgaaccaacaacaccaggacaaccgtcggggtcttgtgcttccgggttacaaatacctcggacccggtaacggactcgacaaaggagagccggtcaacgaggcggacgcggcagccctcgaacacgacaaagcttacgaccagcagctcaaggccggtgacaacccgtacctcaagtacaaccacgccgacgccgagtttcaggagcgtcttcaagaagatacgtcttttgggggcaaccttggcagagcagtcttccaggccaaaaagaggatccttgagcctcttggtctggttgaggaagcagctaaaacggctcctggaaagaagggggctgtagatcagtctcctcaggaaccggactcatcatctggtgttggcaaatcgggcaaacagcctgccagaaaaagactaaatttcggtcagactggagactcagagtcagtcccagaccctcaacctctcggagaaccaccagcagcccccacaagtttgggatctaatacaatggcttcaggcggtggcgcaccaatggcagacaataacgagggtgccgatggagtgggtaattcctcaggaaattggcattgcgattcccaatggctgggcgacagagtcatcaccaccagcaccagaacctgggccctgcccacttacaacaaccatctctacaagcaaatctccagccaatcaggagcttcaaacgacaaccactactttggctacagcaccccttgggggtattttgactttaacagattccactgccacttctcaccacgtgactggcagcgactcattaacaacaactggggattccggcccaagaaactcagcttcaagctcttcaacatccaagttagaggggtcacgcagaacgatggcacgacgactattgccaataaccttaccagcacggttcaagtgtttacggactcggagtatcagctcccgtacgtgctcgggtcggcgcaccaaggctgtctcccgccgtttccagcggacgtcttcatggtccctcagtatggatacctcaccctgaacaacggaagtcaagcggtgggacgctcatccttttactgcctggagtacttcccttcgcagatgctaaggactggaaataacttccaattcagctataccttcgaggatgtaccttttcacagcagctacgctcacagccagagtttggatcgcttgatgaatcctcttattgatcagtatctgtactacctgaacagaacgcaaggaacaacctctggaacaaccaaccaatcacggctgctttttagccaggctgggcctcagtctatgtctttgcaggccagaaattggctacctgggccctgctaccggcaacagagactttcaaagactgctaacgacaacaacaacagtaactttccttggacagcggccagcaaatatcatctcaatggccgcgactcgctggtgaatccaggaccagctatggccagtcacaaggacgatgaagaaaaatttttccctatgcacggcaatctaatatttggcaaagaagggacaacggcaagtaacgcagaattagataatgtaatgattacggatgaagaagagattcgtaccaccaatcctgtggcaacagagcagtatggaactgtggcaaataacttgcagagctcaaatacagctcccacgactggaactgtcaatcatcagggggccttacctggcatggtgtggcaagatcgtgacgtgtaccttcaaggacctatctgggcaaagattcctcacacggatggacactttcatccttctcctctgatgggaggctttggactgaaacatccgcctcctcaaatcatgatcaaaaatactccggtaccggcaaatcctccgacgactttcagcccggccaagtttgcttcatttatcactcagtactccactggacaggtcagcgtggaaattgagtgggagctacagaaagaaaacagcaaacgttggaatccagagattcagtacacttccaactacaacaagtctgttaatgtggactttactgtagacactaatggtgtttatagtgaacctcgccctattggaacccggtatctcacacgaaacttgtaa

SEQ ID NO: 36 - protein, 736 aa, Adeno-associated virus; identical to SEQ ID NO: 32

SEQ ID NO: 37 - protein, 736 aa, Adeno-associated virus 3A; identical to SEQ ID NO: 32

SEQ ID NO: 38 - protein, 624 aa, Adeno-associated virus 3A
MPGFYEIVLKVPSDLDERLPGISNSFVNWVAEKEWDVPPDSDMDPNLIEQAPLTVAEKLQREFLVEWRRVSKAPEALFFVQFEKGETYFHLHVLIETIGVKSMVVGRYVSQIKEKLVTRIYRGVEPQLPNWFAVTKTRNGAGGGNKVVDDCYIPNYLLPKTQPELQWAWTNMDQYLSACLNLAERKRLVAQHLTHVSQTQEQNKENQNPNSDAPVIRSKTSARYMELVGWLVDRGITSEKQWIQEDQASYISFNAASNSRSQIKAALDNASKIMSLTKTAPDYLVGSNPPEDITKNRIYQILELNGYDPQYAASVFLGWAQKKFGKRNTIWLFGPATTGKTNIAEAIAHAVPFYGCVNWTNENFPFNDCVDKMVIWWEEGKMTAKVVESAKAILGGSKVRVDQKCKSSAQIEPTPVIVTSNTNMCAVIDGNSTTFEHQQPLQDRMFEFELTRRLDHDFGKVTKQEVKDFFRWASDHVTDVAHEFYVRKGGAKKRPASNDADVSEPKRECTSLAQPTTSDAEAPADYADRYQNKCSRHVGMNLMLFPCKTCERMNQISNVCFTHGQRDCGECFPGMSESQPVSVVKKKTYQKLCPIHHILGRAPEIACSACDLANVDLDDCVSEQ

SEQ ID NO: 39 - protein, 736 aa, Adeno-associated virus 3B
MAADGYLPDWLEDNLSEGIREWWALKPGVPQPKANQQHQDNRRGLVLPGYKYLGPGNGLDKGEPVNEADAAALEHDKAYDQQLKAGDNPYLKYNHADAEFQERLQEDTSFGGNLGRAVFQAKKRILEPLGLVEEAAKTAPGKKRPVDQSPQEPDSSSGVGKSGKQPARKRLNFGQTGDSESVPDPQPLGEPPAAPTSLGSNTMASGGGAPMADNNEGADGVGNSSGNWHCDSQWLGDRVITTSTRTWALPTYNNHLYKQISSQSGASNDNHYFGYSTPWGYFDFNRFHCHFSPRDWQRLINNNWGFRPKKLSFKLFNIQVKEVTQNDGTTTIANNLTSTVQVFTDSEYQLPYVLGSAHQGCLPPFPADVFMVPQYGYLTLNNGSQAVGRSSFYCLEYFPSQMLRTGNNFQFSYTFEDVPFHSSYAHSQSLDRLMNPLIDQYLYYLNRTQGTTSGTTNQSRLLFSQAGPQSMSLQARNWLPGPCYRQQRLSKTANDNNNSNFPWTAASKYHLNGRDSLVNPGPAMASHKDDEEKFFPMHGNLIFGKEGTTASNAELDNVMITDEEEIRTTNPVATEQYGTVANNLQSSNTAPTTRTVNDQGALPGMVWQDRDVYLQGPIWAKIPHTDGHFHPSPLMGGFGLKHPPPQIMIKNTPVPANPPTTFSPAKFASFITQYSTGQVSVEIEWELQKENSKRWNPEIQYTSNYNKSVNVDFTVDTNGVYSEPRPIGTRYLTRNL

SEQ ID NO: 40 - protein, 624 aa, Adeno-associated virus 3B
MPGFYEIVLKVPSDLDEHLPGISNSFVNWVAEKEWELPPDSDMDPNLIEQAPLTVAEKLQREFLVEWRRVSKAPEALFFVQFEKGETYFHLHVLIETIGVKSMVVGRYVSQIKEKLVTRIYRGVEPQLPNWFAVTKTRNGAGGGNKVVDDCYIPNYLLPKTQPELQWAWTNMDQYLSACLNLAERKRLVAQHLTHVSQTQEQNKENQNPNSDAPVIRSKTSARYMELVGWLVDRGITSEKQWIQEDQASYISFNAASNSRSQIKAALDNASKIMSLTKTAPDYLVGSNPPEDITKNRIYQILELNGYDPQYAASVFLGWAQKKFGKRNTIWLFGPATTGKTNIAEAIAHAVPFYGCVNWTNENFPFNDCVDKMVIWWEEGKMTAKVVESAKAILGGSKVRVDQKCKSSAQIEPTPVIVTSNTNMCAVIDGNSTTFEHQQPLQDRMFKFELTRRLDHDFGKVTKQEVKDFFRWASDHVTDVAHEFYVRKGGAKKRPASNDADVSEPKRQCTSLAQPTTSDAEAPADYADRYQNKCSRHVGMNLMLFPCKTCERMNQISNVCFTHGQRDCGECFPGMSESQPVSVVKKKTYQKLCPIHHILGRAPEIACSACDLANVDLDDCVSEQ

SEQ ID NO: 41 - DNA, 4722 bp, Adeno-associated virus 3B
tggccactccctctatgcgcactcgctcgctcggtggggcctggcgaccaaaggtcgccagacggacgtgctttgcacgtccggccccaccgagcgagcgagtgcgcatagagggagtggccaactccatcactagaggtatggcagtgacgtaacgcgaagcgcgcgaagcgagaccacgcctaccagctgcgtcagcagtcaggtgacccttttgcgacagtttgcgacaccacgtggccgctgagggtatatattctcgagtgagcgaaccaggagctccattttgaccgcgaaatttgaacgagcagcagccatgccggggttctacgagattgtcctgaaggtcccgagtgacctggacgagcacctgccgggcatttctaactcgtttgttaactgggtggccgagaaggaatgggagctgccgccggattctgacatggatccgaatctgattgagcaggcacccctgaccgtggccgaaaagcttcagcgcgagttcctggtggagtggcgccgcgtgagtaaggccccggaggccctcttttttgtccagttcgaaaagggggagacctacttccacctgcacgtgctgattgagaccatcggggtcaaatccatggtggtcggccgctacgtgagccagattaaagagaagctggtgacccgcatctaccgcggggtcgagccgcagcttccgaactggttcgcggtgaccaaaacgcgaaatggcgccgggggcgggaacaaggtggtggacgactgctacatccccaactacctgctccccaagacccagcccgagctccagtgggcgtggactaacatggaccagtatttaagcgcctgtttgaatctcgcggagcgtaaacggctggtggcgcagcatctgacgcacgtgtcgcagacgcaggagcagaacaaagagaatcagaaccccaattctgacgcgccggtcatcaggtcaaaaacctcagccaggtacatggagctggtcgggtggctggtggaccgcgggatcacgtcagaaaagcaatggattcaggaggaccaggcctcgtacatctccttcaacgccgcctccaactcgcggtcccagatcaaggccgcgctggacaatgcctccaagatcatgagcctgacaaagacggctccggactacctggtgggcagcaacccgccggaggacattaccaaaaatcggatctaccaaatcctggagctgaacgggtacgatccgcagtacgcggcctccgtcttcctgggctgggcgcaaaagaagttcgggaagaggaacaccatctggctctttgggccggccacgacgggtaaaaccaacatcgcggaagccatcgcccacgccgtgcccttctacggctgcgtaaactggaccaatgagaactttcccttcaacgattgcgtcgacaagatggtgatctggtgggaggagggcaagatgacggccaaggtcgtggagagcgccaaggccattctgggcggaagcaaggtgcgcgtggaccaaaagtgcaagtcatcggcccagatcgaacccactcccgtgatcgtcacctccaacaccaacatgtgcgccgtgattgacgggaacagcaccaccttcgagcatcagcagccgctgcaggaccggatgtttaaatttgaacttacccgccgtttggaccatgactttgggaaggtcaccaaacaggaagtaaaggactttttccggtgggcttccgatcacgtgactgacgtggctcatgagttctacgtcagaaagggtggagctaagaaacgccccgcctccaatgacgcggatgtaagcgagccaaaacggcagtgcacgtcacttgcgcagccgacaacgtcagacgcggaagcaccggcggactacgcggacaggtaccaaaacaaatgttctcgtcacgtgggcatgaatctgatgctttttccctgtaaaacatgcgagagaatgaatcaaatttccaatgtctgttttacgcatggtcaaagagactgtggggaatgcttccctggaatgtcagaatctcaacccgtttctgtcgtcaaaaagaagacttatcagaaactgtgtccaattcatcatatcctgggaagggcacccgagattgcctgttcggcctgcgatttggccaatgtggacttggatgactgtgtttctgagcaataaatgacttaaaccaggtatggctgctgacggttatcttccagattggctcgaggacaacctttctgaaggcattcgtgagtggtgggctctgaaacctggagtccctcaacccaaagcgaaccaacaacaccaggacaaccgtcggggtcttgtgcttccgggttacaaatacctcggacccggtaacggactcgacaaaggagagccggtcaacgaggcggacgcggcagccctcgaacacgacaaagcttacgaccagcagctcaaggccggtgacaacccgtacctcaagtacaaccacgccgacgccgagtttcaggagcgtcttcaagaagatacgtcttttgggggcaaccttggcagagcagtcttccaggccaaaaagaggatccttgagcctcttggtctggttgaggaagcagctaaaacggctcctggaaagaagaggcctgtagatcagtctcctcaggaaccggactcatcatctggtgttggcaaatcgggcaaacagcctgccagaaaaagactaaatttcggtcagactggcgactcagagtcagtcccagaccctcaacctctcggagaaccaccagcagcccccacaagtttgggatctaatacaatggcttcaggcggtggcgcaccaatggcagacaataacgagggtgccgatggagtgggtaattcctcaggaaattggcattgcgattcccaatggctgggcgacagagtcatcaccaccagcaccagaacctgggccctgcccacttacaacaaccatctctacaagcaaatctccagccaatcaggagcttcaaacgacaaccactactttggctacagcaccccttgggggtattttgactttaacagattccactgccacttctcaccacgtgactggcagcgactcattaacaacaactggggattccggcccaagaaactcagcttcaagctcttcaacatccaagttaaagaggtcacgcagaacgatggcacgacgactattgccaataaccttaccagcacggttcaagtgtttacggactcggagtatcagctcccgtacgtgctcgggtcggcgcaccaaggctgtctcccgccgtttccagcggacgtcttcatggtccctcagtatggatacctcaccctgaacaacggaagtcaagcggtgggacgctcatccttttactgcctggagtacttcccttcgcagatgctaaggactggaaataacttccaattcagctataccttcgaggatgtaccttttcacagcagctacgctcacagccagagtttggatcgcttgatgaatcctcttattgatcagtatctgtactacctgaacagaacgcaaggaacaacctctggaacaaccaaccaatcacggctgctttttagccaggctgggcctcagtctatgtctttgcaggccagaaattggctacctgggccctgctaccggcaacagagactttcaaagactgctaacgacaacaacaacagtaactttccttggacagcggccagcaaatatcatctcaatggccgcgactcgctggtgaatccaggaccagctatggccagtcacaaggacgatgaagaaaaatttttccctatgcacggcaatctaatatttggcaaagaagggacaacggcaagtaacgcagaattagataatgtaatgattacggatgaagaagagattcgtaccaccaatcctgtggcaacagagcagtatggaactgtggcaaataacttgcagagctcaaatacagctcccacgactagaactgtcaatgatcagggggccttacctggcatggtgtggcaagatcgtgacgtgtaccttcaaggacctatctgggcaaagattcctcacacggatggacactttcatccttctcctctgatgggaggctttggactgaaacatccgcctcctcaaatcatgatcaaaaatactccggtaccggcaaatcctccgacgactttcagcccggccaagtttgcttcatttatcactcagtactccactggacaggtcagcgtggaaattgagtgggagctacagaaagaaaacagcaaacgttggaatccagagattcagtacacttccaactacaacaagtctgttaatgtggactttactgtagacactaatggtgtttatagtgaacctcgccctattggaacccggtatctcacacgaaacttgtaatcctggttaatcaataaaccgtttaattcgtttcagttgaactttggctcttgtgcacttcttatcttatcttgtttccatggctactgcgtagataagcagcggcctgcggcgcttgcgcttcgcggtttacaactgctggttaatatttaactctcgccatacctctagtgatggagttggccactccctctatgcgcactcgctcgctcggtggggccggacgtgcaaagcacgtccgtctggcgacctttggtcgccaggccccaccgagcgagcgagtgcgcatagagggagtggccaa

SEQ ID NO: 42 - DNA, 1800 bp, Adeno-associated virus 4
  misc_feature (342)..(342): n is a, c, t, or g
acggctcctggaaagaagagaccgttgattgaatccccccagcagcccgactcctccacgggtatcggcaaaaaaggcaagcagccggctaaaaagaagctcgttttcgaagacgaaactggagcaggcgacggaccccctgagggatcaacttccggagccatgtctgatgacagtgagatgcgtgcagcagctggcggagctgcagtcgagggsggacaaggtgccgatggagtgggtaatgcctcgggtgattggcattgcgattccacctggtctgagggccacgtcacgaccaccagcaccagaacctgggtcttgcccacctacaacaaccacctntacaagcgactcggagagagcctgcagtccaacacctacaacggattctccaccccctggggatactttgacttcaaccgcttccactgccacttctcaccacgtgactggcagcgactcatcaacaacaactggggcatgcgacccaaagccatgcgggtcaaaatcttcaacatccaggtcaaggaggtcacgacgtcgaacggcgagacaacggtggctaataaccttaccagcacggttcagatctttgcggactcgtcgtacgaactgccgtacgtgatggatgcgggtcaagagggcagcctgcctccttttcccaacgacgtctttatggtgccccagtacggctactgtggactggtgaccggcaacacttcgcagcaacagactgacagaaatgccttctactgcctggagtactttccttcgcagatgctgcggactggcaacaactttgaaattacgtacagttttgagaaggtgcctttccactcgatgtacgcgcacagccagagcctggaccggctgatgaaccctctcatcgaccagtacctgtggggactgcaatcgaccaccaccggaaccaccctgaatgccgggactgccaccaccaactttaccaagctgcggcctaccaacttttccaactttaaaaagaactggctgcccgggccttcaatcaagcagcagggcttctcaaagactgccaatcaaaactacaagatccctgccaccgggtcagacagtctcatcaaatacgagacgcacagcactctggacggaagatggagtgccctgacccccggacctccaatggccacggctggacctgcggacagcaagttcagcaacagccagctcatctttgcggggcctaaacagaacggcaacacggccaccgtacccgggactctgatcttcacctctgaggaggagctggcagccaccaacgccaccgatacggacatgtggggcaacctacctggcggtgaccagagcaacagcaacctgccgaccgtggacagactgacagccttgggagccgtgcctggaatggtctggcaaaacagagacatttactaccagggtcccatttgggccaagattcctcataccgatggacactttcacccctcaccgctgattggtgggtttgggctgaaacacccgcctcctcaaatttttatcaagaacaccccggtacctgcgaatcctgcaacgaccttcagctctactccggtaaactccttcattactcagtacagcactggccaggtgtcggtgcagattgactgggagatccagaaggagcggtccaaacgctggaaccccgaggtccagtttacctccaactacggacagcaaaactctctgttgtgggctcccgatgcggctgggaaatacactgagcctagggctatcggtacccgctacctcacccaccacctgtaataa

SEQ ID NO: 43 - DNA, 2208 bp, Adeno-associated virus 4
  misc_feature (750)..(750): n is a, c, t, or g
atgactgacggttaccttccagattggctagaggacaacctctctgaaggcgttcgagagtggtgggcgctgcaacctggagcccctaaacccaaggcaaatcaacaacatcaggacaacgctcggggtcttgtgcttccgggttacaaatacctcggacccggcaacggactcgacaagggggaacccgtcaacgcagcggacgcggcagccctcgagcacgacaaggcctacgaccagcagctcaaggccggtgacaacccctacctcaagtacaaccacgccgacgcggagttccagcagcggcttcagggcgacacatcgtttgggggcaacctcggcagagcagtcttccaggccaaaaagagggttcttgaacctcttggtctggttgagcaagcgggtgagacggctcctggaaagaagagaccgttgattgaatccccccagcagcccgactcctccacgggtatcggcaaaaaaggcaagcagccggctaaaaagaagctcgttttcgaagacgaaactggagcaggcgacggaccccctgagggatcaacttccggagccatgtctgatgacagtgagatgcgtgcagcagctggcggagctgcagtcgagggsggacaaggtgccgatggagtgggtaatgcctcgggtgattggcattgcgattccacctggtctgagggccacgtcacgaccaccagcaccagaacctgggtcttgcccacctacaacaaccacctntacaagcgactcggagagagcctgcagtccaacacctacaacggattctccaccccctggggatactttgacttcaaccgcttccactgccacttctcaccacgtgactggcagcgactcatcaacaacaactggggcatgcgacccaaagccatgcgggtcaaaatcttcaacatccaggtcaaggaggtcacgacgtcgaacggcgagacaacggtggctaataaccttaccagcacggttcagatctttgcggactcgtcgtacgaactgccgtacgtgatggatgcgggtcaagagggcagcctgcctccttttcccaacgacgtctttatggtgccccagtacggctactgtggactggtgaccggcaacacttcgcagcaacagactgacagaaatgccttctactgcctggagtactttccttcgcagatgctgcggactggcaacaactttgaaattacgtacagttttgagaaggtgcctttccactcgatgtacgcgcacagccagagcctggaccggctgatgaaccctctcatcgaccagtacctgtggggactgcaatcgaccaccaccggaaccaccctgaatgccgggactgccaccaccaactttaccaagctgcggcctaccaacttttccaactttaaaaagaactggctgcccgggccttcaatcaagcagcagggcttctcaaagactgccaatcaaaactacaagatccctgccaccgggtcagacagtctcatcaaatacgagacgcacagcactctggacggaagatggagtgccctgacccccggacctccaatggccacggctggacctgcggacagcaagttcagcaacagccagctcatctttgcggggcctaaacagaacggcaacacggccaccgtacccgggactctgatcttcacctctgaggaggagctggcagccaccaacgccaccgatacggacatgtggggcaacctacctggcggtgaccagagcaacagcaacctgccgaccgtggacagactgacagccttgggagccgtgcctggaatggtctggcaaaacagagacatttactaccagggtcccatttgggccaagattcctcataccgatggacactttcacccctcaccgctgattggtgggtttgggctgaaacacccgcctcctcaaatttttatcaagaacaccccggtacctgcgaatcctgcaacgaccttcagctctactccggtaaactccttcattactcagtacagcactggccaggtgtcggtgcagattgactgggagatccagaaggagcggtccaaacgctggaaccccgaggtccagtttacctccaactacggacagcaaaactctctgttgtgggctcccgatgcggctgggaaatacactgagcctagggctatcggtacccgctacctcacccaccacctgtaataa

SEQ ID NO: 44 - DNA, 1872 bp, Adeno-associated virus 4
atgccggggttctacgagatcgtgctgaaggtgcccagcgacctggacgagcacctgcccggcatttctgactcttttgtgagctgggtggccgagaaggaatgggagctgccgccggattctgacatggacttgaatctgattgagcaggcacccctgaccgtggccgaaaagctgcaacgcgagttcctggtcgagtggcgccgcgtgagtaaggccccggaggccctcttctttgtccagttcgagaagggggacagctacttccacctgcacatcctggtggagaccgtgggcgtcaaatccatggtggtgggccgctacgtgagccagattaaagagaagctggtgacccgcatctaccgcggggtcgagccgcagcttccgaactggttcgcggtgaccaagacgcgtaatggcgccggaggcgggaacaaggtggtggacgactgctacatccccaactacctgctccccaagacccagcccgagctccagtgggcgtggactaacatggaccagtatataagcgcctgtttgaatctcgcggagcgtaaacggctggtggcgcagcatctgacgcacgtgtcgcagacgcaggagcagaacaaggaaaaccagaaccccaattctgacgcgccggtcatcaggtcaaaaacctccgccaggtacatggagctggtcgggtggctggtggaccgcgggatcacgtcagaaaagcaatggatccaggaggaccaggcgtcctacatctccttcaacgccgcctccaactcgcggtcacaaatcaaggccgcgctggacaatgcctccaaaatcatgagcctgacaaagacggctccggactacctggtgggccagaacccgccggaggacatttccagcaaccgcatctaccgaatcctcgagatgaacgggtacgatccgcagtacgcggcctccgtcttcctgggctgggcgcaaaagaagttcgggaagaggaacaccatctggctctttgggccggccacgacgggtaaaaccaacatcgcggaagccatcgcccacgccgtgcccttctacggctgcgtgaactggaccaatgagaactttccgttcaacgattgcgtcgacaagatggtgatctggtgggaggagggcaagatgacggccaaggtcgtagagagcgccaaggccatcctgggcggaagcaaggtgcgcgtggaccaaaagtgcaagtcatcggcccagatcgacccaactcccgtgatcgtcacctccaacaccaacatgtgcgcggtcatcgacggaaactcgaccaccttcgagcaccaacaaccactccaggaccggatgttcaagttcgagctcaccaagcgcctggagcacgactttggcaaggtcaccaagcaggaagtcaaagactttttccggtgggcgtcagatcacgtgaccgaggtgactcacgagttttacgtcagaaagggtggagctagaaagaggcccgcccccaatgacgcagatataagtgagcccaagcgggcctgtccgtcagttgcgcagccatcgacgtcagacgcggaagctccggtggactacgcggacaggtaccaaaacaaatgttctcgtcacgtgggtatgaatctgatgctttttccctgccggcaatgcgagagaatgaatcagaatgtggacatttgcttcacgcacggggtcatggactgtgccgagtgcttccccgtgtcagaatctcaacccgtgtctgtcgtcagaaagcggacgtatcagaaactgtgtccgattcatcacatcatggggagggcgcccgaggtggcctgctcggcctgcgaactggccaatgtggacttggatgactgtgacatggaacaataa

SEQ ID NO: 45 - DNA, 1611 bp, Adeno-associated virus 4
atgccggggttctacgagatcgtgctgaaggtgcccagcgacctggacgagcacctgcccggcatttctgactcttttgtgagctgggtggccgagaaggaatgggagctgccgccggattctgacatggacttgaatctgattgagcaggcacccctgaccgtggccgaaaagctgcaacgcgagttcctggtcgagtggcgccgcgtgagtaaggccccggaggccctcttctttgtccagttcgagaagggggacagctacttccacctgcacatcctggtggagaccgtgggcgtcaaatccatggtggtgggccgctacgtgagccagattaaagagaagctggtgacccgcatctaccgcggggtcgagccgcagcttccgaactggttcgcggtgaccaagacgcgtaatggcgccggaggcgggaacaaggtggtggacgactgctacatccccaactacctgctccccaagacccagcccgagctccagtgggcgtggactaacatggaccagtatataagcgcctgtttgaatctcgcggagcgtaaacggctggtggcgcagcatctgacgcacgtgtcgcagacgcaggagcagaacaaggaaaaccagaaccccaattctgacgcgccggtcatcaggtcaaaaacctccgccaggtacatggagctggtcgggtggctggtggaccgcgggatcacgtcagaaaagcaatggatccaggaggaccaggcgtcctacatctccttcaacgccgcctccaactcgcggtcacaaatcaaggccgcgctggacaatgcctccaaaatcatgagcctgacaaagacggctccggactacctggtgggccagaacccgccggaggacatttccagcaaccgcatctaccgaatcctcgagatgaacgggtacgatccgcagtacgcggcctccgtcttcctgggctgggcgcaaaagaagttcgggaagaggaacaccatctggctctttgggccggccacgacgggtaaaaccaacatcgcggaagccatcgcccacgccgtgcccttctacggctgcgtgaactggaccaatgagaactttccgttcaacgattgcgtcgacaagatggtgatctggtgggaggagggcaagatgacggccaaggtcgtagagagcgccaaggccatcctgggcggaagcaaggtgcgcgtggaccaaaagtgcaagtcatcggcccagatcgacccaactcccgtgatcgtcacctccaacaccaacatgtgcgcggtcatcgacggaaactcgaccaccttcgagcaccaacaaccactccaggaccggatgttcaagttcgagctcaccaagcgcctggagcacgactttggcaaggtcaccaagcaggaagtcaaagactttttccggtgggcgtcagatcacgtgaccgaggtgactcacgagttttacgtcagaaagggtggagctagaaagaggcccgcccccaatgacgcagatataagtgagcccaagcgggcctgtccgtcagttgcgcagccatcgacgtcagacgcggaagctccggtggactacgcggacagattggctagaggacaacctctctga

SEQ ID NO: 46 - DNA, 1872 bp, Adeno-associated virus 4; identical to SEQ ID NO: 44

SEQ ID NO: 47 - DNA, 1617 bp, Adeno-associated virus 4
  misc_feature (162)..(162): n is a, c, t, or g
atgcgtgcagcagctggcggagctgcagtcgagggsggacaaggtgccgatggagtgggtaatgcctcgggtgattggcattgcgattccacctggtctgagggccacgtcacgaccaccagcaccagaacctgggtcttgcccacctacaacaaccacctntacaagcgactcggagagagcctgcagtccaacacctacaacggattctccaccccctggggatactttgacttcaaccgcttccactgccacttctcaccacgtgactggcagcgactcatcaacaacaactggggcatgcgacccaaagccatgcgggtcaaaatcttcaacatccaggtcaaggaggtcacgacgtcgaacggcgagacaacggtggctaataaccttaccagcacggttcagatctttgcggactcgtcgtacgaactgccgtacgtgatggatgcgggtcaagagggcagcctgcctccttttcccaacgacgtctttatggtgccccagtacggctactgtggactggtgaccggcaacacttcgcagcaacagactgacagaaatgccttctactgcctggagtactttccttcgcagatgctgcggactggcaacaactttgaaattacgtacagttttgagaaggtgcctttccactcgatgtacgcgcacagccagagcctggaccggctgatgaaccctctcatcgaccagtacctgtggggactgcaatcgaccaccaccggaaccaccctgaatgccgggactgccaccaccaactttaccaagctgcggcctaccaacttttccaactttaaaaagaactggctgcccgggccttcaatcaagcagcagggcttctcaaagactgccaatcaaaactacaagatccctgccaccgggtcagacagtctcatcaaatacgagacgcacagcactctggacggaagatggagtgccctgacccccggacctccaatggccacggctggacctgcggacagcaagttcagcaacagccagctcatctttgcggggcctaaacagaacggcaacacggccaccgtacccgggactctgatcttcacctctgaggaggagctggcagccaccaacgccaccgatacggacatgtggggcaacctacctggcggtgaccagagcaacagcaacctgccgaccgtggacagactgacagccttgggagccgtgcctggaatggtctggcaaaacagagacatttactaccagggtcccatttgggccaagattcctcataccgatggacactttcacccctcaccgctgattggtgggtttgggctgaaacacccgcctcctcaaatttttatcaagaacaccccggtacctgcgaatcctgcaacgaccttcagctctactccggtaaactccttcattactcagtacagcactggccaggtgtcggtgcagattgactgggagatccagaaggagcggtccaaacgctggaaccccgaggtccagtttacctccaactacggacagcaaaactctctgttgtgggctcccgatgcggctgggaaatacactgagcctagggctatcggtacccgctacctcacccaccacctgtaa

SEQ ID NO: 48 - DNA, 939 bp, Adeno-associated virus 4
atggagctggtcgggtggctggtggaccgcgggatcacgtcagaaaagcaatggatccaggaggaccaggcgtcctacatctccttcaacgccgcctccaactcgcggtcacaaatcaaggccgcgctggacaatgcctccaaaatcatgagcctgacaaagacggctccggactacctggtgggccagaacccgccggaggacatttccagcaaccgcatctaccgaatcctcgagatgaacgggtacgatccgcagtacgcggcctccgtcttcctgggctgggcgcaaaagaagttcgggaagaggaacaccatctggctctttgggccggccacgacgggtaaaaccaacatcgcggaagccatcgcccacgccgtgcccttctacggctgcgtgaactggaccaatgagaactttccgttcaacgattgcgtcgacaagatggtgatctggtgggaggagggcaagatgacggccaaggtcgtagagagcgccaaggccatcctgggcggaagcaaggtgcgcgtggaccaaaagtgcaagtcatcggcccagatcgacccaactcccgtgatcgtcacctccaacaccaacatgtgcgcggtcatcgacggaaactcgaccaccttcgagcaccaacaaccactccaggaccggatgttcaagttcgagctcaccaagcgcctggagcacgactttggcaaggtcaccaagcaggaagtcaaagactttttccggtgggcgtcagatcacgtgaccgaggtgactcacgagttttacgtcagaaagggtggagctagaaagaggcccgcccccaatgacgcagatataagtgagcccaagcgggcctgtccgtcagttgcgcagccatcgacgtcagacgcggaagctccggtggactacgcggacagattggctagaggacaacctctctga

SEQ ID NO: 49 - DNA, 1197 bp, Adeno-associated virus 4
atggagctggtcgggtggctggtggaccgcgggatcacgtcagaaaagcaatggatccaggaggaccaggcgtcctacatctccttcaacgccgcctccaactcgcggtcacaaatcaaggccgcgctggacaatgcctccaaaatcatgagcctgacaaagacggctccggactacctggtgggccagaacccgccggaggacatttccagcaaccgcatctaccgaatcctcgagatgaacgggtacgatccgcagtacgcggcctccgtcttcctgggctgggcgcaaaagaagttcgggaagaggaacaccatctggctctttgggccggccacgacgggtaaaaccaacatcgcggaagccatcgcccacgccgtgcccttctacggctgcgtgaactggaccaatgagaactttccgttcaacgattgcgtcgacaagatggtgatctggtgggaggagggcaagatgacggccaaggtcgtagagagcgccaaggccatcctgggcggaagcaaggtgcgcgtggaccaaaagtgcaagtcatcggcccagatcgacccaactcccgtgatcgtcacctccaacaccaacatgtgcgcggtcatcgacggaaactcgaccaccttcgagcaccaacaaccactccaggaccggatgttcaagttcgagctcaccaagcgcctggagcacgactttggcaaggtcaccaagcaggaagtcaaagactttttccggtgggcgtcagatcacgtgaccgaggtgactcacgagttttacgtcagaaagggtggagctagaaagaggcccgcccccaatgacgcagatataagtgagcccaagcgggcctgtccgtcagttgcgcagccatcgacgtcagacgcggaagctccggtggactacgcggacaggtaccaaaacaaatgttctcgtcacgtgggtatgaatctgatgctttttccctgccggcaatgcgagagaatgaatcagaatgtggacatttgcttcacgcacggggtcatggactgtgccgagtgcttccccgtgtcagaatctcaacccgtgtctgtcgtcagaaagcggacgtatcagaaactgtgtccgattcatcacatcatggggagggcgcccgaggtggcctgctcggcctgcgaactggccaatgtggacttggatgactgtgacatggaacaa

SEQ ID NO: 50 - DNA, 245 bp, Adeno-associated virus 4
ctccatcatctaggtttgcccactgacgtcaatgtgacgtcctagggttagggaggtccctgtattagcagtcacgtgagtgtcgtatttcgcggagcgtagcggagcgcataccaagctgccacgtcacagccacgtggtccgtttgcgacagtttgcgacaccatgtggtcaggagggtatataaccgcgagtgagccagcgaggagctccattttgcccgcgaattttgaacgagcagcagc

SEQ ID NO: 51 - protein, 313 aa, Adeno-associated virus 4
  MOD_RES (313)..(313): Xaa = any amino acid
MELVGWLVDRGITSEKQWIQEDQASYISFNAASNSRSQIKAALDNASKIMSLTKTAPDYLVGQNPPEDISSNRIYRILEMNGYDPQYAASVFLGWAQKKFGKRNTIWLFGPATTGKTNIAEAIAHAVPFYGCVNWTNENFPFNDCVDKMVIWWEEGKMTAKVVESAKAILGGSKVRVDQKCKSSAQIDPTPVIVTSNTNMCAVIDGNSTTFEHQQPLQDRMFKFELTKRLEHDFGKVTKQEVKDFFRWASDHVTEVTHEFYVRKGGARKRPAPNDADISEPKRACPSVAQPSTSDAEAPVDYADRLARGQPLX

SEQ ID NO: 52 - protein, 399 aa, Adeno-associated virus 4
MELVGWLVDRGITSEKQWIQEDQASYISFNAASNSRSQIKAALDNASKIMSLTKTAPDYLVGQNPPEDISSNRIYRILEMNGYDPQYAASVFLGWAQKKFGKRNTIWLFGPATTGKTNIAEAIAHAVPFYGCVNWTNENFPFNDCVDKMVIWWEEGKMTAKVVESAKAILGGSKVRVDQKCKSSAQIDPTPVIVTSNTNMCAVIDGNSTTFEHQQPLQDRMFKFELTKRLEHDFGKVTKQEVKDFFRWASDHVTEVTHEFYVRKGGARKRPAPNDADISEPKRACPSVAQPSTSDAEAPVDYADRYQNKCSRHVGMNLMLFPCRQCERMNQNVDICFTHGVMDCAECFPVSESQPVSVVRKRTYQKLCPIHHIMGRAPEVACSACELANVDLDDCDMEQ

SEQ ID NO: 53 - protein, 623 aa, Adeno-associated virus 4
MPGFYEIVLKVPSDLDEHLPGISDSFVSWVAEKEWELPPDSDMDLNLIEQAPLTVAEKLQREFLVEWRRVSKAPEALFFVQFEKGDSYFHLHILVETVGVKSMVVGRYVSQIKEKLVTRIYRGVEPQLPNWFAVTKTRNGAGGGNKVVDDCYIPNYLLPKTQPELQWAWTNMDQYISACLNLAERKRLVAQHLTHVSQTQEQNKENQNPNSDAPVIRSKTSARYMELVGWLVDRGITSEKQWIQEDQASYISFNAASNSRSQIKAALDNASKIMSLTKTAPDYLVGQNPPEDISSNRIYRILEMNGYDPQYAASVFLGWAQKKFGKRNTIWLFGPATTGKTNIAEAIAHAVPFYGCVNWTNENFPFNDCVDKMVIWWEEGKMTAKVVESAKAILGGSKVRVDQKCKSSAQIDPTPVIVTSNTNMCAVIDGNSTTFEHQQPLQDRMFKFELTKRLEHDFGKVTKQEVKDFFRWASDHVTEVTHEFYVRKGGARKRPAPNDADISEPKRACPSVAQPSTSDAEAPVDYADRYQNKCSRHVGMNLMLFPCRQCERMNQNVDICFTHGVMDCAECFPVSESQPVSVVRKRTYQKLCPIHHIMGRAPEVACSACELANVDLDDCDMEQ

SEQ ID NO: 54 - protein, 537 aa, Adeno-associated virus 4
  MOD_RES (537)..(537): Xaa = any amino acid
MPGFYEIVLKVPSDLDEHLPGISDSFVSWVAEKEWELPPDSDMDLNLIEQAPLTVAEKLQREFLVEWRRVSKAPEALFFVQFEKGDSYFHLHILVETVGVKSMVVGRYVSQIKEKLVTRIYRGVEPQLPNWFAVTKTRNGAGGGNKVVDDCYIPNYLLPKTQPELQWAWTNMDQYISACLNLAERKRLVAQHLTHVSQTQEQNKENQNPNSDAPVIRSKTSARYMELVGWLVDRGITSEKQWIQEDQASYISFNAASNSRSQIKAALDNASKIMSLTKTAPDYLVGQNPPEDISSNRIYRILEMNGYDPQYAASVFLGWAQKKFGKRNTIWLFGPATTGKTNIAEAIAHAVPFYGCVNWTNENFPFNDCVDKMVIWWEEGKMTAKVVESAKAILGGSKVRVDQKCKSSAQIDPTPVIVTSNTNMCAVIDGNSTTFEHQQPLQDRMFKFELTKRLEHDFGKVTKQEVKDFFRWASDHVTEVTHEFYVRKGGARKRPAPNDADISEPKRACPSVAQPSTSDAEAPVDYADRLARGQPLX

SEQ ID NO: 55 - protein, 623 aa, Adeno-associated virus 4; identical to SEQ ID NO: 53

SEQ ID NO: 56 - protein, 544 aa, Adeno-associated virus 4
MSDDSEMRAAAGGAAVEGGQGADGVGNASGDWHCDSTWSEGHVTTTSTRTWVLPTYNNHLYKRLGESLQSNTYNGFSTPWGYFDFNRFHCHFSPRDWQRLINNNWGMRPKAMRVKIFNIQVKEVTTSNGETTVANNLTSTVQIFADSSYELPYVMDAGQEGSLPPFPNDVFMVPQYGYCGLVTGNTSQQQTDRNAFYCLEYFPSQMLRTGNNFEITYSFEKVPFHSMYAHSQSLDRLMNPLIDQYLWGLQSTTTGTTLNAGTATTNFTKLRPTNFSNFKKNWLPGPSIKQQGFSKTANQNYKIPATGSDSLIKYETHSTLDGRWSALTPGPPMATAGPADSKFSNSQLIFAGPKQNGNTATVPGTLIFTSEEELAATNATDTDMWGNLPGGDQSNSNLPTVDRLTALGAVPGMVWQNRDIYYQGPIWAKIPHTDGHFHPSPLIGGFGLKHPPPQIFIKNTPVPANPATTFSSTPVNSFITQYSTGQVSVQIDWEIQKERSKRWNPEVQFTSNYGQQNSLLWAPDAAGKYTEPRAIGTRYLTHHL

SEQ ID NO: 57 - protein, 734 aa, Adeno-associated virus 4
MTDGYLPDWLEDNLSEGVREWWALQPGAPKPKANQQHQDNARGLVLPGYKYLGPGNGLDKGEPVNAADAAALEHDKAYDQQLKAGDNPYLKYNHADAEFQQRLQGDTSFGGNLGRAVFQAKKRVLEPLGLVEQAGETAPGKKRPLIESPQQPDSSTGIGKKGKQPAKKKLVFEDETGAGDGPPEGSTSGAMSDDSEMRAAAGGAAVEGGQGADGVGNASGDWHCDSTWSEGHVTTTSTRTWVLPTYNNHLYKRLGESLQSNTYNGFSTPWGYFDFNRFHCHFSPRDWQRLINNNWGMRPKAMRVKIFNIQVKEVTTSNGETTVANNLTSTVQIFADSSYELPYVMDAGQEGSLPPFPNDVFMVPQYGYCGLVTGNTSQQQTDRNAFYCLEYFPSQMLRTGNNFEITYSFEKVPFHSMYAHSQSLDRLMNPLIDQYLWGLQSTTTGTTLNAGTATTNFTKLRPTNFSNFKKNWLPGPSIKQQGFSKTANQNYKIPATGSDSLIKYETHSTLDGRWSALTPGPPMATAGPADSKFSNSQLIFAGPKQNGNTATVPGTLIFTSEEELAATNATDTDMWGNLPGGDQSNSNLPTVDRLTALGAVPGMVWQNRDIYYQGPIWAKIPHTDGHFHPSPLIGGFGLKHPPPQIFIKNTPVPANPATTFSSTPVNSFITQYSTGQVSVQIDWEIQKERSKRWNPEVQFTSNYGQQNSLLWAPDAAGKYTEPRAIGTRYLTHHL

SEQ ID NO: 58 - protein, 598 aa, Adeno-associated virus 4
TAPGKKRPLIESPQQPDSSTGIGKKGKQPAKKKLVFEDETGAGDGPPEGSTSGAMSDDSEMRAAAGGAAVEGGQGADGVGNASGDWHCDSTWSEGHVTTTSTRTWVLPTYNNHLYKRLGESLQSNTYNGFSTPWGYFDFNRFHCHFSPRDWQRLINNNWGMRPKAMRVKIFNIQVKEVTTSNGETTVANNLTSTVQIFADSSYELPYVMDAGQEGSLPPFPNDVFMVPQYGYCGLVTGNTSQQQTDRNAFYCLEYFPSQMLRTGNNFEITYSFEKVPFHSMYAHSQSLDRLMNPLIDQYLWGLQSTTTGTTLNAGTATTNFTKLRPTNFSNFKKNWLPGPSIKQQGFSKTANQNYKIPATGSDSLIKYETHSTLDGRWSALTPGPPMATAGPADSKFSNSQLIFAGPKQNGNTATVPGTLIFTSEEELAATNATDTDMWGNLPGGDQSNSNLPTVDRLTALGAVPGMVWQNRDIYYQGPIWAKIPHTDGHFHPSPLIGGFGLKHPPPQIFIKNTPVPANPATTFSSTPVNSFITQYSTGQVSVQIDWEIQKERSKRWNPEVQFTSNYGQQNSLLWAPDAAGKYTEPRAIGTRYLTHHL

SEQ ID NO: 59 - DNA, 129 bp, Adeno-associated virus 4
ttggccactccctctatgcgcgctcgctcactcactcggccctgcggccagaggccggcagtctggagacctttggtgtccagggcagggccgagtgagtgagcgagcgcgcatagagggagtggccaa

SEQ ID NO: 60 - DNA, 125 bp, Adeno-associated virus 4
ttggccactccctctatgcgcgctcgctcactcactcggccctggagaccaaaggtctccagactgccggcctctggccggcagggccgagtgagtgagcgagcgcgcatagagggagtggccaa

SEQ ID NO: 61 - DNA, 4768 bp, Adeno-associated virus 4
  misc_feature (3009)..(3009): n is a, c, t, or g
ttggccactccctctatgcgcgctcgctcactcactcggccctggagaccaaaggtctccagactgccggcctctggccggcagggccgagtgagtgagcgagcgcgcatagagggagtggccaactccatcatctaggtttgcccactgacgtcaatgtgacgtcctagggttagggaggtccctgtattagcagtcacgtgagtgtcgtatttcgcggagcgtagcggagcgcataccaagctgccacgtcacagccacgtggtccgtttgcgacagtttgcgacaccatgtggtcaggagggtatataaccgcgagtgagccagcgaggagctccattttgcccgcgaattttgaacgagcagcagccatgccggggttctacgagatcgtgctgaaggtgcccagcgacctggacgagcacctgcccggcatttctgactcttttgtgagctgggtggccgagaaggaatgggagctgccgccggattctgacatggacttgaatctgattgagcaggcacccctgaccgtggccgaaaagctgcaacgcgagttcctggtcgagtggcgccgcgtgagtaaggccccggaggccctcttctttgtccagttcgagaagggggacagctacttccacctgcacatcctggtggagaccgtgggcgtcaaatccatggtggtgggccgctacgtgagccagattaaagagaagctggtgacccgcatctaccgcggggtcgagccgcagcttccgaactggttcgcggtgaccaagacgcgtaatggcgccggaggcgggaacaaggtggtggacgactgctacatccccaactacctgctccccaagacccagcccgagctccagtgggcgtggactaacatggaccagtatataagcgcctgtttgaatctcgcggagcgtaaacggctggtggcgcagcatctgacgcacgtgtcgcagacgcaggagcagaacaaggaaaaccagaaccccaattctgacgcgccggtcatcaggtcaaaaacctccgccaggtacatggagctggtcgggtggctggtggaccgcgggatcacgtcagaaaagcaatggatccaggaggaccaggcgtcctacatctccttcaacgccgcctccaactcgcggtcacaaatcaaggccgcgctggacaatgcctccaaaatcatgagcctgacaaagacggctccggactacctggtgggccagaacccgccggaggacatttccagcaaccgcatctaccgaatcctcgagatgaacgggtacgatccgcagtacgcggcctccgtcttcctgggctgggcgcaaaagaagttcgggaagaggaacaccatctggctctttgggccggccacgacgggtaaaaccaacatcgcggaagccatcgcccacgccgtgcccttctacggctgcgtgaactggaccaatgagaactttccgttcaacgattgcgtcgacaagatggtgatctggtgggaggagggcaagatgacggccaaggtcgtagagagcgccaaggccatcctgggcggaagcaaggtgcgcgtggaccaaaagtgcaagtcatcggcccagatcgacccaactcccgtgatcgtcacctccaacaccaacatgtgcgcggtcatcgacggaaactcgaccaccttcgagcaccaacaaccactccaggaccggatgttcaagttcgagctcaccaagcgcctggagcacgactttggcaaggtcaccaagcaggaagtcaaagactttttccggtgggcgtcagatcacgtgaccgaggtgactcacgagttttacgtcagaaagggtggagctagaaagaggcccgcccccaatgacgcagatataagtgagcccaagcgggcctgtccgtcagttgcgcagccatcgacgtcagacgcggaagctccggtggactacgcggacaggtaccaaaacaaatgttctcgtcacgtgggtatgaatctgatgctttttccctgccggcaatgcgagagaatgaatcagaatgtggacatttgcttcacgcacggggtcatggactgtgccgagtgcttccccgtgtcagaatctcaacccgtgtctgtcgtcagaaagcggacgtatcagaaactgtgtccgattcatcacatcatggggagggcgcccgaggtggcctgctcggcctgcgaactggccaatgtggacttggatgactgtgacatggaacaataaatgactcaaaccagatatgactgacggttaccttccagattggctagaggacaacctctctgaaggcgttcgagagtggtgggcgctgcaacctggagcccctaaacccaaggcaaatcaacaacatcaggacaacgctcggggtcttgtgcttccgggttacaaatacctcggacccggcaacggactcgacaagggggaacccgtcaacgcagcggacgcggcagccctcgagcacgacaaggcctacgaccagcagctcaaggccggtgacaacccctacctcaagtacaaccacgccgacgcggagttccagcagcggcttcagggcgacacaccgtttgggggcaacctcggcagagcagtcttccaggccaaaaagagggttcttgaacctcttggtctggttgagcaagcgggtgagacggctcctggaaagaagagaccgttgattgaatccccccagcagcccgactcctccacgggtatcggcaaaaaaggcaagcagccggctaaaaagaagctcgttttcgaagacgaaactggagcaggcgacggaccccctgagggatcaacttccggagccatgtctgatgacagtgagatgcgtgcagcagctggcggagctgcagtcgagggsggacaaggtgccgatggagtgggtaatgcctcgggtgattggcattgcgattccacctggtctgagggccacgtcacgaccaccagcaccagaacctgggtcttgcccacctacaacaaccacctntacaagcgactcggagagagcctgcagtccaacacctacaacggattctccaccccctggggatactttgacttcaaccgcttccactgccacttctcaccacgtgactggcagcgactcatcaacaacaactggggcatgcgacccaaagccatgcgggtcaaaatcttcaacatccaggtcaaggaggtcacgacgtcgaacggcgagacaacggtggctaataaccttaccagcacggttcagatctttgcggactcgtcgtacgaactgccgtacgtgatggatgcgggtcaagagggcagcctgcctccttttcccaacgacgtctttatggtgccccagtacggctactgtggactggtgaccggcaacacttcgcagcaacagactgacagaaatgccttctactgcctggagtactttccttcgcagatgctgcggactggcaacaactttgaaattacgtacagttttgagaaggtgcctttccactcgatgtacgcgcacagccagagcctggaccggctgatgaaccctctcatcgaccagtacctgtggggactgcaatcgaccaccaccggaaccaccctgaatgccgggactgccaccaccaactttaccaagctgcggcctaccaacttttccaactttaaaaagaactggctgcccgggccttcaatcaagcagcagggcttctcaaagactgccaatcaaaactacaagatccctgccaccgggtcagacagtctcatcaaatacgagacgcacagcactctggacggaagatggagtgccctgacccccggacctccaatggccacggctggacctgcggacagcaagttcagcaacagccagctcatctttgcggggcctaaacagaacggcaacacggccaccgtacccgggactctgatcttcacctctgaggaggagctggcagccaccaacgccaccgatacggacatgtggggcaacctacctggcggtgaccagagcaacagcaacctgccgaccgtggacagactgacagccttgggagccgtgcctggaatggtctggcaaaacagagacatttactaccagggtcccatttgggccaagattcctcataccgatggacactttcacccctcaccgctgattggtgggtttgggctgaaacacccgcctcctcaaatttttatcaagaacaccccggtacctgcgaatcctgcaacgaccttcagctctactccggtaaactccttcattactcagtacagcactggccaggtgtcggtgcagattgactgggagatccagaaggagcggtccaaacgctggaaccccgaggtccagtttacctccaactacggacagcaaaactctctgttgtgggctcccgatgcggctgggaaatacactgagcctagggctatcggtacccgctacctcacccaccacctgtaataacctgttaatcaataaaccggtttattcgtttcagttgaactttggtctccgtgtccttcttatcttatctcgtttccatggctactgcgtacataagcagcggcctgcggcgcttgcgcttcgcggtttacaactgccggttaatcagtaacttctggcaaaccatgatgatggagttggccactccctctatgcgcgctcgctcactcactcggccctggagaccaaaggtctccagactgccggcctctggccggcagggccgagtgagtgagcgagcgcgcatagagggagtggccaa

SEQ ID NO: 62 - DNA, 3098 bp, Adeno-associated virus
gaattcgccctttctacggctgcgtcaactggaccaatgagaactttcccttcaacgattgcgtcgacaagatggtgatctggtgggaggagggcaagatgacggccaaggtcgtggagtccgccaaggccattctcggcggcagcaaggtgcgcgtggaccaaaagtgcaagtcttccgcccagatcgatcccacccccgtgatcgtcacttccaacaccaacatgtgcgctgtgattgacgggaacagcaccaccttcgagcaccagcagccgttacaagaccggatgttcaaatttgaactcacccgccgtctggagcacgactttggcaaggtgacaaagcaggaagtcaaagagttcttccgctgggcgcaggatcacgtgaccgaggtggcgcatgagttctacgtcagaaagggtggagccaacaagagacccgcccccgatgacgcggataaaagcgagcccaagcgggcctgcccctcagtcgcggatccatcgacgtcagacgcggaaggagctccggtggactttgccgacaggtaccaaaacaaatgttctcgtcacgcgggcatgcttcagatgctgtttccctgcaagacatgcgagagaatgaatcagaatttcaacatttgcttcacgcacgggaccagagactgttcagaatgtttccccggcgtgtcagaatctcaaccggtcgtcagaaagaggacgtatcggaaactctgtgccattcatcatctgctggggcgggctcccgagattgcttgctcggcctgcgatctggtcaacgtggacctggatgaccgtgtttctgagcaataaatgacttaaaccaggtatggctgccgatggttatcttccagattggctcgaggacaacctctctgagggcattcgcgagtggtgggacttgaaacctggagccccgaaacccaaagccaaccagcaaaagcaggacgacggccggggtctggtgcttcctggctacaagtacctcggacccttcaacggactcgacaagggagagccggtcaacgaggcagacgccgcggccctcgagcacgacaaggcctacgacaagcagctcgagcagggggacaacccgtacctcaagtacaaccacgccgacgccgagtttcaggagcgtcttcaagaagatacgtcttttgggggcaacctcgggcgagcagtcttccaggccaagaagcgggttctcgaacctctcggtctggttgaggaaggcgctaagacggctcctggaaagaagagacccatagaatcccccgactcctccacgggcatcggcaagaaaggccagcagcccgctaaaaagaagctcaactttgggcagactggcgactcagagtcagtgcccgacccccaacctctcggagaacctcccgccgcgccctcaggtctgggatctggtacaatggctgcaggcggtggcgcaccaatggcagacaataacgaaggcgccgacggagtgggtaatgcctccggaaattggcattgcgattccacatggctgggcgacagagtcatcaccaccagcacccgcacctgggccctgcccacctacaacaaccacctctacaagcagatatcaagtcagagcggggctaccaacgacaaccacttcttcggctacagcaccccctggggctattttgacttcaacagattccactgccacttctcaccacgtgactggcagcgactcatcaacaacaactggggattccggcccagaaagctgcggttcaagttgttcaacatccaggtcaaggaggtcacgacgaacgacggcgttacgaccatcgctaataaccttaccagcacgattcaggtcttctcggactcggagtaccaactgccgtacgtcctcggctctgcgcaccagggctgcctccctccgttccctgcggacgtgttcatgattcctcagtacggatatctgactctaaacaacggcagtcagtctgtgggacgttcctccttctactgcctggagtactttccttctcagatgctgagaacgggcaataactttgaattcagctacacctttgaggaagtgcctttccacagcagctatgcgcacagccagagcctggaccggctgatgaatcccctcatcgaccagtacctgtactacctggcccggacccagagcactacggggtccacaagggagctgcagttccatcaggctgggcccaacaccatggccgagcaatcaaagaactggctgcccggaccctgttatcggcagcagagactgtcaaaaaacatagacagcaacaacaacagtaactttgcctggaccggggccactaaataccatctgaatggtagaaattcattaaccaacccgggcgtagccatggccaccaacaaggacgacgaggaccagttctttcccatcaacggagtgctggtttttggcgaaacgggggctgccaacaagacaacgctggaaaacgtgctaatgaccagcgaggaggagatcaaaaccaccaatcccgtggctacagaagaatacggtgtggtctccagcaacctgcaatcgtctacggccggaccccagacacagactgtcaacagccagggggctctgcccggcatggtctggcagaaccgggacgtgtacctgcagggtcccatctgggccaaaattcctcacacggacggcaactttcacccgtctcccctgatgggcggatttggactcaaacacccgcctcctcaaattctcatcaaaaacaccccggtacctgctaatcctccagaggtgtttactcctgccaagtttgcctcatttatcacgcagtacagcaccggccaggtcagcgtggagatcgagtgggaactgcagaaagaaaacagcaaacgctggaatccagagattcagtacacctcaaattatgccaagtctaataatgtggaatttgctgtcaacaacgaaggggtttatactgagcctcgccccattggcacccgttacctcacccgtaacctgtaattgcctgttaatcaataaaccggttaattcgtttcagttgaactttggtctctgcgaagggcgaattc

SEQ ID NO: 63 - protein, 728 aa, Artificial Sequence
  Description of Artificial Sequence: Synthetic polypeptide
MAADGYLPDWLEDNLSEGIREWWDLKPGAPKPKANQQKQDDGRGLVLPGYKYLGPFNGLDKGEPVNEADAAALEHDKAYDKQLEQGDNPYLKYNHADAEFQERLQEDTSFGGNLGRAVFQAKKRVLEPLGLVEEGAKTAPGKKRPIESPDSSTGIGKKGQQPAKKKLNFGQTGDSESVPDPQPLGEPPAAPSGLGSGTMAAGGGAPMADNNEGADGVGNASGNWHCDSTWLGDRVITTSTRTWALPTYNNHLYKQISSQSGATNDNHFFGYSTPWGYFDFNRFHCHFSPRDWQRLINNNWGFRPRKLRFKLFNIQVKEVTTNDGVTTIANNLTSTIQVFSDSEYQLPYVLGSAHQGCLPPFPADVFMIPQYGYLTLNNGSQSVGRSSFYCLEYFPSQMLRTGNNFEFSYTFEEVPFHSSYAHSQSLDRLMNPLIDQYLYYLARTQSTTGSTRELQFHQAGPNTMAEQSKNWLPGPCYRQQRLSKNIDSNNNSNFAWTGATKYHLNGRNSLTNPGVAMATNKDDEDQFFPINGVLVFGETGAANKTTLENVLMTSEEEIKTTNPVATEEYGVVSSNLQSSTAGPQTQTVNSQGALPGMVWQNRDVYLQGPIWAKIPHTDGNFHPSPLMGGFGLKHPPPQILIKNTPVPANPPEVFTPAKFASFITQYSTGQVSVEIEWELQKENSKRWNPEIQYTSNYAKSNNVEFAVNNEGVYTEPRPIGTRYLTRNL

SEQ ID NO: 64 - DNA, 2495 bp, Adeno-associated virus
gaattcgccctttctacggctgcgtcaactagaccaatgagaactttcccttcaacgattgcgtcgacaagatggtgatctggtgggaggagggcaagatgacggccaaggtcgtggagtccgccaaggccattcatcatctgctggggcgggctcccgagattgcttgctcggcctgcgatctggtcaacgtggacctggatgactgtgtttctgagcaataaatgacttaaaccaggtatggctgccgatggttatcttccagattggctcgaggacaacctctctgagggcattcgcgagtggtgggacttgaaacctggagccccgaaacccaaagccaaccagcaaaagcaggacgacggccggggtctggtgcttcctggctacaagtacctcggacccttcaacggactcgacaagggagagccggtcaacgaggcagacgccgcggccctcgagcacgacaaggcctacgacaagcagctcgagcagggggacaacccgtacctcaagtacaaccacgccgacgccgagtttcaggagcgtcttcaagaagatacgtcttttgggggcaacctcgggcgagcagtcttccaggccaagaagcgggttctcgaacctctcggtctggttgaggaaggcgctaagacggctcctggaaagaagagacccatagaatcccccgactcctccacgggcatcggcaagaaaggccagcagcccgctaaaaagaagctcaactttgggcagactggcgactcagagtcagtgcccgaccctcaaccaatcggagaaccccccgcaggcccctctggtctgggatctggtacaatggctgcaggcggtggcgctccaatggcagacaataacgaaggcgccgacggagtgggtaatgcctccggaaattggcattgcgattccacatggctgggcgacagagtcatcaccaccagcacccgcacctgggccctgcccacctacaacaaccacctctacaagcagatatcaagtcagagcggggctaccaacgacaaccacttcttcggctacagcaccccctggggctattttgacttcaacagattccactgccacttctcaccacgtgactggcagcgactcatcaacaacaactggggattccggcccagaaagctgcggttcaagttgttcaacatccaggtcaaggaggtcacgacgaacgacggcgttacgaccatcgctaataaccttaccagcacgattcaggtcttctcggactcggagtaccaactgccgtacgtcctcggctctgcgcaccagggctgcctccctccgttccctgcggacgtgttcatgattcctcagtacggatatctgactctaaacaacggcagtcagtctgtgggacgttcctccttctactgcctggagtactttccttctcagatgctgagaacgggcaataactttgaattcagctacacctttgaggaagtgcctttccacagcagctatgcgcacagccagagcctggaccggctgatgaatcccctcatcgaccagtacctgtactacctggcccggacccagagcactacggggtccacaagggagctgcagttccatcaggctgggcccaacaccatggccgagcaatcaaagaactggctgcccggaccctgttatcggcagcagagactgtcaaaaaacatagacagcaacaacaccagtaactttgcctggaccggggccactaaataccatctgaatggtagaaattcattaaccaacccgggcgtagccatggccaccaacaaggacgacgaggaccagttctttcccatcaacggagtgctggtttttggcaaaacgggggctgccaacaagacaacgctggaaaacgtgctaatgaccagcgaggaggagatcaaaaccaccaatcccgtggctacagaacagtacggtgtggtctccagcaacctgcaatcgtctacggccggaccccagacacagactgtcaacagccagggggctctgcccggcatggtctggcagaaccgggacgtgtacctgcagggtcccatctgggccaaaattcctcacacggacggcaactttcacccgtctcccctgatgggcggatttggactcaaacacccgcctcctcaaattctcatcaaaaacaccccggtacctgctaatcctccagaggtgtttactcctgccaagtttgcctcatttatcacgcagtacagcaccggccaggtcagcgtggagatcgagtgggaactgcagaaagaaaacagcaaacgctggaatccagagattcagtacacctcaaattatgccaagtctaataatgtggaatttgctgtcaacaacgaaggggtttatactgagcctcgccccattggcacccgttacctcacccgtaacctgtaattgcctgttaatcaataaaccggttaattcgtttcagttgaactttggtctctgcgaagggcgaattc

SEQ ID NO: 65 - protein, 728 aa, Artificial Sequence
  Description of Artificial Sequence: Synthetic polypeptide
MAADGYLPDWLEDNLSEGIREWWDLKPGAPKPKANQQKQDDGRGLVLPGYKYLGPFNGLDKGEPVNEADAAALEHDKAYDKQLEQGDNPYLKYNHADAEFQERLQEDTSFGGNLGRAVFQAKKRVLEPLGLVEEGAKTAPGKKRPIESPDSSTGIGKKGQQPAKKKLNFGQTGDSESVPDPQPIGEPPAGPSGLGSGTMAAGGGAPMADNNEGADGVGNASGNWHCDSTWLGDRVITTSTRTWALPTYNNHLYKQISSQSGATNDNHFFGYSTPWGYFDFNRFHCHFSPRDWQRLINNNWGFRPRKLRFKLFNIQVKEVTTNDGVTTIANNLTSTIQVFSDSEYQLPYVLGSAHQGCLPPFPADVFMIPQYGYLTLNNGSQSVGRSSFYCLEYFPSQMLRTGNNFEFSYTFEEVPFHSSYAHSQSLDRLMNPLIDQYLYYLARTQSTTGSTRELQFHQAGPNTMAEQSKNWLPGPCYRQQRLSKNIDSNNTSNFAWTGATKYHLNGRNSLTNPGVAMATNKDDEDQFFPINGVLVFGKTGAANKTTLENVLMTSEEEIKTTNPVATEQYGVVSSNLQSSTAGPQTQTVNSQGALPGMVWQNRDVYLQGPIWAKIPHTDGNFHPSPLMGGFGLKHPPPQILIKNTPVPANPPEVFTPAKFASFITQYSTGQVSVEIEWELQKENSKRWNPEIQYTSNYAKSNNVEFAVNNEGVYTEPRPIGTRYLTRNL

SEQ ID NO: 66 - DNA, 2504 bp, Adeno-associated virus
gaattcgccctttctacggctgcgtcaactggaccaatgagaactttcccttcaacgattgcgtcgacaagatggtgatctggtgggaggagggcaagatgacggccaaggtcgtggagtccgccaaggccattcatcatctgctggggcgggctcccgagattgcttgctcggcctgcgatctggtcaacgtggacctggatgactgtgtttctgagcaataaatgacttaaaccaggtatggctgccgatggttatcttccagattggctcgaggacaacctctctgagggcattcgcgagtggtgggacttgaaacctggagccccgaaacccaaagccaaccagcaaaagcaggacgacggccggggtctggtgcttcctggctacaagtacctcggacccttcaacggactcgacaagggagagccggtcaacgaggcagacgccgcggccctcgagcacgacaaggcctacgacaagcagctcgagcagggggacaacccgtacctcaagtacaaccacgccgacgccgagtttcaggagcgtcttcaagaagatacgtcttttgggggcaacctcgggcgagcagtcttccaggccaagaagcgggttctcgaacctctcggtctggttgaggaaggcgctaagacggctcctggaaagaagagacccatagaatcccccgactcctccacgggcatcggcaagaaaggccagcagcccgctaaaaagaagctcaactttgggcagactggcgactcagagtcagtgcccgaccctcaaccaatcggagaaccccccgcaggcccctctggtctgggatctggtacaatggctgcaggcggtggcgctccaatggcagacaataacgaaggcgccgacggagtgggtaatgcctccggaaattggcattgcgattccacatggctgggcgacagagtcatcaccaccagcacccgcacctgggccctgcccacctacaacaaccacctctacaagcagatatcaagtcagagcggggctaccaacgacaaccacttcttcggctacagcaccccctggggctattttgacttcaacagattccactgccacttctcatcacgtgactggcagcgactcatcaacaacaactggggattccggcccaagagactcaacttcaagctcttcaacatccaggtcaaggaggtcacgcagaatgaaggcaccaagaccatcgccaataaccttaccagcacgattcaggtctttacggactcggaataccggctcccgtacgtcctcggctctgcgcaccagggctgcctgcctccgttcccggcggacgtcttcatgattcctcagtacgggtacctgactctgaacaacggcagtcaggccgtgggccgttcctccttctactgcctggagtactttccttctcaaatgctgagaacgggcaacaactttgagttcagctaccagtttgaggacgtgccttttcacagcagctacgcgcacagccaaagcctggaccggctgatgaaccccctcatcgaccagtacctgtactacctgtctcggactcagtccacgggaggtaccgcaggaactcagcagttgctattttctcaggccgggcctaataacatgtcggctcaggccaaaaactggctacccgggccctgctaccggcagcaacgcgtctccacgacactgtcgcaaaataacaacagcaactttgcttggaccggtgccaccaagtatcatctgaatggcagagactctctggtaaatcccggtgtcgctatggcaacgcacaaggacgacgaagagcgattttttccatccagcggagtcttgatgtttgggaaacagggagctggaaaagacaacgtggactatagcagcgttatgctaaccagtgaggaagaaatcaaaaccaccaacccagtggccacagaacagtacggcgtggtggccgataacctgcaacagcaaaacgccgctcctattgtaggggccgtcaacagtcaaggagccttacctggcatggtctggcagaaccgggacgtgtacctgcagggtcctatctgggccaagattcctcacacggacggcaactttcatccttcgccgctgatgggaggctttggactgaaacacccgcctcctcagatcctgattaagaatacacctgttcccgcggatcctccaactaccttcagtcaagccaagccggcgtcgttcatcacgcagtacagcaccggacaggtcagcgtggaaattgaatgggagctgcagaaagagaacagcaagcgctggaacccagagattcagtatacttccaactactacaaatctacaaatgtggactttgctgtcaatactgagggtacttattcagagcctcgccccattggcacccgttacctcacccgtaacctgtaattgcctgttaatcaataaaccggttaattcgtttcagttgaactttggtctctgcgaagggcgaattc

SEQ ID NO: 67 - protein, 731 aa, Artificial Sequence
  Description of Artificial Sequence: Synthetic polypeptide
MAADGYLPDWLEDNLSEGIREWWDLKPGAPKPKANQQKQDDGRGLVLPGYKYLGPFNGLDKGEPVNEADAAALEHDKAYDKQLEQGDNPYLKYNHADAEFQERLQEDTSFGGNLGRAVFQAKKRVLEPLGLVEEGAKTAPGKKRPIESPDSSTGIGKKGQQPAKKKLNFGQTGDSESVPDPQPIGEPPAGPSGLGSGTMAAGGGAPMADNNEGADGVGNASGNWHCDSTWLGDRVITTSTRTWALPTYNNHLYKQISSQSGATNDNHFFGYSTPWGYFDFNRFHCHFSSRDWQRLINNNWGFRPKRLNFKLFNIQVKEVTQNEGTKTIANNLTSTIQVFTDSEYRLPYVLGSAHQGCLPPFPADVFMIPQYGYLTLNNGSQAVGRSSFYCLEYFPSQMLRTGNNFEFSYQFEDVPFHSSYAHSQSLDRLMNPLIDQYLYYLSRTQSTGGTAGTQQLLFSQAGPNNMSAQAKNWLPGPCYRQQRVSTTLSQNNNSNFAWTGATKYHLNGRDSLVNPGVAMATHKDDEERFFPSSGVLMFGKQGAGKDNVDYSSVMLTSEEEIKTTNPVATEQYGVVADNLQQQNAAPIVGAVNSQGALPGMVWQNRDVYLQGPIWAKIPHTDGNFHPSPLMGGFGLKHPPPQILIKNTPVPADPPTTFSQAKPASFITQYSTGQVSVEIEWELQKENSKRWNPEIQYTSNYYKSTNVDFAVNTEGTYSEPRPIGTRYLTRNL

SEQ ID NO: 68 - DNA, 3128 bp, Adeno-associated virus
gaattcgccctttctacggctgcgtcaactggaccaatgagaactttcccttcaacgattgcgtcgacaagatggtgatctggtgggaggagggcaagatgacggccaaggtcgtggagtccgccaaggccattctcggcggcagcaaggtgcgcgtggaccaaaagtgcaagtcttccgcccagatcgatcccacccccgtgatcgtcacttccaacaccaacatgtgcgccgtgattgacgggaacagcaccaccttcgagcaccagcagccgttacaagaccggatgttcaaatttgaactcacccgccgtctggagcacgactttggcaaggtgacaaagcaggaagtcaaagagttcttccgctgggcgcaggatcacgtgaccgaggtggcgcatgagttctacgtcagaaagggtggagccaacaagagacccgcccccgatgacgcggataaaagcgagcccaagcgggcctgcccctcagtcgcggatccatcgacgtcagacgcggaaggagctccggtggactttgccgacaggtaccaaaacaaatgttctcgtcacgcgggcatgcttcagatgctgtttccctgcaagacatgcgagagaatgaatcagaatttcaacatttgcttcacgcacgggaccagagactgttcagaatgtttccccggcgtgtcagaatctcaaccggtcgtcagaaagaggacgtatcggaaactctgtgccattcatcatctgctagggcgggctcccgagattgcttgctcggcctgcgatctggtcaacgtggacctggatgactgtgtttctgagcaataaatgacttaaaccaggtatggctgccgatggttatcttccagattggctcgaggacaacctctctgagggcattcgcgagtggtgggacttgaaacctggagccccgaaacccaaagccaaccagcaaaagcaggacgacggccggggtctggtgcttcctggctacaagtacctcggacccttcaacggactcgacaagggggagcccgtcaacgcggcggacgcagcggccctcgagcacgacaaggcctacgaccagcagctcaaagcgggtgacaatccgtacctgcggtataaccacgccgacgccgagtttcaggagcgtctgcaagaagatacgtcttttgggggcaacctcgggcgagcagtcttccaggccaagaagcgggttctcgaacctctcggtctggttgaggaaggcgctaagacggctcctggaaagaagagaccggtagagccatcaccccagcgttctccagactcctctacgggcatcggcaagacaggccagcagcccgcgaaaaagagactcaactttgggcagactggcgactcagagtcagtgcccgaccctcaaccaatcggagaaccccccgcaggcccctctggtctgggatctggtacaatggctgcaggcggtggcgctccaatggcagacaataacgaaggcgccgacggagtgggtagttcctcaggaaattggcattgcgattccacatggctgggcgacagagtcatcaccaccagcacccgaacctgggccctccccacctacaacaaccacctctacaagcaaatctccaacgggacatcgggaggaagcaccaacgacaacacctacttcggctacagcaccccctgggggtattttgactttaacagattccactgccacttctcaccacgtgactggcagcgactcatcaacaacaactggggattccggcccaagagactcaacttcaagctcttcaacatccaggtcaaggaggtcacgcagaatgaaggcaccaagaccatcgccaataaccttaccagcacgattcaggtctttacggactcggaataccagctcccgtacgtcctcggctctgcgcaccagggctgcctgcctccgttcccggcggacgtcttcatgattcctcagtacgggtacctgactctgaacaacggcagtcaggccgtgggccgttcctccttctactgcctggagtactttccttctcaaatgctgagaacgggcaacaactttgagttcagctaccagtttgaggacgtgccttttcacagcagctacgcgcacagccaaagcctggaccggctgatgaaccccctcatcgaccagtacctgtactacctgtctcggactcagtccacgggaggtaccgcaggaactcagcagttgctattttctcaggccgggcctaataacatgtcggctcaggccaaaaactggctacccgggccctgctaccggcagcaacgcgtctccacgacactgtcgcaaaataacaacagcaactttgcttggaccggtgccaccaagtatcatctgaatggcagagactctctggtaaatcccggtgtcgctatggcaacgcacaaggacgacgaagagcgattttttccatccagcggagtcttgatgtttgggaaacagggagctggaaaagacaacgtggactatagcagcgttatgctaaccagtgaggaagaaatcaaaaccaccaacccagtggccacagaacagtacggcgtggtggccgataacctgcaacagcaaaacgccgctcctattgtaggggccgtcaacagtcaaggagccttacctggcatggtctggcagaaccgggacgtgtacctgcagggtcctatctgggccaagattcctcacacggacggcaactttcatccttcgccgctgatgggaggctttggactgaaacacccgcctcctcagatcctgattaagaatacacctgttcccgcggatcctccaactaccttcagtcaagccaagctggcgtcgttcatcacgcagtacagcaccggacaggtcagcgtggaaattgaatgggagctgcagaaagagaacagcaagcgctggaacccagagattcagtatacttccaactactacaaatctacaaatgtggactttgctgtcaatactgagggtacttattcagagcctcgccccattggcacccgttacctcacccgtaacctgtaattgcctgttaatcaataaaccggctaattcgtttcagttgaactttggtctctgcgaagggcgaattc

SEQ ID NO: 69 - protein, 738 aa, Artificial Sequence
  Description of Artificial Sequence: Synthetic polypeptide
MAADGYLPDWLEDNLSEGIREWWDLKPGAPKPKANQQKQDDGRGLVLPGYKYLGPFNGLDKGEPVNAADAAALEHDKAYDQQLKAGDNPYLRYNHADAEFQERLQEDTSFGGNLGRAVFQAKKRVLEPLGLVEEGAKTAPGKKRPVEPSPQRSPDSSTGIGKTGQQPAKKRLNFGQTGDSESVPDPQPIGEPPAGPSGLGSGTMAAGGGAPMADNNEGADGVGSSSGNWHCDSTWLGDRVITTSTRTWALPTYNNHLYKQISNGTSGGSTNDNTYFGYSTPWGYFDFNRFHCHFSPRDWQRLINNNWGFRPKRLNFKLFNIQVKEVTQNEGTKTIANNLTSTIQVFTDSEYQLPYVLGSAHQGCLPPFPADVFMIPQYGYLTLNNGSQAVGRSSFYCLEYFPSQMLRTGNNFEFSYQFEDVPFHSSYAHSQSLDRLMNPLIDQYLYYLSRTQSTGGTAGTQQLLFSQAGPNNMSAQAKNWLPGPCYRQQRVSTTLSQNNNSNFAWTGATKYHLNGRDSLVNPGVAMATHKDDEERFFPSSGVLMFGKQGAGKDNVDYSSVMLTSEEEIKTTNPVATEQYGVVADNLQQQNAAPIVGAVNSQGALPGMVWQNRDVYLQGPIWAKIPHTDGNFHPSPLMGGFGLKHPPPQILIKNTPVPADPPTTFSQAKLASFITQYSTGQVSVEIEWELQKENSKRWNPEIQYTSNYYKSTNVDFAVNTEGTYSEPRPIGTRYLTRNL

SEQ ID NO: 70 - DNA, 3084 bp, Adeno-associated virus
gaattcgccctttctacggctgcatcaactggaccaatgagaactttcccttcaacgattgcgtcgacaagatggtgatctggtgggaggagggcaagatgacggccaaggtcgtggagtccgccaaggccattctcggcggcagcaaggtgcgcgtggaccaaaagtgcaagtcgtccgcccagatcgaccccacccccgtgatcgtcacctccaacaccaacatgtgcgccgtgattgacgggaacagcaccaccttcgagcaccagcagccgttgcaggaccggatgttcaagttcgaactcacccgccgtctggagcacgactttggcaaggtgaccaagcaggaagtcaaagagttcttccgctgggcgcaggatcacgtgaccgaggtggcgcatgagttctacgtcagaaagggcggagccagcaaaagacccgcccccgatgacgcggatataagcgagcccaagcgggcctgcccctcagtcgcggatccatcgacgtcagacgcggaaggagctccggtggactttgccgacaggtaccaaaacaaatgttctcgtcacgcgggcatgcttcagatgctgtttccctgcaaaacgtgcgagaaaatgaatcagaatttcaacatttgcttcacgcacggggtcagagactgctcagaatgtttccccggtgcatcagaatctcaaccggtcgtcagaaaaaaaacgtatcagaaactgtgtgccattcatcatctgctggggcgggcacccgagattgcttgctcggcctgcgatctggtcaacgtggacctggacgactgtgtttctgagcaataaatgacttaaaccaggtatggctgccgatggttatcttccagattggcttgaggacaacctctctgagggcattcgcgagtggtgggacctgaaacctggagccccgaaacccaaagccaaccagcaaaagcaggacgacggccggggtctggtgcttcctggctacaagtacctcggacccttcaacggactcgacaagggggagcccgtcaacgcggcggacgcagcggccctcgagcacgacaaggcctacgaccagcagctcaaagcgggtgacaatccgtacctgcggtataaccacgccgacgccgagtttcaggagcgtctgcaagaagatacgtcttttgggggcaacctcgggcgagcagtcttccaggccaagaagcgggttctcgaacctctcggtctggttgaggaaggcgctaagacggctcctggaaagaagagaccggtagagccatcacctcagcgttcccccgactcctccacgggcatcggcaagaaaggccaccagcccgcgagaaagagactgaactttgggcagactggcgactcggagtcagtccccgaccctcaaccaatcggagaaccaccagcaggcccctctggtctgggatctggtacaatggctgcaggcggtggcgctccaatggcagacaataacgaaggcgccgacggagtgggtagttcctcaggaaattggcattgcgattccacatggctgggcgacagagtcatcaccaccagcacccgaacctgggccctgcccacctacaacaaccatctctacaagcaaatctccaacgggacatcgggaggaagcactaacgacaacacctactttggctacagcaccccctgggggtattttgacttcaacagattccactgccacttctcaccacgtgactggcagcgactcatcaacaataactggggattccggcccaagagactcaacttcaagctcttcaacatccaggtcaaggaggtcacgcagaatgaaggcaccaagaccatcgccaataaccttaccagcacgattcaggtgtttacggactcggaataccagctcccgtacgtccccggctctgcgcaccagggctgcctccctccgttcccggcggacgtcttcatgattcctcagtacgggtatctgaccctaaacaatggcagtcaggctgtgggccgttcctccttctactgcctggaatacttcccttctcaaatgctgaggacgggcaacaactttgaattcagctacaccttcgaggacgtgcctttccacagcagctacgcgcacagccagagcctggaccggctgatgaaccctctcatcgaccagtacctgtattacttatccagaactcagtccacaggaggaactcaaggtactcagcaattgttattttctcaagccgggcccgcaaacatgtcggctcaggccaagaactggctacctggaccgtgttaccgtcagcaacgagtttccacgacactgtcgcaaaacaacaacagcaattttgcttggaccggtgccaccaagtatcacctgaatggcagagactccctggttaatcccggcgttgccatggctacccacaaggacgacgaggagcgcttcttcccgtcaagcggagttctaatgtttggcaagcagggggctggaaaagacaatgtggactacagcagcgtgatgctcaccagcgaagaagaaattaaaactactaacccagtggctacagagcagtatggtgtggtggcagacaacctgcagcagaccaacggagctcccattgtgggaactgtcaacagccagggggccttacctggtatggtctggcaaaaccgggacgtgtacctgcagggccccatctgggccaaaattcctcacacggacggcaactttcatccttcgccgctgatgggaggctttggactgaaacacccgcctcctcagatcctggtgaaaaacactcctgttcctgcggatcctccgaccaccttcagccaggccaagctggcttcttttatcacgcagtacagcaccggacaggtcagcgtggaaatcgaatgggagctgcagaaagaaaacagcaagcgctggaacccagagattcagtatacttccaactactacaaatctacaaatgtggactttgctgtcaatactgagggtacttattcagagcctcgccccattggcactcgttatctcacccgtaatctgtaattgcttgttaatcaataaaccggt

SEQ ID NO: 71 - protein, 738 aa, Artificial Sequence
  Description of Artificial Sequence: Synthetic polypeptide
MAADGYLPDWLEDNLSEGIREWWDLKPGAPKPKANQQKQDDGRGLVLPGYKYLGPFNGLDKGEPVNAADAAALEHDKAYDQQLKAGDNPYLRYNHADAEFQERLQEDTSFGGNLGRAVFQAKKRVLEPLGLVEEGAKTAPGKKRPVEPSPQRSPDSSTGIGKKGHQPARKRLNFGQTGDSESVPDPQPIGEPPAGPSGLGSGTMAAGGGAPMADNNEGADGVGSSSGNWHCDSTWLGDRVITTSTRTWALPTYNNHLYKQISNGTSGGSTNDNTYFGYSTPWGYFDFNRFHCHFSPRDWQRLINNNWGFRPKRLNFKLFNIQVKEVTQNEGTKTIANNLTSTIQVFTDSEYQLPYVPGSAHQGCLPPFPADVFMIPQYGYLTLNNGSQAVGRSSFYCLEYFPSQMLRTGNNFEFSYTFEDVPFHSSYAHSQSLDRLMNPLIDQYLYYLSRTQSTGGTQGTQQLLFSQAGPANMSAQAKNWLPGPCYRQQRVSTTLSQNNNSNFAWTGATKYHLNGRDSLVNPGVAMATHKDDEERFFPSSGVLMFGKQGAGKDNVDYSSVMLTSEEEIKTTNPVATEQYGVVADNLQQTNGAPIVGTVNSQGALPGMVWQNRDVYLQGPIWAKIPHTDGNFHPSPLMGGFGLKHPPPQILVKNTPVPADPPTTFSQAKLASFITQYSTGQVSVEIEWELQKENSKRWNPEIQYTSNYYKSTNVDFAVNTEGTYSEPRPIGTRYLTRNL

SEQ ID NO: 72 - DNA, 3123 bp, Adeno-associated virus
gaattcgcccttggctgcgtcaactggaccaatgagaactttcccttcaacgattgcgtcgacaagatggtgatctggtgggaggagggcaagatgacggccaaggtcgtggagtccgccaaggccattctcggcggcagcaaggtgcgcgtggaccaaaagtgcaagtcgtccgcccagatcgaccccacccccgtgatcgtcacctccaacaccaacatgtgcgccgtgattgacgggaacagcaccaccttcgagcaccagcagccgttgcaggaccggatgttcaagttcgaactcacccgccgtctggagcacgactttggcaaggtgaccaagcaggaagtcaaagagttcttccgctgggcgcaggatcacgtgaccgaggtggcgcatgagttctacgtcagaaagggcggagccagcaaaagacccgcccccgatgacgcggatataagcgagcccaagcgggcctgcccctcagtcgcggatccatcgacgtcagacgcggaaggagctccggtggactttgccgacaggtaccaaaacaaatgttctcgtcacgcgggcatgctccagatgctgtttccctgcaaaacgtgcgagagaatgaatcagaatttcaacatttgcttcacgcacggggtcagagactgctcagaatgtttccccggtgcatcagaatctcaaccggtcgtcagaaaaaaaacgtatcagaaactgtgtgccattcatcatctgctggggcgggcacccgagattgcttgctcggcctgcgatctggtcaacgtggacctggacgactgtgtttctgagcaataaatgacttaaaccaggtatggctgccgatggttatcttccagattggcttgaggacaacctctctgagggcattcgcgagtggtgggacctgaaacctggagccccgaaacccaaagccaaccagcaaaagcaggacgacggccggggtctggtgcttcctggctacaagtacctcggacccttcaacggactcgacaagggggagcccgtcaacgcggcggacgcagcggccctcgagcacgacaaggcctacgaccagcagctcaaagcgggtgacaatccgtacctgcggtataaccacgccgacgccgagtttcaggagcgtctgcaagaagatacgtcttttgggggcaacctcgggcgagcagtcttccaggccaagaagcgggttctcgaacctctcggtctggttgaggaaggcgctaagacggctcctggaaagaagagaccggtagagccatcacctcagcgttcccccgactcctccacgggcatcggcaagaaaggccaccagcccgcgagaaagagactgaactttgggcagactggcgactcggagtcagtccccgaccctcaaccaatcggagaaccaccagcaggcccctctggtctgggatctggtacaatggctgcaggcggtggcgctccaatggcagacaataacgaaggcgccgacggagtgggtagttcctcaggaaattggcattgcgattccacatggctgggcgacagagtcatcaccaccagcacccgaacctgggccctgcccacctacaacaaccatctctacaagcaaatctccaacgggacatcgggaggaagcactaacgacaacacctactttggctacagcaccccctgggggtattttgacttcaacagattccactgccacttctcaccacgtgactggcagcgactcatcaacaataactggggattccggcccaagagactcaacttcaagctcttcaacatccaggtcaaggaggtcacgcagaatgaaggcaccaagaccatcgccaataaccttaccagcacgattcaggtgtttacggactcggaataccagctcccgtacgtcctcggctctgcgcaccagggctgcctccctccgttcccggcggacgtcttcatgattcctcagtacgggtatctgaccctaaacaatggcagtcaggctgtgggccgttcctccttctactgcctggaatacttcccttctcaaatgctgaggacgggcaacaactttgaattcagctacaccttcgaggacgtgcctttccacagcagctacgcgcacagccagagcctggaccggctgatgaaccctctcatcgaccagtacctgtattacttatccagaactcagtccacaggaggaactcaaggtactcagcaattgttattttctcaagccgggcccgcaaacatgtcggctcaggccaagaactggctacctggaccgtgttaccgtcagcaacgagtttccacgacactgtcgcaaaacaacaacagcaattttgcttggaccggtgccaccaagtatcacctgaatggcagagactccctggttaatcccggcgttgccatggctacccacaaggacgacgaggagcgcttcttcccgtcaagcggagttctaatgtttggcaagcagggggctggaaaagacaatgtggactacagcagcgtgatgctcaccagcgaagaagaaattaaaactactaacccagtggctacagagcagtatggtgtggtggcagacaacctgcagcagaccaacggagctcccattgtgggaactgtcaacagccagggggccttacctggtatggtctggcaaaaccgggacgtgtacctgcagggccccatctgggccaaaattcctcacacggacggcaactttcatccttcgccgctgatgggaggctttggactgaaacacccgcctcctcagatcctggtgaaaaacactcctgttcctgcggatcctccgaccaccttcagccaggccaagctggcttcttttatcacgcagtacagcaccggacaggtcagcgtggaaatcgaatgggagctgcagaaagaaaacagcaagcgctggaacccagagattcagtatacttccaactactacaaatctacaaatgtggactttgctgtcaatactgagggtacttattcagagcctcgccccattggcactcgttatctcacccgtaatctgtaattgcttgttaatcaataaaccggttaattcgtttcagttgaactttggtctctgcgaagggcgaattc

SEQ ID NO: 73 - protein, 738 aa, Artificial Sequence
  Description of Artificial Sequence: Synthetic polypeptide
MAADGYLPDWLEDNLSEGIREWWDLKPGAPKPKANQQKQDDGRGLVLPGYKYLGPFNGLDKGEPVNAADAAALEHDKAYDQQLKAGDNPYLRYNHADAEFQERLQEDTSFGGNLGRAVFQAKKRVLEPLGLVEEGAKTAPGKKRPVEPSPQRSPDSSTGIGKKGHQPARKRLNFGQTGDSESVPDPQPIGEPPAGPSGLGSGTMAAGGGAPMADNNEGADGVGSSSGNWHCDSTWLGDRVITTSTRTWALPTYNNHLYKQISNGTSGGSTNDNTYFGYSTPWGYFDFNRFHCHFSPRDWQRLINNNWGFRPKRLNFKLFNIQVKEVTQNEGTKTIANNLTSTIQVFTDSEYQLPYVLGSAHQGCLPPFPADVFMIPQYGYLTLNNGSQAVGRSSFYCLEYFPSQMLRTGNNFEFSYTFEDVPFHSSYAHSQSLDRLMNPLIDQYLYYLSRTQSTGGTQGTQQLLFSQAGPANMSAQAKNWLPGPCYRQQRVSTTLSQNNNSNFAWTGATKYHLNGRDSLVNPGVAMATHKDDEERFFPSSGVLMFGKQGAGKDNVDYSSVMLTSEEEIKTTNPVATEQYGVVADNLQQTNGAPIVGTVNSQGALPGMVWQNRDVYLQGPIWAKIPHTDGNFHPSPLMGGFGLKHPPPQILVKNTPVPADPPTTFSQAKLASFITQYSTGQVSVEIEWELQKENSKRWNPEIQYTSNYYKSTNVDFAVNTEGTYSEPRPIGTRYLTRNL

SEQ ID NO: 74 - DNA, 3122 bp, Adeno-associated virus
gaattcgccctttctacggctgcgtcaactggaccaatgagaactttcccttcaacgattgcgtcgacaagatggtgatctggtgggaggagggcaagatgacggccaaggtcgtggagtccgccaaggccattctcggcggcagcaaggtgcgtgtggaccaaaagtgcaagtcttccgcccagatcgatcccacccccgtgatcgtcacctccaacaccaacatgtgcgccgtgattgacgggaacagcgccaccttcgagcaccagcagccgttgcaggaccggatgttcaaatttgaactcacccgccgtctggagcatgactttggcaaggtgacgaagcaggaagtcaaagagttcttccgctgggcgcaggatcacgtgaccgaggtggcgcatgagttccacgtcagaaagggtggagccaacaagagacccgcccccgatgacgcggatataagcgagcccaagcgggcctgcccctcagtcgcggatccatcgacgtcagacgcggaaggagctccggtggactttgccgacaggtaccaaaacaaatgttctcgtcacgcgggcatgcttcagatgctgtttccctgcaagacatgcgagagaatgaatcagaatttcaacatttgcttcacgcacgggaccagagactgttcagaatgtttccccggcgtgtcagaatctcaaccggtcgtcagaaagaggacgtatcggaaactctgtgcgattcatcatctgctggggcgggctcccgagattgcttgctcggcctgcgatctggtcaacgtggacctggatgactgtgtttctgagcaataaatgacttaaaccaggtatggctgccgatggttatcttccagattggctcgaggacaacctctctgagggcattcgcgagtggtgggacttgaaacctggagccccgaaacccaaagccaaccagcaaaagcaggacgacggccggggtctggtgcttcctggctacaagtacctcggacccttcaacggactcgacaagggggagcccgtcaacgcggcggacgcagcggccctcgagcacgacaaagcctacgaccagcagctcaaagcgggtgacaatccgtacctgcggtataatcacgccgacgccgagtttcaggagcgtctgcaagaagatacgtcttttgggggcaacctcgggcgagcagtcttccaggccaagaagcgggttctcgaacctctcggtctggttgaggaaggcgctaagacggctcctggaaagaagagactggtagagcagtcgccacaagagccagactcctcctcgggcatcggcaagacaggccagcagcccgctaaaaagagactcaattttggtcagactggcgactcagagtcagtccccgacccacaacctctcggagaacctccagcagccccctcaggtctgggacctaatacaatggcttcaggcggtggcgctccaatggcagacaataacgaaggcgccgacggagtgggtaattcctcgggaaattggcattgcgattccacatggctgggggacagagtcatcaccaccagcacccgaacctgggccctgcccacctacaacaaccacctctacaagcaaatctccaacggcacctcgggaggaagcaccaacgacaacacctattttggctacagcaccccctgggggtattttgacttcaacagattccactgtcacttttcaccacgtgactggcaacgactcatcaacaacaattggggattccggcccaaaagactcaacttcaagctgttcaacatccaggtcaaggaagtcacgacgaacgaaggcaccaagaccatcgccaataatctcaccagcaccgtgcaggtctttacggactcggagtaccagttaccgtacgtgctaggatccgctcaccagggatgtctgcctccgttcccggcggacgtcttcacggttcctcagtacggctatttaactttaaacaatggaagccaagccctgggacgttcctccttctactgtctggagtatttcccatcgcagatgctgagaaccggcaacaactttcagttcagctacaccttcgaggacgtgcctttccacagcagctacgcgcacagccagagcctggacaggctgatgaatcccctcatcgaccagtacctgtactacctggtcagaacgcaaacgactggaactggagggacgcagactctggcattcagccaagcgggtcctagctcaatggccaaccaggctagaaattgggtgcccggaccttgctaccggcagcagcgcgtctccacgacaaccaaccagaacaacaacagcaactttgcctggacgggagctgccaagtttaagctgaacggccgagactctctaatgaatccgggcgtggcaatggcttcccacaaggatgacgacgaccgcttcttcccttcgagcggggtcctgatttttggcaagcaaggagccgggaacgatggagtggattacagccaagtgctgattacagatgaggaagaaatcaaggctaccaaccccgtggccacagaagaatatggagcagtggccatcaacaaccaggccgccaatacgcaggcgcagaccggactcgtgcacaaccagggggtgattcccggcatggtgtggcagaatagagacgtgtacctgcagggtcccatctgggccaaaattcctcacacggacggcaactttcacccgtctcccctgatgggcggctttggactgaagcacccgcctcctcaaattctcatcaagaacacaccggttccagcggacccgccgcttaccttcaaccaggccaagctgaactctttcatcacgcagtacagcaccggacaggtcagcgtggaaatcgagtgggagctgcagaaagaaaacagcaaacgctggaatccagagattcaatacacttccaactactacaaatctacaaatgtggactttgctgtcaacacggaaggagtttatagcgagcctcgccccattggcacccgttacctcacccgcaacctgtaattacatgttaatcaataaaccggttaattcgtttcagttgaactttggtctctgcgaagggcgaattc

SEQ ID NO: 75 - protein, 736 aa, Artificial Sequence
  Description of Artificial Sequence: Synthetic polypeptide
MAADGYLPDWLEDNLSEGIREWWDLKPGAPKPKANQQKQDDGRGLVLPGYKYLGPFNGLDKGEPVNAADAAALEHDKAYDQQLKAGDNPYLRYNHADAEFQERLQEDTSFGGNLGRAVFQAKKRVLEPLGLVEEGAKTAPGKKRLVEQSPQEPDSSSGIGKTGQQPAKKRLNFGQTGDSESVPDPQPLGEPPAAPSGLGPNTMASGGGAPMADNNEGADGVGNSSGNWHCDSTWLGDRVITTSTRTWALPTYNNHLYKQISNGTSGGSTNDNTYFGYSTPWGYFDFNRFHCHFSPRDWQRLINNNWGFRPKRLNFKLFNIQVKEVTTNEGTKTIANNLTSTVQVFTDSEYQLPYVLGSAHQGCLPPFPADVFTVPQYGYLTLNNGSQALGRSSFYCLEYFPSQMLRTGNNFQFSYTFEDVPFHSSYAHSQSLDRLMNPLIDQYLYYLVRTQTTGTGGTQTLAFSQAGPSSMANQARNWVPGPCYRQQRVSTTTNQNNNSNFAWTGAAKFKLNGRDSLMNPGVAMASHKDDDDRFFPSSGVLIFGKQGAGNDGVDYSQVLITDEEEIKATNPVATEEYGAVAINNQAANTQAQTGLVHNQGVIPGMVWQNRDVYLQGPIWAKIPHTDGNFHPSPLMGGFGLKHPPPQILIKNTPVPADPPLTFNQAKLNSFITQYSTGQVSVEIEWELQKENSKRWNPEIQYTSNYYKSTNVDFAVNTEGVYSEPRPIGTRYLTRNL

SEQ ID NO: 76 - DNA, 3117 bp, Adeno-associated virus
gaattcgcccttggctgcgtcaactggaccaatgagaactttcccttcaacgattgcgtcgacaagatggtgatctggtgggaggagggcaagatgacggccaaggtcgtggagtccgccaaggccattctcggcggcagcaaggtgcgtgtggaccaaaagtgcaagtcttccgcccagatcgatcccacccccgtgatcgtcacctccaacaccaacatgtgcgccgtgattgacgggaacagcaccaccttcgagcaccagcagccgttgcaggaccggatgttcaaatttgaactcacccgccgtctggagcatgactttggcaaggtgacgaagcaggaagtcaaagagttcttccgctgggcgcaggatcacgtgaccgaggtggcgcatgagttccacgtcagaaagggtggagccaacaagagacccgcccccgatgacgcggatataagcgagcccaagcgggcctgcccctcagtcgcggatccatcgacgtcagacgcggaaggagctccggtggactttgccgacaggtaccaaaacaaatgttctcgtcacgcgggcatgcttcagatgctgtttccctgcaagacatgcgagagaatgaatcagaatttcaacatttgcttcacgcacgggaccagagactgttcagaatgtttccccggcgtgtcagaatctcaaccggtcgtcagaaagaggacgtatcggaaactctgtgcgattcatcatctgctggggcgggctcccgagattgcttgctcggcctgcgatctggtcaacgtggacctggatgactgtgtttctgagcaataaatgacttaaaccaggtatggctgccgatggttatcttccagattggctcgaggacaacctctctgagggcattcgcgagtggtgggacttgaaacctggagccccgaaacccaaagccaaccagcaaaagcaggacgacggccggggtctggtgcttcctggctacaagtacctcggacccttcaacggactcgacaagggggagcccgtcaacgcggcggacgcagcggccctcgagcacgacaaagcctacgaccagcagctcaaagcgggtgacaatccgtacctgcggtataatcacgccgacgccgagtttcaggagcgtctgcaagaagatacgtcttttgggggcaacctcgggcgagcagtcttccaggccaagaagcgggttctcgaacctctcggtctggttgaggaaggcgctaagacggctcctggaaagaagagaccggtagagcagtcgccacaagagccagactcctcctcgggcatcggcaagacaggccagcagcccgctaaaaagagactcaattttggtcagactggcgactcagagtcagtccccgacccacaacctctcggagaacctccagcagccccctcaggtctgggacctaatacaatggcttcaggcggtggcgctccaatggcagacaataacgaaggcgccgacggagtgggtaattcctcgggaaattggcattgcgattccacatggctgggggacagagtcatcaccaccagcacccgaacctgggccctgcccacctacaacaaccacctctacaagcaaatctccaacggcacctcgggaggaagcaccaacgacaacacctattttggctacagcaccccctgggggtattttgacttcaacagattccactgtcacttttcaccacgtgactggcaacgactcatcaacaacaattggggattccggcccaaaagactcaacttcaagctgttcaacatccaggtcaaggaagtcacgacgaacgaaggcaccaagaccatcgccaataatctcaccagcaccgtgcgggtctttacggactcggagtaccagttaccgtacgtgctaggatccgctcaccagggatgtctgcctccgttcccggcggacgtcttcatggttcctcagtacggctatttaactttaaacaatggaagccaagccctgggacgttcctccttctactgtctggagtatttcccatcgcagatgctgagaaccggcaacaactttcagttcagctacaccttcgaggacgtgcctttccacagcagctacgcgcacagccagagcctggacaggctgatgaatcccctcatcgaccagtacctgtactacctggtcagaacgcaaacgactggaactggagggacgcagactctggcattcagccaagcgggtcctagctcaatggccaaccaggctagaaattgggtgcccggaccttgctaccggcagcagcgcgtctccacgacaaccaaccagagcaacaacagcaactttgcctggacgggagctgccaagtttaagctgaacggccgagactctctaatgaatccgggcgtggcaatggcttcccacaaggatgacgacgaccgcttcttcccttcgagcggggtcctgatttttggcaagcaaggagccgggaacgatggagtggattacagccaagtgctgattacagatgaggaagaaatcaaggctaccaaccccgtggccacagaagaatatggagcagtggccatcaacaaccaggccgccaatacgcaggcgcagaccggactcgtgcacaaccagggggtgattcccggcatggtgtggcagaatagagacgtgtacctgcagggtcccatctgggccaaaattcctcacacggacggcaactttcacccgtctcccctgatgggcggctttggactgaagcacccgcctcctcaaattctcatcaagaacacaccggttccagcggacccgccgcttaccttcaaccaggccaagctgaactctttcatcacgcagtacagcaccggacaggtcagcgtggaaatcgagtgggagctgcagaaagaaaacagcaaacgctggaatccagagattcaatacacttccaactactacaaatctacaaatgtggactttgctgtcaacacggaaggagtttatagcgagcctcgccccattggcacccgttacctcacccgcaacctgtaattacatgttaatcaataaaccggttaattcgtttcagttgaactttggtctctgcgaagggcgaattc

SEQ ID NO: 77 - protein, 736 aa, Artificial Sequence
  Description of Artificial Sequence: Synthetic polypeptide
MAADGYLPDWLEDNLSEGIREWWDLKPGAPKPKANQQKQDDGRGLVLPGYKYLGPFNGLDKGEPVNAADAAALEHDKAYDQQLKAGDNPYLRYNHADAEFQERLQEDTSFGGNLGRAVFQAKKRVLEPLGLVEEGAKTAPGKKRPVEQSPQEPDSSSGIGKTGQQPAKKRLNFGQTGDSESVPDPQPLGEPPAAPSGLGPNTMASGGGAPMADNNEGADGVGNSSGNWHCDSTWLGDRVITTSTRTWALPTYNNHLYKQISNGTSGGSTNDNTYFGYSTPWGYFDFNRFHCHFSPRDWQRLINNNWGFRPKRLNFKLFNIQVKEVTTNEGTKTIANNLTSTVRVFTDSEYQLPYVLGSAHQGCLPPFPADVFMVPQYGYLTLNNGSQALGRSSFYCLEYFPSQMLRTGNNFQFSYTFEDVPFHSSYAHSQSLDRLMNPLIDQYLYYLVRTQTTGTGGTQTLAFSQAGPSSMANQARNWVPGPCYRQQRVSTTTNQSNNSNFAWTGAAKFKLNGRDSLMNPGVAMASHKDDDDRFFPSSGVLIFGKQGAGNDGVDYSQVLITDEEEIKATNPVATEEYGAVAINNQAANTQAQTGLVHNQGVIPGMVWQNRDVYLQGPIWAKIPHTDGNFHPSPLMGGFGLKHPPPQILIKNTPVPADPPLTFNQAKLNSFITQYSTGQVSVEIEWELQKENSKRWNPEIQYTSNYYKSTNVDFAVNTEGVYSEPRPIGTRYLTRNL

SEQ ID NO: 78 - DNA, 3121 bp, Adeno-associated virus
gaattcgcccttctacggctgcgtcaactggaccaatgagaactttcccttcaacgattgcgtcgacaagatggtgatctggtgggaggagggcaagatgacggccaaggtcgtggagtccgccaaggccattctcggcggcagcaaggtgcgtgtggaccaaaagtgcaagtcttccgcccagatcgatcccacccccgtgatcgtcacctccaacaccaacatgtgcgccgtgattgacgggaacagcaccaccttcgagcaccagcagccgttgcaggaccggatgttcaaatttgaactcacccgccgtctggagcatgactttggcaaggtgacgaagcaggaagtcaaagagttcttccgctgggcgcaggatcacgtgaccgaggtggcgcatgagttccacgtcagaaagggtggcgccaacaagagacccgcccccgatgacgcggatataagcgagcccaagcgggcctgcccctcagtcgcggatccatcgacgtcagacgcggaaggagctccggtggactttgccgacaggtaccaaaacaaatgttctcgtcacgcgggcatgcttcagatgctgtttccctgcaagacatgcgagagaatgaatcagaatttcaacatttgcttcacgcacgggaccagagactgttcagaatgtttccccggcgtgtcagaatctcaaccggtcgtcagaaagaggacgtatcggaaactctgtgcgattcatcatctgctggggcgggctcccgagattgcttgctcggcctgcgatctggtcaacgtggacctggatgactgtgtttctgagcaataaatgacttaaaccaggtatggctgccgatggttatcttccagattggctcgaggacaacctctctgagggcattcgcgagtggtgggacttgaaacctggagccccgaaacccaaagccaaccagcaaaagcaggacgacggccggggtctggtgcttcctggctacaagtacctcggacccttcaacggactcgacaagggggagcccgtcaacgcggcggacgcagcggccctcgagcacgacaaagcctacgaccagcagctcaaagcgggtgacaatccgtacctgcggtataatcacgccgacgccgagtttcaggagcgtctgcaagaagatacgtcctttgggggcaacctcgggcgagcagtcttccaggccaagaagcgggttctcgaacctctcggtctggttgaggaaggcgctaagacggctcctggaaagaagagaccggtagagcagtcgccacaagagccagactcctcctcgggcatcggcaagacaggccagcagcccgctaaaaagagactcaattttggtcagactggcgactcagagtcagtccccgacccacaacctctcggagaacctccagcagccccctcaggtctgggacctaatacaatggcttcaggcggtggcgctccaatggcagacaataacgaaggcgccgacggagtgggtaattcctcgggaaattggcattgcgattccacatggctgggggacagagtcatcaccaccagcacccgaacctgggccctgcccacctacaacaaccacctctacaagcaaatctccaacggcacctcgggaggaagcaccaacgacaacacctattttggctacagcaccccctgggggtattttgacttcaacagattccactgtcacttttcaccacgtgactggcaacgactcatcaacaacaattggggattccggcccaaaagactcaacttcaagctgttcaacatccaggtcaaggaagtcacgacgaacgaaggcaccaagaccatcgccaataatctcaccagcaccgtgcaggtctttacggacttggagtaccagttaccgtacgtgctaggatccgctcaccagggatgtctgcctccgttcccggcggacgtcttcatggttcctcagtacggctatttaactttaaacaatggaagccaagccctgggacgttcctccttctactgtctggagtatttcccatcgcagatgccgagaaccggcaacaactttcagttcagctacaccttcgaggacgtgcctttccacagcagctacgcgcacagccagagcctggacaggctgatgaatcccctcatcgaccagtacctgtactacctggtcagaacgcaaacgactggaactggagggacgcagactctggcattcagccaagcgggtcctagctcaatggccaaccaggctagaaattgggtgcccggaccttgctaccggcagcagcgcgtctccacgacaaccaaccagaacaacaacagcaactttgcctggacgggagctgccaagtttaagctgaacggccgagactctctaatgaatccgggcgtggcaatggcttcccacaaggatgacgacgaccgcttcttcccttcgagcggggtcctgatttttggcaagcaaggagccgggaacgatggagtggattacagccaagtgctgattacagatgaggaagaaatcaaggctaccaaccccgtggccacagaagaatatggagcagtggccatcaacaaccaggccgccaatacgcaggcgcagaccggactcgtgcacaaccagggggtgattcccggcatggtgtggcagaatagagacgtgtacctgcagggtcccatctgggccaaaattcctcacacggacggcaactttcacccgtctcccctgatgggcggctttggactgaagcacccgcctcctcaaattctcatcaagaacacaccggttccagcggacccgccgcttaccttcaaccaggccaagctgaactctttcatcacgcagtacagcaccggacaggtcagcgtggaaatcgagtgggagctgcagaaagaaaacagcaaacgctggaatccagagattcaatacacttccaactactacaaatctacaaatgtggactttgctgtcaacacggaaggagtttatagcgagcctcgccccattggcacccgttacctcacccgcaacctgtaattacatgttaatcaataaaccggttaattcgtttcagttgaactttggtctctgcgaagggcgaattc

SEQ ID NO: 79 - protein, 736 aa, Artificial Sequence
  Description of Artificial Sequence: Synthetic polypeptide
MAADGYLPDWLEDNLSEGIREWWDLKPGAPKPKANQQKQDDGRGLVLPGYKYLGPFNGLDKGEPVNAADAAALEHDKAYDQQLKAGDNPYLRYNHADAEFQERLQEDTSFGGNLGRAVFQAKKRVLEPLGLVEEGAKTAPGKKRPVEQSPQEPDSSSGIGKTGQQPAKKRLNFGQTGDSESVPDPQPLGEPPAAPSGLGPNTMASGGGAPMADNNEGADGVGNSSGNWHCDSTWLGDRVITTSTRTWALPTYNNHLYKQISNGTSGGSTNDNTYFGYSTPWGYFDFNRFHCHFSPRDWQRLINNNWGFRPKRLNFKLFNIQVKEVTTNEGTKTIANNLTSTVQVFTDLEYQLPYVLGSAHQGCLPPFPADVFMVPQYGYLTLNNGSQALGRSSFYCLEYFPSQMPRTGNNFQFSYTFEDVPFHSSYAHSQSLDRLMNPLIDQYLYYLVRTQTTGTGGTQTLAFSQAGPSSMANQARNWVPGPCYRQQRVSTTTNQNNNSNFAWTGAAKFKLNGRDSLMNPGVAMASHKDDDDRFFPSSGVLIFGKQGAGNDGVDYSQVLITDEEEIKATNPVATEEYGAVAINNQAANTQAQTGLVHNQGVIPGMVWQNRDVYLQGPIWAKIPHTDGNFHPSPLMGGFGLKHPPPQILIKNTPVPADPPLTFNQAKLNSFITQYSTGQVSVEIEWELQKENSKRWNPEIQYTSNYYKSTNVDFAVNTEGVYSEPRPIGTRYLTRNL

SEQ ID NO: 80 - DNA, 3122 bp, Adeno-associated virus
gaattcgccctttctacggctgcgtcaactggaccaatgagaactttcccttcaacgattgcgtcgacaagatggtgatctggtgggaggagggcaagatgacggccaaggtcgtggagtccgccaaggccattctcggcggcagcaaggtgcgtgtggaccaaaagtgcaagtcttccgcccagatcgatcccacccccgtgatcgtcacctccaacaccaacatgtgcgccgtgattgacgggaacagcaccaccttcgagcaccagcagccgttgcaggaccggatgttcaaatttgaactcacccgccgtctggagcatgactttggcaaggtgacgaagcaggaagtcaaagggttcttccgctgggcgcaggatcacgtgaccgaggtggcgcatgagttccacgtgcgagcccaagcgggcctgcccctcagtcgcggatccatcgacgtcagaccagaaagggtggagccaacaagagacccgcccccgatgacgcggatataagcggaaggagctccggtggactttgccgacaggtaccaaaacaaatgttctcgtcacgcgggcatgcttcagatgctgtttccctgcaagacatgcgagagaatgaatcagaatttcaacatttgcttcacgcacgggaccagagactgttcagaatgtttccccggcgtgtcagaatctcaaccggtcgtcagaaagaggacgtatcggaaactctgtgcgattcatcatctgctggggcgggctcccgagattgcttgctcggcctgcgatctggtcaacgtggacctggatgactgtgtttctgagcaataaatgacttaaaccaggtatggctgccgatggttatcttccagattggctcgaggacaacctctctgagggcattcgcgagtggtgggacttgaaacctggagccccgaaacccaaagccaaccagcaaaagcaggacgacggccggggtctggtgcttcctggctacaagtacctcggacccttcaacggactcgacaagggggagcccgtcaacgcggcggacgcagcggccctcgagcacgacaaagcctacgaccagcagctcaaagcgggtgacaatccgtacctgcggtataatcacgccgacgccgagtttcaggagcgtctgcaagaagatacgtcttttgggggcaacctcgggcgagcagtcttccaggccaagaagcgggttctcgaacctctcggtctggttgaggaaggcgctaagacggctcctggaaagaagagaccggtagagcagtcgccacaagagccagactcctcctcgggcatcggcaagacaggccagcagcccgctaaaaagagactcaattttggtcagactggcgactcagagtcagtccccgacccacaacctctcggagaacctccagcagccccctcaggtctgggacctaatacaatggcttcaggcggtggcgctccaatggcagacaataacgaaggcgccgacggagtgggtaattcctcgggaaattggcattgcgattccacatggctgggggacagagtcatcaccaccagcacccgaacctgggccctgcccacctacaacaaccacctctacaagcaaatctccaacggcacctcgggaggaagcaccaacgacaacacctattttggctacagcaccccctgggggtattttgacttcaacagattccactgtcacttttcaccacgtgactggcaacgactcatcaacaacaattggggattccggcccaaaagactcaacttcaagctgttcaacatccaggtcaaggaagtcacgacgaacgaaggcaccaagaccatcgccaataatctcaccagcaccgtgcaggtctttacggactcggagtaccagttaccgtacgtgctaggatccgctcaccagggatgtctgcctccgttcccggcggacgtcttcatggttcctcagtacggctatttaactttaaacaatggaagccaagccctgggacgttcctccttctactgtctggagtatttcccatcgcagatgctgagaaccggcaacaactttcagttcagctacaccttcgaggacgtgcctttccacagcagctacgcgcacagccagagcctggacaggctgatgaatcccctcatcgaccagtacctgtactacctggtcagaacgcaaacgactggaactggagggacgcagactctggcattcagccaagcgggtcctagctcaatggccaaccaggctagaaattgggtgcccggaccttgctaccggcagcagcgcgtctccacgacaaccaaccagaacaacaacagcaactttgcctggacgggagctgccaagtttaagctgaacggccgagactctctaatgaatccgggcgtggcaatggcttcccacaaggatgacgacgaccgcttcttcccttcgagcggggtcctgatttttggcaagcaaggagccgggaacgatggagtggattacagccaagtgctgattacagatgaggaagaaatcaaggctaccaaccccgtggccacagaagaatatggagcagtggccatcaacaaccaggccgccaatacgcaggcgcagaccggactcgtgcacaaccagggggtgattcccggcatggtgtggcagaatagagacgtgtacctgcagggtcccatctgggccaaaattcctcacacggacggcaactttcacccgtctcccctgatgggcggctttggactgaagcacccgcctcctcaaattctcatcaagaacacaccggttccagcggacccgccgcttaccttcaaccaggccaagctgaactctttcatcacgcagtacagcaccggacaggtcagcgtggaaatcgagtgggagctgcagaaagaaaacagcaaacgctggaatccagagattcaatacacttccaactactacaaatctacaaatgtggactttgctgtcaacacggagggggtttatagcgagcctcgccccattggcacccgttacctcacccgcaacctgtaattacatgttaatcaataaaccggttaattcgtttcagttgaactttggtctctgcgaagggcgaattc

SEQ ID NO: 81 - protein, 736 aa, Artificial Sequence
  Description of Artificial Sequence: Synthetic polypeptide
MAADGYLPDWLEDNLSEGIREWWDLKPGAPKPKANQQKQDDGRGLVLPGYKYLGPFNGLDKGEPVNAADAAALEHDKAYDQQLKAGDNPYLRYNHADAEFQERLQEDTSFGGNLGRAVFQAKKRVLEPLGLVEEGAKTAPGKKRPVEQSPQEPDSSSGIGKTGQQPAKKRLNFGQTGDSESVPDPQPLGEPPAAPSGLGPNTMASGGGAPMADNNEGADGVGNSSGNWHCDSTWLGDRVITTSTRTWALPTYNNHLYKQISNGTSGGSTNDNTYFGYSTPWGYFDFNRFHCHFSPRDWQRLINNNWGFRPKRLNFKLFNIQVKEVTTNEGTKTIANNLTSTVQVFTDSEYQLPYVLGSAHQGCLPPFPADVFMVPQYGYLTLNNGSQALGRSSFYCLEYFPSQMLRTGNNFQFSYTFEDVPFHSSYAHSQSLDRLMNPLIDQYLYYLVRTQTTGTGGTQTLAFSQAGPSSMANQARNWVPGPCYRQQRVSTTTNQNNNSNFAWTGAAKFKLNGRDSLMNPGVAMASHKDDDDRFFPSSGVLIFGKQGAGNDGVDYSQVLITDEEEIKATNPVATEEYGAVAINNQAANTQAQTGLVHNQGVIPGMVWQNRDVYLQGPIWAKIPHTDGNFHPSPLMGGFGLKHPPPQILIKNTPVPADPPLTFNQAKLNSFITQYSTGQVSVEIEWELQKENSKRWNPEIQYTSNYYKSTNVDFAVNTEGVYSEPRPIGTRYLTRNL

SEQ ID NO: 82 - DNA, 2370 bp, Adeno-associated virus
gaattcgccctttctacggctgcgtcaactggaccaatgagaactttcccttcaacgattgcgtcgacaagatggtgatctggtgggaggagggcaagatgacggccaaggtcgtggagtccgccaaggccattctcggcggcagcaaggtgcgcgtggaccaaaagtgcaagtcgtccgcccagatcgaccccacccccgtgatcgtcacctccaacaccaacatgtgcgccgtgattgacgggaacagcaccaccttcgagcaccagcagccgttgcaggaccggatgttcaagttcgaactcacccgccgtctggagcacgactttggcaaggtgaccaagcaggaagtcaaagagttcttccgctgggcgcaggatcacgtgaccgaggtggcgcatgagttctacgtcagaaagggcggagccagcaaaagacccgcccccgatgacgcggatataagcgagcccaagcgggcctgcccctcagtcgcggatccatcgacgtcagacgcggaaggagctccggtggactttgccgacaggtaccaaaacaaatgttctcgtcacgcgggcatgcttcagacgctgtttccctgcaaaacgtgcgagagaatgaatcagaatttcaacatttgcttcacgcacggggtcagagactgctcagaatgtttccccggtgcatcagaatctcaaccggtcgtcagaaaaaaaacgtatcagaaactgtgtgccattcatcatctgctggggcgggcacccgagattgcttgctcggcctgcgatctggtcaacgtggacctggacgactgtgtttctgagcaataaatgacttaaaccaggtatggctgccgatggttatcttccagattggcttgaggacaacctctctgagggcattcgcgagtggtgggacctgaaacctggagccccgaaacccaaagccaaccagcaaaagcaggacgacggccggggtctggtgcttcctggctacaagtacctcggacccttcaacggactcgacaagggggagcccgtcaacgcggcggacgcagcggccctcgagcacgacaaggcctacgaccagcagctcaaagcgggtgacaatccgtacctgcggtataaccacgccgacgccgagtttcaggagcgtctgcaagaagatacgtcttttgggggcaacctcgggcgagcagtcttccaggccaagaagcgggttctcgaacctctcggtctggttgaggaaggcgctaagacggctcctggaaagaagagaccggtagagccatcacctcagcgttcccccgactcctccacgggcatcggcaagaaaggccaccagcccgcgagaaagagactgaactttgggcagactggcgactcggagtcagtccccgaccctcaaccaatcggagaaccaccagcaggcccctctggtctgggatctggtacaatggctgcaggcggtggcgctccaatggcagacaataacgaaggcgccgacggagtgggtagttcctcaggaaattggcattgcgattccacatggctgggcgacagagtcatcaccaccagcacccgaacctgggccctgcccacctacaacaaccatctctacaagcaaatctccaacgggacatcgggaggaagcactaacgacaacacctactttggctacagcaccccctgggggtattttgacttcaacagattccactgccacttctcaccacgtgactggcagcgactcatcaacaataactggggattccggcccaagagactcaacttcaagctcttcaacatccaggtcaaggaggtcacgcagaatgaaggcaccaagaccatcgccaataaccttaccagcacgattcaggtgtttacggactcggaataccagctcccgtacgtcctcggctctgcgcaccagggctgcctccctccgttcccggcggacgtcttcatgattcctcagtacgggtatctgaccctaaacaatggcagtcaggctgtgggccgttcctccttctactgcctggaatacttcccttctcaaatgctgaggacgggcaacaactttgaattcagctacaccttcgaggacgtgcctttccacagcagctacgcgcacagccagagcctggaccggctgatgaaccctctcatcgaccagtacctgtattacttatccagaactcagtccacaggaggaactcaaggtactcagcaattgttattttctcaagccgggcccgcaaacatgtyggctcaggccaagaactggctacctggaccgtgttaccgtcagcaacgagtttccacgacactgtcgcaaaacaacaacagcaattttgctggaccggtgccacca

SEQ ID NO: 83 - protein, 738 aa, Artificial Sequence; identical to SEQ ID NO: 73
  Description of Artificial Sequence: Synthetic polypeptide

SEQ ID NO: 84 - DNA, 2205 bp, Adeno-associated virus
atgactgacggttaccttccagattggctagaggacaacctctctgaaggcgttcgagagtggtgggcgctgcaacctggagcccctaaacccaaggcaaatcaacaacatcaggacaacgctcggggtcttgtgcttccgggttacaaatacctcggacccggcaacggactcgacaagggggaacccgtcaacgcagcggacgcggcagccctcgagcacgacaaggcctacgaccagcagctcaaggccggtgacaacccctacctcaagtacaaccacgccgacgcggagttccagcagcggcttcagggcgacacatcgtttgggggcaacctcggcagagcagtcttccaggccaaaaagagggttcttgaacctcttggtctggttgagcaagcgggtgagacggctcctggaaagaagagaccgttgattgaatccccccagcagcccgactcctccacgggtatcggcaaaaaaggcaagcagccggctaaaaagaagctcgttttcgaagacgaaactggagcaggcgacggaccccctgagggatcaacttccggagccatgtctgatgacagtgagatgcgtgcagcagctggcggagctgcagtcgagggcggacaaggtgccgatggagtgggtaatgcctcgggtgattggcattgcgattccacctggtctgagggccacgtcacgaccaccagcaccagaacctgggtcttgcccacctacaacaaccacctctacaagcgactcggagagagcctgcagtccaacacctacaacggattctccaccccctggggatactttgacttcaaccgcttccactgccacttctcaccacgtgactggcagcgactcatcaacaacaactggggcatgcgacccaaagccatgcgggtcaaaatcttcaacatccaggtcaaggaggtcacgacgtcgaacggcgagacaacggtggctaataaccttaccagcacggttcagatctttgcggactcgtcgtacgaactgccgtacgtgatggatgcgggtcaagagggcagcctgcctccttttcccaacgacgtctttatggtgccccagtacggctactgtggactggtgaccggcaacacttcgcagcaacagactgacagaaatgccttctactgcctggagtactttccttcgcagatgctgcggactggcaacaactttgaaattacgtacagttttgagaaggtgcctttccactcgatgtacgcgcacagccagagcctggaccggctgatgaaccctctcatcgaccagtacctgtggggactgcaatcgaccaccaccggaaccaccctgaatgccgggactgccaccaccaactttaccaagctgcggcctaccaacttttccaactttaaaaagaactggctgcccgggccttcaatcaagcagcagggcttctcaaagactgccaatcaaaactacaagatccctgccaccgggtcagacagtctcatcaaatacgagacgcacagcactctggacggaagatggagtgccctgacccccggacctccaatggccacggctggacctgcggacagcaagttcagcaacagccagctcatctttgcggggcctaaacagaacggcaacacggccaccgtacccgggactctgatcttcacctctgaggaggagctggcagccaccaacgccaccgatacggacatgtggggcaacctacctggcggtgaccagagcaacagcaacctgccgaccgtggacagactgacagccttgggagccgtgcctggaatggtctggcaaaacagagacatttactaccagggtcccatttgggccaagattcctcataccgatggacactttcacccctcaccgctgattggtgggtttgggctgaaacacccgcctcctcaaatttttatcaagaacaccccggtacctgcgaatcctgcaacgaccttcagctctactccggtaaactccttcattactcagtacagcactggccaggtgtcggtgcagattgactgggagatccagaaggagcggtccaaacgctggaaccccgaggtccagtttacctccaactacggacagcaaaactctctgttgtgggctcccgatgcggctgggaaatacactgagcctagggctatcggtacccgctacctcacccaccacctgtaa

SEQ ID NO: 85 - protein, 734 aa, Adeno-associated virus; identical to SEQ ID NO: 57

SEQ ID NO: 86 - DNA, 3128 bp, Adeno-associated virus
gaattcgccctttctacggctgcgtcaactggaccaatgagaactttcccttcaacgattgcgtcgacaagatgttgatctggtgggaggagggcaagatgacggccaaggtcgtggagtccgccaaggccattctcggcggcagcaaagtgcgcgtggaccaaaagtgcaagccgtccgcccagatcgaccccacccccgtgatcgtcacctccaacaccaacatgtgcgccgtgattgacgggaacagcaccaccttcgagcaccagcagccgttgcgggaccggatgttcaagtttgaactcacccgccgtctggagcacgactttggcaaggtgacaaagcaggaagtcagagagttcttccgctgggcgcaggatcacgtgaccgaggtggcgcacgagttctacgtcagaaagggtggagccaacaagagacccgcccccgatgacgcggataaaagcgagcccaagcgggcctgcccctcagtcgcggatccatcgacgtcagacgcggaaggagctccggtggactttgccgacaggtaccaaaacaaatgttctcgtcacgcgggcatgcttcagatgctgtttccctgcaaaacatgcgagagaatgaatcagaatttcaacatttgcttcacgcacgggaccagagactgttcagaatgtttccccggcgtgtcagaatctcaaccggtcgtcagaaaaaagacgtatcggaaactctgtgcgattcatcatctgctggggcgggcacccgagattgcttgctcggcctgcgatctggtcaacgtggacctagatgactgtgtttctgagcaataaatgacttaaaccaggtatggctgccgatggttatcttccagattggctcgaggacaacctctctgagggcattcgcgagtggtgggacttgaaacctggagccccgaaacccaaagccaaccagcaaaagcaggacgacggccggggtctggtgcttcctggctacaagtacctcggacccttcaacggactcgacaagggggagcccgtcaacgcggcggacgcagcggccctcgagcacgacaaggcctacgaccagcagctcaaagcgggtgacaatccgtacctgcggtataaccacgccgacgccgagtttcaggagcgtctgcaagaagatacgtcttttgggggcaacctcgggcgagcagtcttccaggccaagaagcgggttctcgaacctctcggtctggttgaggaaggcgctaagacggctcctggaaagaagagaccggtagagccatcaccccagcgttctccagactcctctacgggcatcggcaagaaaggccagcagcccgcgaaaaagagactcaactttgggcagactggcgactcagagtcagtgcccgaccctcaaccaatcggagaaccccccgcaggcccctctggtctgggatctggtacaatggctgcaggcggtggcgctccaatggcagacaataacgaaggcgccgacggagtgggtagttcctcaggaaattggcattgcgattccacatggctgggcgacagagtcatcaccaccagcacccgaacctgggccctccccacctacaacaaccacctctacaagcaaatctccaacgggacttcgggaggaagcaccaacgacaacacctacttcggctacagcaccccctgggggtattttgactttaacagattccactgccacttctcaccacgtgactggcagcgactcatcaacaacaactggggattccggcccaagagactcaacttcaagctcttcaacatccaggtcaaggaggtcacgcagaatgaaggcaccaagaccatcgccaataaccttaccagcacgattcaggtctttacggactcggaataccagctcccgtacgtcctcggctctgcgcaccagggctgcctgcctccgttcccggcggacgtcttcatgattcctcagtacgggtacctgactctgaacaatggcagtcaggccgtgggccgttcctccttctactgcctggagtactttccttctcaaatgctgagaacgggcaacaactttgagttcagctaccagtttgaggacgtgccttttcacagcagctacgcgcacagccaaagcctggaccggctgatgaaccccctcatcgaccagtacctgtactacctgtctcggactcagtccacgggaggtaccgcaggaactcagcagttgctattttctcaggccgggcctaataacatgtcggctcaggccaaaaactggctacccgggccctgctaccggcagcaacgcgtctccacgacactgtcgcaaaataacaacagcaactgtaaatcccggtgtcgctatggcaacccacaaggacgacgaagagcgattttgcctggaccggtgccaccaagtatcatctgaatggcagagactctctgttttccgtccagcggagtcttaatgtttgggaaacagggagctggaaaagacaacgtggactatagcagcgttatgctaaccagtgaggaagaaattaaaaccaccaacccagtggccacggaacagtacggcgtggtggccgataacctgcaacagcaaaacgccgctcctattgtaggggccgtcaacagtcaaggagccttacctggcatggtctggcagaaccgggacgtgtacctgcagggtcctatctgggccaagattcctcacacggacggaaactttcatccctcgccgctgatgggaggctttggactgaaacacccgcctcctcagatcctgattaagaatacacctgttcccgcggatcctccaactaccttcagtcaagctaagctggcgtcgttcatcacgcagtacagcaccggacaggtcagcgtggaaattgaatgggagctgcagaaagaaaacagcaaacgctggaacccagagattcaatacacttccaactactacaaatctacaaatgtggacttcgctgttaacacagatggcacttattctgagcctcgccccattggcacccgttacctcacccgtaatctgtaattgctcgttaatcaataaaccggttgattcgtttcagttgaactttggtctctgcgaagggcgaattc

SEQ ID NO: 87 - protein, 738 aa, Artificial Sequence; identical to SEQ ID NO: 7
  Description of Artificial Sequence: Synthetic polypeptide

SEQ ID NO: 88 - DNA, 3128 bp, Adeno-associated virus
gaattcgccctttctacggctgcgtcaactggaccaatgagaactttcccttcaacgattgcgtcgacaagatggtgatctggtgggaggagggcaagatgacggccaaggtcgtggagtccgccaaggccattctcggcggcagcaaagtgcgcgtggaccaaaagtgcaagtcgtccgcccagatcgaccccacccccgtgatcgtcacctccaacaccaacatgtgcgccgtgattgacgggaacagcaccaccttcgagcaccagcagccgttgcaggaccggatgttcaagtttgaactcacccgccgtctggagcacgactttggcaaggtgacaaagcaggaagtcagagagttcttccgctgggcgcaggatcacgtgaccgaggtggcgcacgagttctacgtcagaaagggtggagccaacaagagacccgcccccgatgacgcggataaaagcgagcccaagcgggcctgcccctcagtcgcggatccatcgacgtcagacgcggaaggagctccggtggactttgccgacaggtaccaaaacaaatgttctcgtcacgcgggcatgcttcagatgctgtttccctgcaaaacatgcgagagaatgaatcagaatttcaacatttgcttcacgcacgggaccagagactgttcagaatgtttccccggcgtgtcagaatctcaaccggttgtcagaaaaaagacgtatcggaaactctgtgcgattcatcatctgctggggcgggcacccgagattgcttgctcggcctgcgatctggtcaacgtggacctagatgactgtgtttctgagcaataaatgacttaaaccaggtatggctgccgatggttatcttccagattggctcgaggacaacctctctgagggcattcgcgagtggtgggacttgaaacctggagccccgaaacccaaagccaaccagcaaaagcaggacgacggccggggtctggtgcttcctggctacaagtacctcggacccttcaacggactcgacaagggggagcccgtcaacgcggcggacgcagcggccctcgagcacgacaaggcctacgaccagcagctcaaagcgggtgacaatccgtacctgcggtataaccacgccgacgccgagtttcaggagcgtctgcaagaagatacgtcttttgggggcaacctcgggcgagcagtcttccaggccaagaagcgggttctcgaacctctcggtctggttgaggaaggcgctaagacggctcctggaaagaagagaccggtagagccatcaccccagcgttctccagactcctctacgggcatcggcaagaaaggccagcagcccgcgaaaaagagactcaactttgggcagactggcgactcagagtcagtgcccgaccctcaaccaatcggagaaccccccgcaggcccctctggtctgggatctggtacaatggctgcaggcggtggcgctccaatggcagacaataacgaaggcgccgacggagtgggtagttcctcaggaaattggcattgcgattccacatggctgggcgacagagtcatcaccaccagcacccgaacctgggccctccccacctacaacaaccacctctacaagcaaatctccaacgggacttcgggaggaagcaccaacgacaacacctacttcggctacagcaccccctgggggtattttgactttaacagattccactgccacttctcaccacgtgactggcagcgactcatcaacaacaactggggattccggcccaagagacccaacttcaagctcttcaacatccaggtcaaggaggtcacgcagaatgaaggcaccaagaccatcgccaataaccttaccagcacgattcaggtctttacggactcggaataccagctcccgtacgtcctcggctctgcgcaccagggctgcctgcctccgttcccggcggacgtcttcatgattcctcagtacgggtacctgactctgaacaatggcagtcaggccgtgggccgttcctccttctactgcctggagtactttccttctcaaatgctgagaacgggcaacaactttgagttcagctaccagtttgaggacgtgccttttcacagcagctacgcgcacagccaaagcctggaccggctgatgaaccccctcatcgaccagtacctgtactacctgtctcggactcagtccacgggaggtaccgcaggaactcagcagttgctattttctcaggccgggcctaataacatgtcggctcaggccaaaaactggctacccgggccctgctaccggcagcaacgcgtctccacgacactgtcgcaaaataacaacagcaactttgcctggaccggtgccaccaagtatcatctgaatggcagagactctctggtaaatcccggtgtcgctatggcaacccacaaggacgacgaagagcgattttttccgtccagcggagtcttaatgtttgggaaacagggagctggaaaagacaacgtggactatagcagcgttatgctaaccagtgaggaagaaattaaaaccaccaacccagtggccacagaacagtacggcgtggtggccgataacctgcaacagcaaaacgccgctcctattgtaggggccgtcaacagtcaaggagccttacctggcatggtctggcagaaccgggacgtgtacctgcagggtcctatctgggccaagattcctcacacggacggaaactttcatccctcgccgctgatgggaggctttggactgaaacacccgcctcctcagatcctgattaagaatacacctgttcccgcggatcctccaactaccttcagtcaagctaagctggcgtcgttcatcacgcagtacagcaccggacaggtcagcgtggaaattgaatgggagctgcagaaagaaaacagcaaacgctggaacccagagattcaatacacttccaactactacaaatctacaaatgtggactttgctgttaacacagatggcacttattctgagcctcgccccattggcacccgttacctcacccgtaatctgtaattgcttgttaatcaataaaccggttgattcgtttcagttgaactttggtctctgcgaagggcgaattc

SEQ ID NO: 89 - protein, 738 aa, Artificial Sequence
  Description of Artificial Sequence: Synthetic polypeptide
MAADGYLPDWLEDNLSEGIREWWDLKPGAPKPKANQQKQDDGRGLVLPGYKYLGPFNGLDKGEPVNAADAAALEHDKAYDQQLKAGDNPYLRYNHADAEFQERLQEDTSFGGNLGRAVFQAKKRVLEPLGLVEEGAKTAPGKKRPVEPSPQRSPDSSTGIGKKGQQPAKKRLNFGQTGDSESVPDPQPIGEPPAGPSGLGSGTMAAGGGAPMADNNEGADGVGSSSGNWHCDSTWLGDRVITTSTRTWALPTYNNHLYKQISNGTSGGSTNDNTYFGYSTPWGYFDFNRFHCHFSPRDWQRLINNNWGFRPKRPNFKLFNIQVKEVTQNEGTKTIANNLTSTIQVFTDSEYQLPYVLGSAHQGCLPPFPADVFMIPQYGYLTLNNGSQAVGRSSFYCLEYFPSQMLRTGNNFEFSYQFEDVPFHSSYAHSQSLDRLMNPLIDQYLYYLSRTQSTGGTAGTQQLLFSQAGPNNMSAQAKNWLPGPCYRQQRVSTTLSQNNNSNFAWTGATKYHLNGRDSLVNPGVAMATHKDDEERFFPSSGVLMFGKQGAGKDNVDYSSVMLTSEEEIKTTNPVATEQYGVVADNLQQQNAAPIVGAVNSQGALPGMVWQNRDVYLQGPIWAKIPHTDGNFHPSPLMGGFGLKHPPPQILIKNTPVPADPPTTFSQAKLASFITQYSTGQVSVEIEWELQKENSKRWNPEIQYTSNYYKSTNVDFAVNTDGTYSEPRPIGTRYLTRNL

SEQ ID NO: 90 - protein, 738 aa, Adeno-associated virus
MAADGYLPDWLEDNLSEGIREWWDLKPGAPKPKANQQKQDDGRGLVLPGYKYLGPFNGLDKGEPVNAADAAALEHDKAYDQQLKAGDNPYLRYNHADAEFQERLQEDTSFGGNLGRAVFQAKKRVLEPLGLVEEAAKTAPGKKRPVEPSPQRSPDSSTGIGKKGQQPAKKRLNFGQTGDSESVPDPQPIGEPPAGPSGLGSGTMAAGGGAPMADNNEGADGVGSSSGNWHCDSTWLGDRVITTSTRTWALPTYNNHLYKQISNGTSGGSTNDNTYFGYSTPWGYFDFNRFHCHFSPRDWQRLINNNWGFRPKRLSFKLFNIQVKEVTQNEGTKTIANNLTSTIQVFTDSEYQLPYVLGSAHQGCLPPFPADVFMIPQYGYLTLNNGSQAVGRSSFYCLEYFPSQMLRTGNNFEFSYTFEDVPFHSSYAHSQSLDRLMNPLIDQYLYYLSRTQSTGGTQGTQQLLFSQAGPANMSAQAKNWLPGPCYRQQRVSTTLSQNNNSNFAWTGATKYHLNGRDSLVNPGVAMATHKDDEERFFPSSGVLMFGKQGAGRDNVDYSSVMLTSEEEIKTTNPVATEQYGVVADNLQQTNTGPIVGNVNSQGALPGMVWQNRDVYLQGPIWAKIPHTDGNFHPSPLMGGFGLKHPPPQILIKNTPVPADPPTTFSQAKLASFITQYSTGQVSVEIEWELQKENSKRWNPEIQYTSNYYKSTNVDFAVNTEGTYSEPRPIGTRYLTRNL

SEQ ID NO: 91 - DNA, 2172 bp, Artificial Sequence
  Description of Artificial Sequence: Synthetic polynucleotide
atgtcttttgttgatcaccctccagattggttggaagaagttggtgaaggtcttcgcgagtttttgggccttgaagcgggcccaccgaaaccaaaacccaatcagcagcatcaagatcaagcccgtggtcttgtgctgcctggttataactatctcggacccggaaacggtctcgatcgaggagagcctgtcaacagggcagacgaggtcgcgcgagagcacgacatctcgtacaacgagcagcttgaggcgggagacaacccctacctcaagtacaaccacgcggacgccgagtttcaggagaagctcgccgacgacacatccttcgggggaaacctcggaaaggcagtctttcaggccaagaaaagggttctcgaaccttttggcctggttgaagagggtgctaagacggcccctaccggaaagcggatagacgaccactttccaaaaagaaagaaggctcggaccgaagaggactccaagccttccacctcgtcagacgccgaagctggacccagcggatcccagcagctgcaaatcccagcccaaccagcctcaagtttgggagctgatacaatgtctgcgggaggtggcggcccattgggcgacaataaccaaggtgccgatggagtgggcaatgcctcgggagattggcattgcgattccacgtggatgggggacagagtcgtcaccaagtccacccgaacctgggtgctgcccagctacaacaaccaccagtaccgagagatcaaaagcggctccgtcgacggaagcaacgccaacgcctactttggatacagcaccccctgggggtactttgactttaaccgcttccacagccactggagcccccgagactggcaaagactcatcaacaactactggggcttcagaccccggtccctcagagtcaaaatcttcaacattcaagtcaaagaggtcacggtgcaggactccaccaccaccatcgccaacaacctcacctccaccgtccaagtgtttacggacgacgactaccagctgccctacgtcgtcggcaacgggaccgagggatgcctgccggccttccctccgcaggtctttacgctgccgcagtacggttacgcgacgctgaaccgcgacaacacagaaaatcccaccgagaggagcagcttcttctgcctagagtactttcccagcaagatgctgagaacgggcaacaactttgagtttacctacaactttgaggaggtgcccttccactccagcttcgctcccagtcagaacctgttcaagctggccaacccgctggtggaccagtacttgtaccgcttcgtgagcacaaataacactggcggagtccagttcaacaagaacctggccgggagatacgccaacacctacaaaaactggttcccggggcccatgggccgaacccagggctggaacctgggctccggggtcaaccgcgccagtgtcagcgccttcgccacgaccaataggatggagctcgagggcgcgagttaccaggtgcccccgcagccgaacggcatgaccaacaacctccagggcagcaacacctatgccctggagaacactatgatcttcaacagccagccggcgaacccgggcaccaccgccacgtacctcgagggcaacatgctcatcaccagcgagagcgagacgcagccggtgaaccgcgtggcgtacaacgtcggcgggcagatggccaccaacaaccagagctccaccactgcccccgcgaccggcacgtacaacctccaggaaatcgtgcccggcagcgtgtggatggagagggacgtgtacctccaaggacccatctgggccaagatcccagagacgggggcgcactttcacccctctccggccatgggcggattcggactcaaacacccaccgcccatgatgctcatcaagaacacgcctgtgcccggaaatatcaccagcttctcggacgtgcccgtcagcagcttcatcacccagtacagcaccgggcaggtcaccgtggagatggagtgggagctcaagaaggaaaactccaagaggtggaacccagagatccagtacacaaacaactacaacgacccccagtttgtggactttgccccggacagcaccggggaatacagaaccaccagacctatcggaacccgataccttacccgacccctt

SEQ ID NO: 92 - protein, 720 aa, Artificial Sequence
  Description of Artificial Sequence: Synthetic polypeptide
MSFVDHPPDWLEEVGEGLREFLGLEAGPPKPKPNQQHQDQARGLVLPGYNYLGPGNGLDRGEPVNRADEVAREHDISYNEQLEAGDNPYLKYNHADAEFQEKLADDTSFGGNLGKAVFQAKKRVLEPFGLVEEGAKTAPTGKRIDDHFPKRKKARTEEDSKPSTSSDAEAGPSGSQQLQIPAQPASSLGADTMSAGGGGPLGDNNQGADGVGNASGDWHCDSTWMGDRVVTKSTRTWVLPSYNNHQYREIKSGSVDGSNANAYFGYSTPWGYFDFNRFHSHWSPRDWQRLINNYWGFRPRSLRVKIFNIQVKEVTVQDSTTTIANNLTSTVQVFTDDDYQLPYVVGNGTEGCLPAFPPQVFTLPQYGYATLNRDNTENPTERSSFFCLEYFPSKMLRTGNNFEFTYNFEEVPFHSSFAPSQNLFKLANPLVDQYLYRFVSTNNTGGVQFNKNLAGRYANTYKNWFPGPMGRTQGWNLGSGVNRASVSAFATTNRMELEGASYQVPPQPNGMTNNLQGSNTYALENTMIFNSQPANPGTTATYLEGNMLITSESETQPVNRVAYNVGGQMATNNQSSTTAPATGTYNLQEIVPGSVWMERDVYLQGPIWAKIPETGAHFHPSPAMGGFGLKHPPPMMLIKNTPVPGNITSFSDVPVSSFITQYSTGQVTVEMEWELKKENSKRWNPEIQYTNNYNDPQFVDFAPDSTGEYRTTRPIGTRYL

SEQ ID NO: 93 - protein, 724 aa, Adeno-associated virus 5
MSFVDHPPDWLEEVGEGLREFLGLEAGPPKPKPNQQHQDQARGLVLPGYNYLGPGNGLDRGEPVNRADEVAREHDISYNEQLEAGDNPYLKYNHADAEFQEKLADDTSFGGNLGKAVFQAKKRVLEPFGLVEEGAKTAPTGKRIDDHFPKRKKARTEEDSKPSTSSDAEAGPSGSQQLQIPAQPASSLGADTMSAGGGGPLGDNNQGADGVGNASGDWHCDSTWMGDRVVTKSTRTWVLPSYNNHQYREIKSGSVDGSNANAYFGYSTPWGYFDFNRFHSHWSPRDWQRLINNYWGFRPRSLRVKIFNIQVKEVTVQDSTTTIANNLTSTVQVFTDDDYQLPYVVGNGTEGCLPAFPPQVFTLPQYGYATLNRDNTENPTERSSFFCLEYFPSKMLRTGNNFEFTYNFEEVPFHSSFAPSQNLFKLANPLVDQYLYRFVSTNNTGGVQFNKNLAGRYANTYKNWFPGPMGRTQGWNLGSGVNRASVSAFATTNRMELEGASYQVPPQPNGMTNNLQGSNTYALENTMIFNSQPANPGTTATYLEGNMLITSESETQPVNRVAYNVGGQMATNNQSSTTAPATGTYNLQEIVPGSVWMERDVYLQGPIWAKIPETGAHFHPSPAMGGFGLKHPPPMMLIKNTPVPGNITSFSDVPVSSFITQYSTGQVTVEMEWELKKENSKRWNPEIQYTNNYNDPQFVDFAPDSTGEYRTTRPIGTRYLTRPL

SEQ ID NO: 94 - DNA, 2175 bp, Adeno-associated virus 5
atgtcttttgttgatcaccctccagattggttggaagaagttggtgaaggtcttcgcgagtttttgggccttgaagcgggcccaccgaaaccaaaacccaatcagcagcatcaagatcaagcccgtggtcttgtgctgcctggttataactatctcggacccggaaacggtctcgatcgaggagagcctgtcaacagggcagacgaggtcgcgcgagagcacgacatctcgtacaacgagcagcttgaggcgggagacaacccctacctcaagtacaaccacgcggacgccgagtttcaggagaagctcgccgacgacacatccttcgggggaaacctcggaaaggcagtctttcaggccaagaaaagggttctcgaaccttttggcctggttgaagagggtgctaagacggcccctaccggaaagcggatagacgaccactttccaaaaagaaagaaggctcggaccgaagaggactccaagccttccacctcgtcagacgccgaagctggacccagcggatcccagcagctgcaaatcccagcccaaccagcctcaagtttgggagctgatacaatgtctgcgggaggtggcggcccattgggcgacaataaccaaggtgccgatggagtgggcaatgcctcgggagattggcattgcgattccacgtggatgggggacagagtcgtcaccaagtccacccgaacctgggtgctgcccagctacaacaaccaccagtaccgagagatcaaaagcggctccgtcgacggaagcaacgccaacgcctactttggatacagcaccccctgggggtactttgactttaaccgcttccacagccactggagcccccgagactggcaaagactcatcaacaactactggggcttcagaccccggtccctcagagtcaaaatcttcaacattcaagtcaaagaggtcacggtgcaggactccaccaccaccatcgccaacaacctcacctccaccgtccaagtgtttacggacgacgactaccagctgccctacgtcgtcggcaacgggaccgagggatgcctgccggccttccctccgcaggtctttacgctgccgcagtacggttacgcgacgctgaaccgcgacaacacagaaaatcccaccgagaggagcagcttcttctgcctagagtactttcccagcaagatgctgagaacgggcaacaactttgagtttacctacaactttgaggaggtgcccttccactccagcttcgctcccagtcagaacctgttcaagctggccaacccgctggtggaccagtacttgtaccgcttcgtgagcacaaataacactggcggagtccagttcaacaagaacctggccgggagatacgccaacacctacaaaaactggttcccggggcccatgggccgaacccagggctggaacctgggctccggggtcaaccgcgccagtgtcagcgccttcgccacgaccaataggatggagctcgagggcgcgagttaccaggtgcccccgcagccgaacggcatgaccaacaacctccagggcagcaacacctatgccctggagaacactatgatcttcaacagccagccggcgaacccgggcaccaccgccacgtacctcgagggcaacatgctcatcaccagcgagagcgagacgcagccggtgaaccgcgtggcgtacaacgtcggcgggcagatggccaccaacaaccagagctccaccactgcccccgcgaccggcacgtacaacctccaggaaatcgtgcccggcagcgtgtggatggagagggacgtgtacctccaaggacccatctgggccaagatcccagagacgggggcgcactttcacccctctccggccatgggcggattcggactcaaacacccaccgcccatgatgctcatcaagaacacgcctgtgcccggaaatatcaccagcttctcggacgtgcccgtcagcagcttcatcacccagtacagcaccgggcaggtcaccgtggagatggagtgggagctcaagaaggaaaactccaagaggtggaacccagagatccagtacacaaacaactacaacgacccccagtttgtggactttgccccggacagcaccggggaatacagaaccaccagacctatcggaacccgataccttacccgacccctttaa

SEQ ID NO: 95 - DNA, 2208 bp, Adeno-associated virus
atggctgccgatggttatcttccagattggctcgaggacaacctctctgagggcattcgcgagtggtgggacttgaaacctggagccccgaaacccaaagccaaccagcaaaagcaggacgacggccggggtctggtgcttcctggctacaagtacctcggacccttcaacggactcgacaagggggagcccgtcaacgcggcggatgcagcggccctcgagcacgacaaggcctacgaccagcagctcaaagcgggtgacaatccgtacctgcggtataaccacgccgacgccgagtttcaggagcgtctgcaagaagatacgtcttttgggggcaacctcgggcgagcagtcttccaggccaagaagagggttctcgaaccttttggtctggttgaggaaggtgctaagacggctcctggaaagaaacgtccggtagagcagtcgccacaagagccagactcctcctcgggcattggcaagacaggccagcagcccgctaaaaagagactcaattttggtcagactggcgactcagagtcagtccccgacccacaacctctcggagaacctccagcaacccccgctgctgtgggacctactacaatggcttcaggcggtggcgcaccaatggcagacaataacgaaggcgccgacggagtgggtaatgcctcaggaaattggcattgcgattccacatggctgggcgacagagtcatcaccaccagcacccgaacatgggccttgcccacctataacaaccacctctacaagcaaatctccagtgcttcaacgggggccagcaacgacaaccactacttcggctacagcaccccctgggggtattttgatttcaacagattccactgccatttctcaccacgtgactggcagcgactcatcaacaacaattggggattccggcccaagagactcaacttcaagctcttcaacatccaagtcaaggaggtcacgacgaatgatggcgtcacgaccatcgctaataaccttaccagcacggttcaagtcttctcggactcggagtaccagttgccgtacgtcctcggctctgcgcaccagggctgcctccctccgttcccggcggacgtgttcatgattccgcagtacggctacctaacgctcaacaatggcagccaggcagtgggacggtcatccttttactgcctggaatatttcccatcgcagatgctgagaacgggcaataactttaccttcagctacaccttcgaggacgtgcctttccacagcagctacgcgcacagccagagcctggaccggctgatgaatcctctcatcgaccagtacctgtattacctgaacagaactcagaatcagtccggaagtgcccaaaacaaggacttgctgtttagccgggggtctccagctggcatgtctgttcagcccaaaaactggctacctggaccctgttaccggcagcagcgcgtttctaaaacaaaaacagacaacaacaacagcaactttacctggactggtgcttcaaaatataaccttaatgggcgtgaatctataatcaaccctggcactgctatggcctcacacaaagacgacaaagacaagttctttcccatgagcggtgtcatgatttttggaaaggagagcgccggagcttcaaacactgcattggacaatgtcatgatcacagacgaagaggaaatcaaagccactaaccccgtggccaccgaaagatttgggactgtggcagtcaatctccagagcagcagcacagaccctgcgaccggagatgtgcatgttatgggagccttacctggaatggtgtggcaagacagagacgtatacctgcagggtcctatttgggccaaaattcctcacacggatggacactttcacccgtctcctctcatgggcggctttggacttaagcacccgcctcctcagatcctcatcaaaaacacgcctgttcctgcgaatcctccggcagagttttcggctacaaagtttgcttcattcatcacccagtattccacaggacaagtgagcgtggagattgaatgggagctgcagaaagaaaacagcaaacgctggaatcccgaagtgcagtatacatctaactatgcaaaatctgccaacgttgatttcactgtggacaacaatggactttatactgagcctcgccccattggcacccgttacctcacccgtcccctg

SEQ ID NO: 96 - protein, 736 aa, Adeno-associated virus 6
MAADGYLPDWLEDNLSEGIREWWDLKPGAPKPKANQQKQDDGRGLVLPGYKYLGPFNGLDKGEPVNAADAAALEHDKAYDQQLKAGDNPYLRYNHADAEFQERLQEDTSFGGNLGRAVFQAKKRVLEPFGLVEEGAKTAPGKKRPVEQSPQEPDSSSGIGKTGQQPAKKRLNFGQTGDSESVPDPQPLGEPPATPAAVGPTTMASGGGAPMADNNEGADGVGNASGNWHCDSTWLGDRVITTSTRTWALPTYNNHLYKQISSASTGASNDNHYFGYSTPWGYFDFNRFHCHFSPRDWQRLINNNWGFRPKRLNFKLFNIQVKEVTTNDGVTTIANNLTSTVQVFSDSEYQLPYVLGSAHQGCLPPFPADVFMIPQYGYLTLNNGSQAVGRSSFYCLEYFPSQMLRTGNNFTFSYTFEDVPFHSSYAHSQSLDRLMNPLIDQYLYYLNRTQNQSGSAQNKDLLFSRGSPAGMSVQPKNWLPGPCYRQQRVSKTKTDNNNSNFTWTGASKYNLNGRESIINPGTAMASHKDDKDKFFPMSGVMIFGKESAGASNTALDNVMITDEEEIKATNPVATERFGTVAVNLQSSSTDPATGDVHVMGALPGMVWQDRDVYLQGPIWAKIPHTDGHFHPSPLMGGFGLKHPPPQILIKNTPVPANPPAEFSATKFASFITQYSTGQVSVEIEWELQKENSKRWNPEVQYTSNYAKSANVDFTVDNNGLYTEPRPIGTRYLTRPL

SEQ ID NO: 97 - protein, 623 aa, Adeno-associated virus 6
MPGFYEIVIKVPSDLDEHLPGISDSFVNWVAEKEWELPPDSDMDLNLIEQAPLTVAEKLQRDFLVQWRRVSKAPEALFFVQFEKGESYFHLHILVETTGVKSMVLGRFLSQIRDKLVQTIYRGIEPTLPNWFAVTKTRNGAGGGNKVVDECYIPNYLLPKTQPELQWAWTNMEEYISACLNLAERKRLVAHDLTHVSQTQEQNKENLNPNSDAPVIRSKTSARYMELVGWLVDRGITSEKQWIQEDQASYISFNAASNSRSQIKAALDNAGKIMALTKSAPDYLVGPAPPADIKTNRIYRILELNGYDPAYAGSVFLGWAQKRFGKRNTIWLFGPATTGKTNIAEAIAHAVPFYGCVNWTNENFPFNDCVDKMVIWWEEGKMTAKVVESAKAILGGSKVRVDQKCKSSAQIDPTPVIVTSNTNMCAVIDGNSTTFEHQQPLQDRMFKFELTRRLEHDFGKVTKQEVKEFFRWAQDHVTEVAHEFYVRKGGANKRPAPDDADKSEPKRACPSVADPSTSDAEGAPVDFADRYQNKCSRHAGMLQMLFPCKTCERMNQNFNICFTHGTRDCSECFPGVSESQPVVRKRTYRKLCAIHHLLGRAPEIACSACDLVNVDLDDCVSEQ

SEQ ID NO: 98 - DNA, 4683 bp, Adeno-associated virus 6
ttggccactccctctctgcgcgctcgctcgctcactgaggccgggcgaccaaaggtcgcccgacgcccgggctttgcccgggcggcctcagtgagcgagcgagcgcgcagagagggagtggccaactccatcactaggggttcctggaggggtggagtcgtgacgtgaattacgtcatagggttagggaggtcctgtattagaggtcacgtgagtgttttgcgacattttgcgacaccatgtggtcacgctgggtatttaagcccgagtgagcacgcagggtctccattttgaagcgggaggtttgaacgcgcagcgccatgccggggttttacgagattgtgattaaggtccccagcgaccttgacgagcatctgcccggcatttctgacagctttgtgaactgggtggccgagaaggaatgggagttgccgccagattctgacatggatctgaatctgattgagcaggcacccctgaccgtggccgagaagctgcagcgcgacttcctggtccagtggcgccgcgtgagtaaggccccggaggccctcttctttgttcagttcgagaagggcgagtcctacttccacctccatattctggtggagaccacgggggtcaaatccatggtgctgggccgcttcctgagtcagattagggacaagctggtgcagaccatctaccgcgggatcgagccgaccctgcccaactggttcgcggtgaccaagacgcgtaatggcgccggaggggggaacaaggtggtggacgagtgctacatccccaactacctcctgcccaagactcagcccgagctgcagtgggcgtggactaacatggaggagtatataagcgcgtgtttaaacctggccgagcgcaaacggctcgtggcgcacgacctgacccacgtcagccagacccaggagcagaacaaggagaatctgaaccccaattctgacgcgcctgtcatccggtcaaaaacctccgcacgctacatggagctggtcgggtggctggtggaccggggcatcacctccgagaagcagtggatccaggaggaccaggcctcgtacatctccttcaacgccgcctccaactcgcggtcccagatcaaggccgctctggacaatgccggcaagatcatggcgctgaccaaatccgcgcccgactacctggtaggccccgctccgcccgccgacattaaaaccaaccgcatttaccgcatcctggagctgaacggctacgaccctgcctacgccggctccgtctttctcggctgggcccagaaaaggttcggaaaacgcaacaccatctggctgtttgggccggccaccacgggcaagaccaacatcgcggaagccatcgcccacgccgtgcccttctacggctgcgtcaactggaccaatgagaactttcccttcaacgattgcgtcgacaagatggtgatctggtgggaggagggcaagatgacggccaaggtcgtggagtccgccaaggccattctcggcggcagcaaggtgcgcgtggaccaaaagtgcaagtcgtccgcccagatcgatcccacccccgtgatcgtcacctccaacaccaacatgtgcgccgtgattgacgggaacagcaccaccttcgagcaccagcagccgttgcaggaccggatgttcaaatttgaactcacccgccgtctggagcatgactttggcaaggtgacaaagcaggaagtcaaagagttcttccgctgggcgcaggatcacgtgaccgaggtggcgcatgagttctacgtcagaaagggtggagccaacaagagacccgcccccgatgacgcggataaaagcgagcccaagcgggcctgcccctcagtcgcggatccatcgacgtcagacgcggaaggagctccggtggactttgccgacaggtaccaaaacaaatgttctcgtcacgcgggcatgcttcagatgctgtttccctgcaaaacatgcgagagaatgaatcagaatttcaacatttgcttcacgcacgggaccagagactgttcagaatgtttccccggcgtgtcagaatctcaaccggtcgtcagaaagaggacgtatcggaaactctgtgccattcatcatctgctggggcgggctcccgagattgcttgctcggcctgcgatctggtcaacgtggatctggatgactgtgtttctgagcaataaatgacttaaaccaggtatggctgccgatggttatcttccagattggctcgaggacaacctctctgagggcattcgcgagtggtgggacttgaaacctggagccccgaaacccaaagccaaccagcaaaagcaggacgacggccggggtctggtgcttcctggctacaagtacctcggacccttcaacggactcgacaagggggagcccgtcaacgcggcggatgcagcggccctcgagcacgacaaggcctacgaccagcagctcaaagcgggtgacaatccgtacctgcggtataaccacgccgacgccgagtttcaggagcgtctgcaagaagatacgtcttttgggggcaacctcgggcgagcagtcttccaggccaagaagagggttctcgaaccttttggtctggttgaggaaggtgctaagacggctcctggaaagaaacgtccggtagagcagtcgccacaagagccagactcctcctcgggcattggcaagacaggccagcagcccgctaaaaagagactcaattttggtcagactggcgactcagagtcagtccccgacccacaacctctcggagaacctccagcaacccccgctgctgtgggacctactacaatggcttcaggcggtggcgcaccaatggcagacaataacgaaggcgccgacggagtgggtaatgcctcaggaaattggcattgcgattccacatggctgggcgacagagtcatcaccaccagcacccgaacatgggccttgcccacctataacaaccacctctacaagcaaatctccagtgcttcaacgggggccagcaacgacaaccactacttcggctacagcaccccctgggggtattttgatttcaacagattccactgccatttctcaccacgtgactggcagcgactcatcaacaacaattggggattccggcccaagagactcaacttcaagctcttcaacatccaagtcaaggaggtcacgacgaatgatggcgtcacgaccatcgctaataaccttaccagcacggttcaagtcttctcggactcggagtaccagttgccgtacgtcctcggctctgcgcaccagggctgcctccctccgttcccggcggacgtgttcatgattccgcagtacggctacctaacgctcaacaatggcagccaggcagtgggacggtcatccttttactgcctggaatatttcccatcgcagatgctgagaacgggcaataactttaccttcagctacaccttcgaggacgtgcctttccacagcagctacgcgcacagccagagcctggaccggctgatgaatcctctcatcgaccagtacctgtattacctgaacagaactcagaatcagtccggaagtgcccaaaacaaggacttgctgtttagccgggggtctccagctggcatgtctgttcagcccaaaaactggctacctggaccctgttaccggcagcagcgcgtttctaaaacaaaaacagacaacaacaacagcaactttacctggactggtgcttcaaaatataaccttaatgggcgtgaatctataatcaaccctggcactgctatggcctcacacaaagacgacaaagacaagttctttcccatgagcggtgtcatgatttttggaaaggagagcgccggagcttcaaacactgcattggacaatgtcatgatcacagacgaagaggaaatcaaagccactaaccccgtggccaccgaaagatttgggactgtggcagtcaatctccagagcagcagcacagaccctgcgaccggagatgtgcatgttatgggagccttacctggaatggtgtggcaagacagagacgtatacctgcagggtcctatttgggccaaaattcctcacacggatggacactttcacccgtctcctctcatgggcggctttggacttaagcacccgcctcctcagatcctcatcaaaaacacgcctgttcctgcgaatcctccggcagagttttcggctacaaagtttgcttcattcatcacccagtattccacaggacaagtgagcgtggagattgaatgggagctgcagaaagaaaacagcaaacgctggaatcccgaagtgcagtatacatctaactatgcaaaatctgccaacgttgatttcactgtggacaacaatggactttatactgagcctcgccccattggcacccgttacctcacccgtcccctgtaattgtgtgttaatcaataaaccggttaattcgtgtcagttgaactttggtctcatgtcgttattatcttatctggtcaccatagcaaccggttacacattaactgcttagttgcgcttcgcgaatacccctagtgatggagttgcccactccctctatgcgcgctcgctcgctcggtggggccggcagagcagagctctgccgtctgcggacctttggtccgcaggccccaccgagcgagcgagcgcgcatagagggagtgggcaa

SEQ ID NO: 99 - DNA, 2211 bp, Adeno-associated virus
atggctgccgatggttatcttccagattggctcgaggacaacctctctgagggcattcgcgagtggtgggacttgaaacctggagccccgaaacccaaagccaaccagcaaaagcaggacgacggccggggtctggtgcttcctggctacaagtacctcggacccttcaacggactcgacaagggggagcccgtcaacgcggcggatgcagcggccctcgagcacgacaaggcctacgaccagcagctcaaagcgggtgacaatccgtacctgcggtataaccacgccgacgccgagtttcaggagcgtctgcaagaagatacgtcttttgggggcaacctcgggcgagcagtcttccaggccaagaagagggttctcgaaccttttggtctggttgaggaaggtgctaagacggctcctggaaagaaacgtccggtagagcagtcgccacaagagccagactcctcctcgggcattggcaagacaggccagcagcccgctaaaaagagactcaattttggtcagactggcgactcagagtcagtccccgacccacaacctctcggagaacctccagcaacccccgctgctgtgggacctactacaatggcttcaggcggtggcgcaccaatggcagacaataacgaaggcgccgacggagtgggtaatgcctcaggaaattggcattgcgattccacatggctgggcgacagagtcatcaccaccagcacccgaacatgggccttgcccacctataacaaccacctctacaagcaaatctccagtgcttcaacgggggccagcaacgacaaccactacttcggctacagcaccccctgggggtattttgatttcaacagattccactgccatttctcaccacgtgactggcagcgactcatcaacaacaattggggattccggcccaagagactcaacttcaagctcttcaacatccaagtcaaggaggtcacgacgaatgatggcgtcacgaccatcgctaataaccttaccagcacggttcaagtcttctcggactcggagtaccagttgccgtacgtcctcggctctgcgcaccagggctgcctccctccgttcccggcggacgtgttcatgattccgcagtacggctacctaacgctcaacaatggcagccaggcagtgggacggtcatccttttactgcctggaatatttcccatcgcagatgctgagaacgggcaataactttaccttcagctacaccttcgaggacgtgcctttccacagcagctacgcgcacagccagagcctggaccggctgatgaatcctctcatcgaccagtacctgtattacctgaacagaactcagaatcagtccggaagtgcccaaaacaaggacttgctgtttagccgggggtctccagctggcatgtctgttcagcccaaaaactggctacctggaccctgttaccggcagcagcgcgtttctaaaacaaaaacagacaacaacaacagcaactttacctggactggtgcttcaaaatataaccttaatgggcgtgaatctataatcaaccctggcactgctatggcctcacacaaagacgacaaagacaagttctttcccatgagcggtgtcatgatttttggaaaggagagcgccggagcttcaaacactgcattggacaatgtcatgatcacagacgaagaggaaatcaaagccactaaccccgtggccaccgaaagatttgggactgtggcagtcaatctccagagcagcagcacagaccctgcgaccggagatgtgcatgttatgggagccttacctggaatggtgtggcaagacagagacgtatacctgcagggtcctatttgggccaaaattcctcacacggatggacactttcacccgtctcctctcatgggcggctttggacttaagcacccgcctcctcagatcctcatcaaaaacacgcctgttcctgcgaatcctccggcagagttttcggctacaaagtttgcttcattcatcacccagtattccacaggacaagtgagcgtggagattgaatgggagctgcagaaagaaaacagcaaacgctggaatcccgaagtgcagtatacatctaactatgcaaaatctgccaacgttgatttcactgtggacaacaatggactttatactgagcctcgccccattggcacccgttacctcacccgtcccctgtaa

SEQ ID NO: 100 - protein, 736 aa, Adeno-associated virus; identical to SEQ ID NO: 96

SEQ ID NO: 101 - protein, 736 aa, Adeno-associated virus
MAADGYLPDWLEDNLSEGIREWWDLKPGAPKPKANQQKQDDGRGLVLPGYKYLGPFNGLDKGEPVNAADAAALEHDKAYDQQLKAGDNPYLRYNHADAEFQERLQEDTSFGGNLGRAVFQAKKRVLEPFGLVEEGAKTAPGKKRPVEQSPQEPDSSSGIGKTGQQPAKKRLNFGQTGDSESVPDPQPLGEPPATPAAVGPTTMASGGGAPMADNNEGADGVGNASGNWHCDSTWLGDRVITTSTRTWALPTYNNHLYKQISSASTGASNDNHYFGYSTPWGYFDFNRFHCHFSPRDWQRLINNNWGFRPKRLNFKLFNIQVKEVTTNDGVTTIANNLTSTVQVFSDSEYQLPYVLGSAHQGCLPPFPADVFMIPQYGYLTLNNGSQAVGRSSFYCLEYFPSQMLRTGNNFTFSYTFEDVPFHSSYAHSQSLDRLMNPLIDQYLYYLNRTQNQSGSAQNKDLLFSRGSPAGMSVQPKNWLPGPCYRQQRVSKTKTDNNNSNFTWTGASKYNLNGRESIINPGTAMASHKDDEDKFFPMSGVMIFGKESAGASNTALDNVMITDEEEIKATNPVATERFGTVAVNLQSSSTDPATGDVHVMGALPGMVWQDRDVYLQGPIWAKIPHTDGHFHPSPLMGGFGLKHPPPQILIKNTPVPANPPAEFSATKFASFITQYSTGQVSVEIEWELQKENSKRWNPEVQYTSNYAKSANVDFTVDNNGLYTEPRPIGTRYLTRPL

SEQ ID NO: 102 - protein, 736 aa, Adeno-associated virus
MAADGYLPDWLEDNLSEGIREWWDLKPGAPKPKANQQKQDDGRGLVLPGYKYLGPFNGLDKGEPVNAADAAALEHDKAYDQQLKAGDNPYLRYNHADAEFQERLQEDTSFGGNLGRAVFQAKKRVLEPLGLVEEGAKTAPGKKRPVEQSPQEPDSSSGIGKTGQQPAKKRLNFGQTGDSESVPDPQPLGEPPATPAAVGPTTMASGGGAPMADNNEGADGVGNASGNWHCDSTWLGDRVITTSTRTWALPTYNNHLYKQISSASTGASNDNHYFGYSTPWGYFDFNRFHCHFSPRDWQRLINNNWGFRPKRLNFKLFNIQVKEVTTNDGVTTIANNLTSTVQVFSDSEYQLPYVLGSAHQGCLPPFPADVFMIPQYGYLTLNNGSQAVGRSSFYCLEYFPSQMLRTGNNFTFSYTFEDVPFHSSYAHSQSLDRLMNPLIDQYLYYLNRTQNQSGSAQNKDLLFSRGSPAGMSVQPKNWLPGPCYRQQRVSKTKTDNNNSNFTWTGASKYNLNGRESIINPGTAMASHKDDEDKFFPMSGVMIFGKESAGASNTALDNVMITDEEEIKATNPVATERFGTVAVNLQSSSTDPATGDVHVMGALPGMVWQDRDVYLQGPIWAKIPHTDGHFHPSPLMGGFGLKHPPPQILIKNTPVPANPPAEFSATKFASFITQYSTGQVSVEIEWELQKENSKRWNPEVQYTSNYAKSANVDFTVDNNGLYTEPRPIGTRYLTRPL

SEQ ID NO: 103 - protein, 736 aa, Adeno-associated virus
MAADGYLPDWLEDNLSEGIREWWDLKPGAPKPKANQQKQDDGRGLVLPGYKYLGPFNGLDKGEPVNAADAAALEHDKAYDQQLKAGDNPYLRYNHADAEFQERLQEDTSFGGNLGRAVFQAKKRVLEPLGLVEEGAKTAPGKKRPVEQSPQEPDSSSGIGKTGQQPAKKRLNFGQTGDSESVPDPQPLGEPPATPAAVGPTTMASGGGAPMADNNEGADGVGNASGNWHCDSTWLGDRVITTSTRTWALPTYNNHLYKQISSASTGASNDNHYFGYSTPWGYFDFNRFHCHFSPRDWQRLINNNWGFRPKRLNFKLFNIQVKEVTTNDGVTTIANNLTSTVQVFSDSEYQLPYVLGSAHQGCLPPFPADVFMIPQYGYLTLNNGSQAVGRSSFYCLEYFPSQMLRTGNNFTFSYTFEDVPFHSSYAHSQSLDRLMNPLIDQYLYYLNRTQNQSGSAQNKDLLFSRGSPAGMSVQPKNWLPGPCYRQQRVSKTKTDNNNSNFTWTGASKYNLNGRESIINPGTAMASHKDDKDKFFPMSGVMIFGKESAGASNTALDNVMITDEEEIKATNPVATERFGTVAVNLQSSSTDPATGDVHVMGALPGMVWQDRDVYLQGPIWAKIPHTDGHFHPSPLMGGFGLKHPPPQILIKNTPVPANPPAEFSATKFASFITQYSTGQVSVEIEWELQKENSKRWNPEVQYTSNYAKSANVDFTVDNNGLYTEPRPIGTRYLTRPL

SEQ ID NO: 104 - DNA, 2214 bp, Adeno-associated virus
atggctgccgatggttatcttccagattggctcgaggacaacctctctgagggcattcgcgagtggtgggacctgaaacctggagccccgaaacccaaagccaaccagcaaaagcaggacaacggccggggtctggtgcttcctggctacaagtacctcggacccttcaacggactcgacaagggggagcccgtcaacgcggcggacgcagcggccctcgagcacgacaaggcctacgaccagcagctcaaagcgggtgacaatccgtacctgcggtataaccacgccgacgccgagtttcaggagcgtctgcaagaagatacgtcatttgggggcaacctcgggcgagcagtcttccaggccaagaagcgggttctcgaacctctcggtctggttgaggaaggcgctaagacggctcctgcaaagaagagaccggtagagccgtcacctcagcgttcccccgactcctccacgggcatcggcaagaaaggccagcagcccgccagaaagagactcaatttcggtcagactggcgactcagagtcagtccccgaccctcaacctctcggagaacctccagcagcgccctctagtgtgggatctggtacagtggctgcaggcggtggcgcaccaatggcagacaataacgaaggtgccgacggagtgggtaatgcctcaggaaattggcattgcgattccacatggctgggcgacagagtcattaccaccagcacccgaacctgggccctgcccacctacaacaaccacctctacaagcaaatctccagtgaaactgcaggtagtaccaacgacaacacctacttcggctacagcaccccctgggggtattttgactttaacagattccactgccacttctcaccacgtgactggcagcgactcatcaacaacaactggggattccggcccaagaagctgcggttcaagctcttcaacatccaggtcaaggaggtcacgacgaatgacggcgttacgaccatcgctaataaccttaccagcacgattcaggtattctcggactcggaataccagctgccgtacgtcctcggctctgcgcaccagggctgcctgcctccgttcccggcggacgtcttcatgattcctcagtacggctacctgactctcaacaatggcagtcagtctgtgggacgttcctccttctactgcctggagtacttcccctctcagatgctgagaacgggcaacaactttgagttcagctacagcttcgaggacgtgcctttccacagcagctacgcacacagccagagcctggaccggctgatgaatcccctcatcgaccagtacttgtactacctggccagaacacagagtaacccaggaggcacagctggcaatcgggaactgcagttttaccagggcgggccttcaactatggccgaacaagccaagaattggttacctggaccttgcttccggcaacaaagagtctccaaaacgctggatcaaaacaacaacagcaactttgcttggactggtgccaccaaatatcacctgaacggcagaaactcgttggttaatcccggcgtcgccatggcaactcacaaggacgacgaggaccgctttttcccatccagcggagtcctgatttttggaaaaactggagcaactaacaaaactacattggaaaatgtgttaatgacaaatgaagaagaaattcgtcctactaatcctgtagccacggaagaatacgggatagtcagcagcaacttacaagcggctaatactgcagcccagacacaagttgtcaacaaccagggagccttacctggcatggtctggcagaaccgggacgtgtacctgcagggtcccatctgggccaagattcctcacacggatggcaactttcacccgtctcctttgatgggcggctttggacttaaacatccgcctcctcagatcctgatcaagaacactcccgttcccgctaatcctccggaggtgtttactcctgccaagtttgcttcgttcatcacacagtacagcaccggacaagtcagcgtggaaatcgagtgggagctgcagaaggaaaacagcaagcgctggaacccggagattcagtacacctccaactttgaaaagcagactggtgtggactttgccgttgacagccagggtgtttactctgagcctcgccctattggcactcgttacctcacccgtaatctgtaa

SEQ ID NO: 105 - protein, 738 aa, Adeno-associated virus
MAADGYLPDWLEDNLSEGIREWWALKPGAPKPKANQQKQDDGRGLVLPGYKYLGPFNGLDKGEPVNAADAAALEHDKAYDQQLQAGDNPYLRYNHADAEFQERLQEDTSFGGNLGRAVFQAKKRVLEPLGLVEEGAKTAPGKKRPVEPSPQRSPDSSTGIGKKGQQPARKRLNFGQTGDSESVPDPQPLGEPPAAPSGVGPNTMAAGGGAPMADNNEGADGVGSSSGNWHCDSTWLGDRVITTSTRTWALPTYNNHLYKQISNGTSGGATNDNTYFGYSTPWGYFDFNRFHCHFSPRDWQRLINNNWGFRPKRLSFKLFNIQVKEVTQNEGTKTIANNLTSTIQVFTDSEYQLPYVLGSAHQGCLPPFPADVFMIPQYGYLTLNNGSQAVGRSSFYCLEYFPSQMLRTGNNFQFTYTFEDVPFHSSYAHSQSLDRLMNPLIDQYLYYLSRTQTTGGTANTQTLGFSQGGPNTMANQAKNWLPGPCYRQQRVSTTTGQNNNSNFAWTAGTKYHLNGRNSLANPGIAMATHKDDEERFFPSNGILIFGKQNAARDNADYSDVMLTSEEEIKTTNPVATEEYGIVADNLQQQNTAPQIGTVNSQGALPGMVWQNRDVYLQGPIWAKIPHTDGNFHPSPLMGGFGLKHPPPQILIKNTPVPADPPTTFNQSKLNSFITQYSTGQVSVEIEWELQKENSKRWNPEIQYTSNYYKSTSVDFAVNTEGVYSEPRPIGTRYLTRNL

SEQ ID NO: 106 - protein, 737 aa, Adeno-associated virus 7
MAADGYLPDWLEDNLSEGIREWWDLKPGAPKPKANQQKQDNGRGLVLPGYKYLGPFNGLDKGEPVNAADAAALEHDKAYDQQLKAGDNPYLRYNHADAEFQERLQEDTSFGGNLGRAVFQAKKRVLEPLGLVEEGAKTAPAKKRPVEPSPQRSPDSSTGIGKKGQQPARKRLNFGQTGDSESVPDPQPLGEPPAAPSSVGSGTVAAGGGAPMADNNEGADGVGNASGNWHCDSTWLGDRVITTSTRTWALPTYNNHLYKQISSETAGSTNDNTYFGYSTPWGYFDFNRFHCHFSPRDWQRLINNNWGFRPKKLRFKLFNIQVKEVTTNDGVTTIANNLTSTIQVFSDSEYQLPYVLGSAHQGCLPPFPADVFMIPQYGYLTLNNGSQSVGRSSFYCLEYFPSQMLRTGNNFEFSYSFEDVPFHSSYAHSQSLDRLMNPLIDQYLYYLARTQSNPGGTAGNRELQFYQGGPSTMAEQAKNWLPGPCFRQQRVSKTLDQNNNSNFAWTGATKYHLNGRNSLVNPGVAMATHKDDEDRFFPSSGVLIFGKTGATNKTTLENVLMTNEEEIRPTNPVATEEYGIVSSNLQAANTAAQTQVVNNQGALPGMVWQNRDVYLQGPIWAKIPHTDGNFHPSPLMGGFGLKHPPPQILIKNTPVPANPPEVFTPAKFASFITQYSTGQVSVEIEWELQKENSKRWNPEIQYTSNFEKQTGVDFAVDSQGVYSEPRPIGTRYLTRNL

SEQ ID NO: 107 - protein, 623 aa, Artificial Sequence
  Description of Artificial Sequence: Synthetic polypeptide
MPGFYEIVIKVPSDLDEHLPGISDSFVNWVAEKEWELPPDSDMDLNLIEQAPLTVAEKLQRDFLVQWRRVSKAPEALFFVQFEKGESYFHLHVLVETTGVKSMVLGRFLSQIREKLVQTIYRGVEPTLPNWFAVTKTRNGAGGGNKVVDECYIPNYLLPKTQPELQWAWTNMEEYISACLNLAERKRLVAQHLTHVSQTQEQNKENLNPNSDAPVIRSKTSARYMELVGWLVDRGITSEKQWIQEDQASYISFNAASNSRSQIKAALDNAGKIMALTKSAPDYLVGPSLPADIKTNRIYRILELNGYDPAYAGSVFLGWAQKKFGKRNTIWLFGPATTGKTNIAEAIAHAVPFYGCVNWTNENFPFNDCVDKMVIWWEEGKMTAKVVESAKAILGGSKVRVDQKCKSSAQIDPTPVIVTSNTNMCAVIDGNSTTFEHQQPLQDRMFKFELTRRLEHDFGKVTKQEVKEFFRWASDHVTEVAHEFYVRKGGASKRPAPDDADISEPKRACPSVADPSTSDAEGAPVDFADRYQNKCSRHAGMIQMLFPCKTCERMNQNFNICFTHGVRDCLECFPGVSESQPVVRKKTYRKLCAIHHLLGRAPEIACSACDLVNVDLDDCVSEQ

SEQ ID NO: 108 - DNA, 4721 bp, Adeno-associated virus 7
ttggccactccctctatgcgcgctcgctcgctcggtggggcctgcggaccaaaggtccgcagacggcagagctctgctctgccggccccaccgagcgagcgagcgcgcatagagggagtggccaactccatcactaggggtaccgcgaagcgcctcccacgctgccgcgtcagcgctgacgtaaatcacgtcataggggagtggtcctgtattagctgtcacgtgagtgcttttgcgacattttgcgacaccacgtggccatttgaggtatatatggccgagtgagcgagcaggatctccattttgaccgcgaaatttgaacgagcagcagccatgccgggtttctacgagatcgtgatcaaggtgccgagcgacctggacgagcacctgccgggcatttctgactcgtttgtgaactgggtggccgagaaggaatgggagctgcccccggattctgacatggatctgaatctgatcgagcaggcacccctgaccgtggccgagaagctgcagcgcgacttcctggtccaatggcgccgcgtgagtaaggccccggaggccctgttctttgttcagttcgagaagggcgagagctacttccaccttcacgttctggtggagaccacgggggtcaagtccatggtgctaggccgcttcctgagtcagattcgggagaagctggtccagaccatctaccgcggggtcgagcccacgctgcccaactggttcgcggtgaccaagacgcgtaatggcgccggcggggggaacaaggtggtggacgagtgctacatccccaactacctcctgcccaagacccagcccgagctgcagtgggcgtggactaacatggaggagtatataagcgcgtgtttgaacctggccgaacgcaaacggctcgtggcgcagcacctgacccacgtcagccagacgcaggagcagaacaaggagaatctgaaccccaattctgacgcgcccgtgatcaggtcaaaaacctccgcgcgctacatggagctggtcgggtggctggtggaccggggcatcacctccgagaagcagtggatccaggaggaccaggcctcgtacatctccttcaacgccgcctccaactcgcggtcccagatcaaggccgcgctggacaatgccggcaagatcatggcgctgaccaaatccgcgcccgactacctggtggggccctcgctgcccgcggacattaaaaccaaccgcatctaccgcatcctggagctgaacgggtacgatcctgcctacgccggctccgtctttctcggctgggcccagaaaaagttcgggaagcgcaacaccatctggctgtttgggcccgccaccaccggcaagaccaacattgcggaagccatcgcccacgccgtgcccttctacggctgcgtcaactggaccaatgagaactttcccttcaacgattgcgtcgacaagatggtgatctggtgggaggagggcaagatgacggccaaggtcgtggagtccgccaaggccattctcggcggcagcaaggtgcgcgtggaccaaaagtgcaagtcgtccgcccagatcgaccccacccccgtgatcgtcacctccaacaccaacatgtgcgccgtgattgacgggaacagcaccaccttcgagcaccagcagccgttgcaggaccggatgttcaaatttgaactcacccgccgtctggagcacgactttggcaaggtgacgaagcaggaagtcaaagagttcttccgctgggccagtgatcacgtgaccgaggtggcgcatgagttctacgtcagaaagggcggagccagcaaaagacccgcccccgatgacgcggatataagcgagcccaagcgggcctgcccctcagtcgcggatccatcgacgtcagacgcggaaggagctccggtggactttgccgacaggtaccaaaacaaatgttctcgtcacgcgggcatgattcagatgctgtttccctgcaaaacgtgcgagagaatgaatcagaatttcaacatttgcttcacacacggggtcagagactgtttagagtgtttccccggcgtgtcagaatctcaaccggtcgtcagaaaaaagacgtatcggaaactctgcgcgattcatcatctgctggggcgggcgcccgagattgcttgctcggcctgcgacctggtcaacgtggacctggacgactgcgtttctgagcaataaatgacttaaaccaggtatggctgccgatggttatcttccagattggctcgaggacaacctctctgagggcattcgcgagtggtgggacctgaaacctggagccccgaaacccaaagccaaccagcaaaagcaggacaacggccggggtctggtgcttcctggctacaagtacctcggacccttcaacggactcgacaagggggagcccgtcaacgcggcggacgcagcggccctcgagcacgacaaggcctacgaccagcagctcaaagcgggtgacaatccgtacctgcggtataaccacgccgacgccgagtttcaggagcgtctgcaagaagatacgtcatttgggggcaacctcgggcgagcagtcttccaggccaagaagcgggttctcgaacctctcggtctggttgaggaaggcgctaagacggctcctgcaaagaagagaccggtagagccgtcacctcagcgttcccccgactcctccacgggcatcggcaagaaaggccagcagcccgccagaaagagactcaatttcggtcagactggcgactcagagtcagtccccgaccctcaacctctcggagaacctccagcagcgccctctagtgtgggatctggtacagtggctgcaggcggtggcgcaccaatggcagacaataacgaaggtgccgacggagtgggtaatgcctcaggaaattggcattgcgattccacatggctgggcgacagagtcattaccaccagcacccgaacctgggccctgcccacctacaacaaccacctctacaagcaaatctccagtgaaactgcaggtagtaccaacgacaacacctacttcggctacagcaccccctgggggtattttgactttaacagattccactgccacttctcaccacgtgactggcagcgactcatcaacaacaactggggattccggcccaagaagctgcggttcaagctcttcaacatccaggtcaaggaggtcacgacgaatgacggcgttacgaccatcgctaataaccttaccagcacgattcaggtattctcggactcggaataccagctgccgtacgtcctcggctctgcgcaccagggctgcctgcctccgttcccggcggacgtcttcatgattcctcagtacggctacctgactctcaacaatggcagtcagtctgtgggacgttcctccttctactgcctggagtacttcccctctcagatgctgagaacgggcaacaactttgagttcagctacagcttcgaggacgtgcctttccacagcagctacgcacacagccagagcctggaccggctgatgaatcccctcatcgaccagtacttgtactacctggccagaacacagagtaacccaggaggcacagctggcaatcgggaactgcagttttaccagggcgggccttcaactatggccgaacaagccaagaattggttacctggaccttgcttccggcaacaaagagtctccaaaacgctggatcaaaacaacaacagcaactttgcttggactggtgccaccaaatatcacctgaacggcagaaactcgttggttaatcccggcgtcgccatggcaactcacaaggacgacgaggaccgctttttcccatccagcggagtcctgatttttggaaaaactggagcaactaacaaaactacattggaaaatgtgttaatgacaaatgaagaagaaattcgtcctactaatcctgtagccacggaagaatacgggatagtcagcagcaacttacaagcggctaatactgcagcccagacacaagttgtcaacaaccagggagccttacctggcatggtctggcagaaccgggacgtgtacctgcagggtcccatctgggccaagattcctcacacggatggcaactttcacccgtctcctttgatgggcggctttggacttaaacatccgcctcctcagatcctgatcaagaacactcccgttcccgctaatcctccggaggtgtttactcctgccaagtttgcttcgttcatcacacagtacagcaccggacaagtcagcgtggaaatcgagtgggagctgcagaaggaaaacagcaagcgctggaacccggagattcagtacacctccaactttgaaaagcagactggtgtggactttgccgttgacagccagggtgtttactctgagcctcgccctattggcactcgttacctcacccgtaatctgtaattgcatgttaatcaataaaccggttgattcgtttcagttgaactttggtctcctgtgcttcttatcttatcggtttccatagcaactggttacacattaactgcttgggtgcgcttcacgataagaacactgacgtcaccgcggtacccctagtgatggagttggccactccctctatgcgcgctcgctcgctcggtggggcctgcggaccaaaggtccgcagacggcagagctctgctctgccggccccaccgagcgagcgagcgcgcatagagggagtggccaa

SEQ ID NO: 109 - DNA, 2214 bp, Adeno-associated virus; identical to SEQ ID NO: 104

SEQ ID NO: 110 - protein, 737 aa, Adeno-associated virus; identical to SEQ ID NO: 106

SEQ ID NO: 111 - DNA, 2217 bp, Adeno-associated virus
atggctgccgatggttatcttccagattggctcgaggacaacctctctgagggcattcgcgagtggtgggcgctgaaacctggagccccgaagcccaaagccaaccagcaaaagcaggacgacggccggggtctggtgcttcctggctacaagtacctcggacccttcaacggactcgacaagggggagcccgtcaacgcggcggacgcagcggccctcgagcacgacaaggcctacgaccagcagctgcaggcgggtgacaatccgtacctgcggtataaccacgccgacgccgagtttcaggagcgtctgcaagaagatacgtcttttgggggcaacctcgggcgagcagtcttccaggccaagaagcgggttctcgaacctctcggtctggttgaggaaggcgctaagacggctcctggaaagaagagaccggtagagccatcaccccagcgttctccagactcctctacgggcatcggcaagaaaggccaacagcccgccagaaaaagactcaattttggtcagactggcgactcagagtcagttccagaccctcaacctctcggagaacctccagcagcgccctctggtgtgggacctaatacaatggctgcaggcggtggcgcaccaatggcagacaataacgaaggcgccgacggagtgggtagttcctcgggaaattggcattgcgattccacatggctgggcgacagagtcatcaccaccagcacccgaacctgggccctgcccacctacaacaaccacctctacaagcaaatctccaacgggacatcgggaggagccaccaacgacaacacctacttcggctacagcaccccctgggggtattttgactttaacagattccactgccacttttcaccacgtgactggcagcgactcatcaacaacaactggggattccggcccaagagactcagcttcaagctcttcaacatccaggtcaaggaggtcacgcagaatgaaggcaccaagaccatcgccaataacctcaccagcaccatccaggtgtttacggactcggagtaccagctgccgtacgttctcggctctgcccaccagggctgcctgcctccgttcccggcggacgtgttcatgattccccagtacggctacctaacactcaacaacggtagtcaggccgtgggacgctcctccttctactgcctggaatactttccttcgcagatgctgagaaccggcaacaacttccagtttacttacaccttcgaggacgtgcctttccacagcagctacgcccacagccagagcttggaccggctgatgaatcctctgattgaccagtacctgtactacttgtctcggactcaaacaacaggaggcacggcaaatacgcagactctgggcttcagccaaggtgggcctaatacaatggccaatcaggcaaagaactggctgccaggaccctgttaccgccaacaacgcgtctcaacgacaaccgggcaaaacaacaatagcaactttgcctggactgctgggaccaaataccatctgaatggaagaaattcattggctaatcctggcatcgctatggcaacacacaaagacgacgaggagcgtttttttcccagtaacgggatcctgatttttggcaaacaaaatgctgccagagacaatgcggattacagcgatgtcatgctcaccagcgaggaagaaatcaaaaccactaaccctgtggctacagaggaatacggtatcgtggcagataacttgcagcagcaaaacacggctcctcaaattggaactgtcaacagccagggggccttacccggtatggtctggcagaaccgggacgtgtacctgcagggtcccatctgggccaagattcctcacacggacggcaacttccacccgtctccgctgatgggcggctttggcctgaaacatcctccgcctcagatcctgatcaagaacacgcctgtacctgcggatcctccgaccaccttcaaccagtcaaagctgaactctttcatcacgcaatacagcaccggacaggtcagcgtggaaattgaatgggagctgcagaaggaaaacagcaagcgctggaaccccgagatccagtacacctccaactactacaaatctacaagtgtggactttgctgttaatacagaaggcgtgtactctgaaccccgccccattggcacccgttacctcacccgtaatctgtaa

SEQ ID NO: 112 - DNA, 2213 bp, Adeno-associated virus 8
atggctgccgatggttatcttccagattggctcgaggacaacctctctgagggcattcgcgagtggtgggcgctgaaacctggagccccgaagcccaaagccaaccagcaaaagcaggacgacggccggggtctggtgcttcctggctacaagtacctcggacccttcaacggactcgacaagggggagcccgtcaacgcggcggacgcagcggccctcgagcacgacaaggcctacgaccagcagctgcaggcgggtgacaatccgtacctgcggtataaccacgccgacgccgagtttcaggagcgtctgcaagaagatacgtcttttgggggcaacctcgggcgagcagtcttccaggccaagaagcgggttctcgaacctctcggtctggttgaggaaggcgctaagacggctcctggaaagaagagaccggtagagccatcaccccagcgttctccagactcctctacgggcatcggcaagaaaggccaacagcccgccagaaaaagactcaattttggtcagactggcgactcagagtcagttccagaccctcaacctctcggagaacctccagcagcgccctctggtgtgggacctaatacaatggctgcaggcggtggcgcaccaatggcagacaataacgaaggcgccgacggagtgggtagttcctcgggaaattggcattgcgattccacatggctgggcgacagagtcatcaccaccagcacccgaacctgggccctgcccacctacaacaaccacctctacaagcaaatctccaacgggacatcgggaggagccaccaacgacaacacctacttcggctacagcaccccctgggggtattttgactttaacagattccactgccacttttcaccacgtgactggcagcgactcatcaacaacaactggggattccggcccaagagactcagcttcaagctcttcaacatccaggtcaaggaggtcacgcagaatgaaggcaccaagaccatcgccaataacctcaccagcaccatccaggtgtttacggactcggagtaccagctgccgtacgttctcggctctgcccaccagggctgcctgcctccgttcccggcggacgtgttcatgattccccagtacggctacctaacactcaacaacggtagtcaggccgtgggacgctcctccttctactgcctggaatactttccttcgcagatgctgagaaccggcaacaacttccagtttacttacaccttcgaggacgtgcctttccacagcagctacgcccacagccagagcttggaccggctgatgaatcctctgattgaccagtacctgtactacttgtctcggactcaaacaacaggaggcacggcaaatacgcagactctgggcttcagccaaggtgggcctaatacaatggccaatcaggcaaagaactggctgccaggaccctgttaccgccaacaacgcgtctcaacgacaaccgggcaaaacaacaatagcaactttgcctggactgctgggaccaaataccatctgaatggaagaaattcattggctaatcctggcatcgctatggcaacacacaaagacgacgaggagcgtttttttcccagtaacgggatcctgatttttggcaaacaaaatgctgccagagacaatgcggattacagcgatgtcatgctcaccagcgaggaagaaatcaaaaccactaaccctgtggctacagaggaatacggtatcgtggcagataacttgcagcagcaaaacacggctcctcaaattggaactgtcaacagccagggggccttacccggtatggtctggcagaaccgggacgtgtacctgcagggtcccatctgggccaagattcctcacacggacggcaacttccacccgtctccgctgatgggcggctttggcctgaaacatcctccgcctcagatcctgatcaagaacacgcctgtacctgcggatcctccgaccaccttcaaccagtcaaagctgaactctttcatcacgcaatacagcaccggacaggtcagcgtggaaattgaatgggagctgcagaaggaaaacagcaagcgctggaaccccgagatccagtacacctccaactactacaaatctacaagtgtggactttgctgtaatacagaaggcgtgtactctgaaccccgccccattggcacccgttacctcacccgtaatctg

SEQ ID NO: 113 - DNA, 4393 bp, Adeno-associated virus 8
cagagagggagtggccaactccatcactaggggtagcgcgaagcgcctcccacgctgccgcgtcagcgctgacgtaaattacgtcataggggagtggtcctgtattagctgtcacgtgagtgcttttgcggcattttgcgacaccacgtggccatttgaggtatatatggccgagtgagcgagcaggatctccattttgaccgcgaaatttgaacgagcagcagccatgccgggcttctacgagatcgtgatcaaggtgccgagcgacctggacgagcacctgccgggcatttctgactcgtttgtgaactgggtggccgagaaggaatgggagctgcccccggattctgacatggatcggaatctgatcgagcaggcacccctgaccgtggccgagaagctgcagcgcgacttcctggtccaatggcgccgcgtgagtaaggccccggaggccctcttctttgttcagttcgagaagggcgagagctactttcacctgcacgttctggtcgagaccacgggggtcaagtccatggtgctaggccgcttcctgagtcagattcgggaaaagcttggtccagaccatctacccgcggggtcgagccccaccttgcccaactggttcgcggtgaccaaagacgcggtaatggcgccggcgggggggaacaaggtggtggacgagtgctacatccccaactacctcctgcccaagactcagcccgagctgcagtgggcgtggactaacatggaggagtatataagcgcgtgcttgaacctggccgagcgcaaacggctcgtggcgcagcacctgacccacgtcagccagacgcaggagcagaacaaggagaatctgaaccccaattctgacgcgcccgtgatcaggtcaaaaacctccgcgcgctatatggagctggtcgggtggctggtggaccggggcatcacctccgagaagcagtggatccaggaggaccaggcctcgtacatctccttcaacgccgcctccaactcgcggtcccagatcaaggccgcgctggacaatgccggcaagatcatggcgctgaccaaatccgcgcccgactacctggtggggccctcgctgcccgcggacattacccagaaccgcatctaccgcatcctcgctctcaacggctacgaccctgcctacgccggctccgtctttctcggctgggctcagaaaaagttcgggaaacgcaacaccatctggctgtttggacccgccaccaccggcaagaccaacattgcggaagccatcgcccacgccgtgcccttctacggctgcgtcaactggaccaatgagaactttcccttcaatgattgcgtcgacaagatggtgatctggtgggaggagggcaagatgacggccaaggtcgtggagtccgccaaggccattctcggcggcagcaaggtgcgcgtggaccaaaagtgcaagtcgtccgcccagatcgaccccacccccgtgatcgtcacctccaacaccaacatgtgcgccgtgattgacgggaacagcaccaccttcgagcaccagcagcctctccaggaccggatgtttaagttcgaactcacccgccgtctggagcacgactttggcaaggtgacaaagcaggaagtcaaagagttcttccgctgggccagtgatcacgtgaccgaggtggcgcatgagttttacgtcagaaagggcggagccagcaaaagacccgcccccgatgacgcggataaaagcgagcccaagcgggcctgcccctcagtcgcggatccatcgacgtcagacgcggaaggagctccggtggactttgccgacaggtaccaaaacaaatgttctcgtcacgcgggcatgcttcagatgctgtttccctgcaaaacgtgcgagagaatgaatcagaatttcaacatttgcttcacacacggggtcagagactgctcagagtgtttccccggcgtgtcagaatctcaaccggtcgtcagaaagaggacgtatcggaaactctgtgcgattcatcatctgctggggcgggctcccgagattgcttgctcggcctgcgatctggtcaacgtggacctggatgactgtgtttctgagcaataaatgacttaaaccaggtatggctgccgatggttatcttccagattggctcgaggacaacctctctgagggcattcgcgagtggtgggcgctgaaacctggagccccgaagcccaaagccaaccagcaaaagcaggacgacggccggggtctggtgcttcctggctacaagtacctcggacccttcaacggactcgacaagggggagcccgtcaacgcggcggacgcagcggccctcgagcacgacaaggcctacgaccagcagctgcaggcgggtgacaatccgtacctgcggtataaccacgccgacgccgagtttcaggagcgtctgcaagaagatacgtcttttgggggcaacctcgggcgagcagtcttccaggccaagaagcgggttctcgaacctctcggtctggttgaggaaggcgctaagacggctcctggaaagaagagaccggtagagccatcaccccagcgttctccagactcctctacgggcatcggcaagaaaggccaacagcccgccagaaaaagactcaattttggtcagactggcgactcagagtcagttccagaccctcaacctctcggagaacctccagcagcgccctctggtgtgggacctaatacaatggctgcaggcggtggcgcaccaatggcagacaataacgaaggcgccgacggagtgggtagttcctcgggaaattggcattgcgattccacatggctgggcgacagagtcatcaccaccagcacccgaacctgggccctgcccacctacaacaaccacctctacaagcaaatctccaacgggacatcgggaggagccaccaacgacaacacctacttcggctacagcaccccctgggggtattttgactttaacagattccactgccacttttcaccacgtgactggcagcgactcatcaacaacaactggggattccggcccaagagactcagcttcaagctcttcaacatccaggtcaaggaggtcacgcagaatgaaggcaccaagaccatcgccaataacctcaccagcaccatccaggtgtttacggactcggagtaccagctgccgtacgttctcggctctgcccaccagggctgcctgcctccgttcccggcggacgtgttcatgattccccagtacggctacctaacactcaacaacggtagtcaggccgtgggacgctcctccttctactgcctggaatactttccttcgcagatgctgagaaccggcaacaacttccagtttacttacaccttcgaggacgtgcctttccacagcagctacgcccacagccagagcttggaccggctgatgaatcctctgattgaccagtacctgtactacttgtctcggactcaaacaacaggaggcacggcaaatacgcagactctgggcttcagccaaggtgggcctaatacaatggccaatcaggcaaagaactggctgccaggaccctgttaccgccaacaacgcgtctcaacgacaaccgggcaaaacaacaatagcaactttgcctggactgctgggaccaaataccatctgaatggaagaaattcattggctaatcctggcatcgctatggcaacacacaaagacgacgaggagcgtttttttcccagtaacgggatcctgatttttggcaaacaaaatgctgccagagacaatgcggattacagcgatgtcatgctcaccagcgaggaagaaatcaaaaccactaaccctgtggctacagaggaatacggtatcgtggcagataacttgcagcagcaaaacacggctcctcaaattggaactgtcaacagccagggggccttacccggtatggtctggcagaaccgggacgtgtacctgcagggtcccatctgggccaagattcctcacacggacggcaacttccacccgtctccgctgatgggcggctttggcctgaaacatcctccgcctcagatcctgatcaagaacacgcctgtacctgcggatcctccgaccaccttcaaccagtcaaagctgaactctttcatcacgcaatacagcaccggacaggtcagcgtggaaattgaatgggagctgcagaaggaaaacagcaagcgctggaaccccgagatccagtacacctccaactactacaaatctacaagtgtggactttgctgttaatacagaaggcgtgtactctgaaccccgccccattggcacccgttacctcacccgtaatctgtaattgcctgttaatcaataaaccggttgattcgtttcagttgaactttggtctctgcg

SEQ ID NO: 114 - protein, 738 aa, Adeno-associated virus 8; identical to SEQ ID NO: 105

SEQ ID NO: 115 - protein, 737 aa, Adeno-associated virus 8
MAADGYLPDWLEDNLSEGIREWWALKPGAPKPKANQQKQDDGRGLVLPGYKYLGPFNGLDKGEPVNAADAAALEHDKAYDQQLQAGDNPYLRYNHADAEFQERLQEDTSFGGNLGRAVFQAKKRVLEPLGLVEEGAKTAPGKKRPVEPSPQRSPDSSTGIGKKGQQPARKRLNFGQTGDSESVPDPQPLGEPPAAPSGVGPNTMAAGGGAPMADNNEGADGVGSSSGNWHCDSTWLGDRVITTSTRTWALPTYNNHLYKQISNGTSGGATNDNTYFGYSTPWGYFDFNRFHCHFSPRDWQRLINNNWGFRPKRLSFKLFNIQVKEVTQNEGTKTIANNLTSTIQVFTDSEYQLPYVLGSAHQGCLPPFPADVFMIPQYGYLTLNNGSQAVGRSSFYCLEYFPSQMLRTGNNFQFTYTFEDVPFHSSYAHSQSLDRLMNPLIDQYLYYLSRTQTTGGTANTQTLGFSQGGPNTMANQAKNWLPGPCYRQQRVSTTTGQNNNSNFAWTAGTKYHLNGRNSLANPGIAMATHKDDEERFFPSNGILIFGKQNAARDNADYSDVMLTSEEEIKTTNPVATEEYGIVADNLQQQNTAPQIGTVNSQGALPGMVWQNRDVYLQGPIWAKIPHTDGNFHPSPLMGGFGLKHPPPQILIKNTPVPADPPTTFNQSKLNSFITQYSTGQVSVEIEWELQKENSKRWNPEIQYTSNYYKSTSVDFAVIQKACTLNPAPLAPVTSPVI

SEQ ID NO: 116 - DNA, 2217 bp, Adeno-associated virus; identical to SEQ ID NO: 111

SEQ ID NO: 117 - DNA, 2214 bp, Artificial Sequence
  Description of Artificial Sequence: Synthetic polynucleotide
atggctgccgatggttatcttccagattggctcgaggacaacctctctgagggcattcgcgagtggtgggcgctgaaacctggagccccgaagcccaaagccaaccagcaaaagcaggacgacggccggggtctggtgcttcctggctacaagtacctcggacccttcaacggactcgacaagggggagcccgtcaacgcggcggacgcagcggccctcgagcacgacaaggcctacgaccagcagctgcaggcgggtgacaatccgtacctgcggtataaccacgccgacgccgagtttcaggagcgtctgcaagaagatacgtcttttgggggcaacctcgggcgagcagtcttccaggccaagaagcgggttctcgaacctctcggtctggttgaggaaggcgctaagacggctcctggaaagaagagaccggtagagccatcaccccagcgttctccagactcctctacgggcatcggcaagaaaggccaacagcccgccagaaaaagactcaattttggtcagactggcgactcagagtcagttccagaccctcaacctctcggagaacctccagcagcgccctctggtgtgggacctaatacaatggctgcaggcggtggcgcaccaatggcagacaataacgaaggcgccgacggagtgggtagttcctcgggaaattggcattgcgattccacatggctgggcgacagagtcatcaccaccagcacccgaacctgggccctgcccacctacaacaaccacctctacaagcaaatctccaacgggacatcgggaggagccaccaacgacaacacctacttcggctacagcaccccctgggggtattttgactttaacagattccactgccacttttcaccacgtgactggcagcgactcatcaacaacaactggggattccggcccaagagactcagcttcaagctcttcaacatccaggtcaaggaggtcacgcagaatgaaggcaccaagaccatcgccaataacctcaccagcaccatccaggtgtttacggactcggagtaccagctgccgtacgttctcggctctgcccaccagggctgcctgcctccgttcccggcggacgtgttcatgattccccagtacggctacctaacactcaacaacggtagtcaggccgtgggacgctcctccttctactgcctggaatactttccttcgcagatgctgagaaccggcaacaacttccagtttacttacaccttcgaggacgtgcctttccacagcagctacgcccacagccagagcttggaccggctgatgaatcctctgattgaccagtacctgtactacttgtctcggactcaaacaacaggaggcacggcaaatacgcagactctgggcttcagccaaggtgggcctaatacaatggccaatcaggcaaagaactggctgccaggaccctgttaccgccaacaacgcgtctcaacgacaaccgggcaaaacaacaatagcaactttgcctggactgctgggaccaaataccatctgaatggaagaaattcattggctaatcctggcatcgctatggcaacacacaaagacgacgaggagcgtttttttcccagtaacgggatcctgatttttggcaaacaaaatgctgccagagacaatgcggattacagcgatgtcatgctcaccagcgaggaagaaatcaaaaccactaaccctgtggctacagaggaatacggtatcgtggcagataacttgcctgagcggacggcgatgagtcttccgggaactgtcaacagccagggggccttacccggtatggtctggcagaaccgggacgtgtacctgcagggtcccatctgggccaagattcctcacacggacggcaacttccacccgtctccgctgatgggcggctttggcctgaaacatcctccgcctcagatcctgatcaagaacacgcctgtacctgcggatcctccgaccaccttcaaccagtcaaagctgaactctttcatcacgcaatacagcaccggacaggtcagcgtggaaattgaatgggagctgcagaaggaaaacagcaagcgctggaaccccgagatccagtacacctccaactactacaaatctacaagtgtggactttgctgttaatacagaaggcgtgtactctgaaccccgccccattggcacccgttacctcacccgtaatctg

SEQ ID NO: 118 - protein, 738 aa, Artificial Sequence
  Description of Artificial Sequence: Synthetic polypeptide
MAADGYLPDWLEDNLSEGIREWWALKPGAPKPKANQQKQDDGRGLVLPGYKYLGPFNGLDKGEPVNAADAAALEHDKAYDQQLQAGDNPYLRYNHADAEFQERLQEDTSFGGNLGRAVFQAKKRVLEPLGLVEEGAKTAPGKKRPVEPSPQRSPDSSTGIGKKGQQPARKRLNFGQTGDSESVPDPQPLGEPPAAPSGVGPNTMAAGGGAPMADNNEGADGVGSSSGNWHCDSTWLGDRVITTSTRTWALPTYNNHLYKQISNGTSGGATNDNTYFGYSTPWGYFDFNRFHCHFSPRDWQRLINNNWGFRPKRLSFKLFNIQVKEVTQNEGTKTIANNLTSTIQVFTDSEYQLPYVLGSAHQGCLPPFPADVFMIPQYGYLTLNNGSQAVGRSSFYCLEYFPSQMLRTGNNFQFTYTFEDVPFHSSYAHSQSLDRLMNPLIDQYLYYLSRTQTTGGTANTQTLGFSQGGPNTMANQAKNWLPGPCYRQQRVSTTTGQNNNSNFAWTAGTKYHLNGRNSLANPGIAMATHKDDEERFFPSNGILIFGKQNAARDNADYSDVMLTSEEEIKTTNPVATEEYGIVADNLPERTAMSLPGTVNSQGALPGMVWQNRDVYLQGPIWAKIPHTDGNFHPSPLMGGFGLKHPPPQILIKNTPVPADPPTTFNQSKLNSFITQYSTGQVSVEIEWELQKENSKRWNPEIQYTSNYYKSTSVDFAVNTEGVYSEPRPIGTRYLTRNL

SEQ ID NO: 119 - DNA, 2214 bp, Artificial Sequence
  Description of Artificial Sequence: Synthetic polynucleotide
atggctgccgatggttatcttccagattggctcgaggacaacctctctgagggcattcgcgagtggtgggcgctgaaacctggagccccgaagcccaaagccaaccagcaaaagcaggacgacggccggggtctggtgcttcctggctacaagtacctcggacccttcaacggactcgacaagggggagcccgtcaacgcggcggacgcagcggccctcgagcacgacaaggcctacgaccagcagctgcaggcgggtgacaatccgtacctgcggtataaccacgccgacgccgagtttcaggagcgtctgcaagaagatacgtcttttgggggcaacctcgggcgagcagtcttccaggccaagaagcgggttctcgaacctctcggtctggttgaggaaggcgctaagacggctcctggaaagaagagaccggtagagccatcaccccagcgttctccagactcctctacgggcatcggcaagaaaggccaacagcccgccagaaaaagactcaattttggtcagactggcgactcagagtcagttccagaccctcaacctctcggagaacctccagcagcgccctctggtgtgggacctaatacaatggctgcaggcggtggcgcaccaatggcagacaataacgaaggcgccgacggagtgggtagttcctcgggaaattggcattgcgattccacatggctgggcgacagagtcatcaccaccagcacccgaacctgggccctgcccacctacaacaaccacctctacaagcaaatctccaacgggacatcgggaggagccaccaacgacaacacctacttcggctacagcaccccctgggggtattttgactttaacagattccactgccacttttcaccacgtgactggcagcgactcatcaacaacaactggggattccggcccaagagactcagcttcaagctcttcaacatccaggtcaaggaggtcacgcagaatgaaggcaccaagaccatcgccaataacctcaccagcaccatccaggtgtttacggactcggagtaccagctgccgtacgttctcggctctgcccaccagggctgcctgcctccgttcccggcggacgtgttcatgattccccagtacggctacctaacactcaacaacggtagtcaggccgtgggacgctcctccttctactgcctggaatactttccttcgcagatgctgagaaccggcaacaacttccagtttacttacaccttcgaggacgtgcctttccacagcagctacgcccacagccagagcttggaccggctgatgaatcctctgattgaccagtacctgtactacttgtctcggactcaaacaacaggaggcacggcaaatacgcagactctgggcttcagccaaggtgggcctaatacaatggccaatcaggcaaagaactggctgccaggaccctgttaccgccaacaacgcgtctcaacgacaaccgggcaaaacaacaatagcaactttgcctggactgctgggaccaaataccatctgaatggaagaaattcattggctaatcctggcatcgctatggcaacacacaaagacgacgaggagcgtttttttcccagtaacgggatcctgatttttggcaaacaaaatgctgccagagacaatgcggattacagcgatgtcatgctcaccagcgaggaagaaatcaaaaccactaaccctgtggctacagaggaatacggtatcgtggcagataacttgagttttagtcgtgcggttctttgtgatggaactgtcaacagccagggggccttacccggtatggtctggcagaaccgggacgtgtacctgcagggtcccatctgggccaagattcctcacacggacggcaacttccacccgtctccgctgatgggcggctttggcctgaaacatcctccgcctcagatcctgatcaagaacacgcctgtacctgcggatcctccgaccaccttcaaccagtcaaagctgaactctttcatcacgcaatacagcaccggacaggtcagcgtggaaattgaatgggagctgcagaaggaaaacagcaagcgctggaaccccgagatccagtacacctccaactactacaaatctacaagtgtggactttgctgttaatacagaaggcgtgtactctgaaccccgccccattggcacccgttacctcacccgtaatctg

SEQ ID NO: 120 - protein, 738 aa, Artificial Sequence
  Description of Artificial Sequence: Synthetic polypeptide
MAADGYLPDWLEDNLSEGIREWWALKPGAPKPKANQQKQDDGRGLVLPGYKYLGPFNGLDKGEPVNAADAAALEHDKAYDQQLQAGDNPYLRYNHADAEFQERLQEDTSFGGNLGRAVFQAKKRVLEPLGLVEEGAKTAPGKKRPVEPSPQRSPDSSTGIGKKGQQPARKRLNFGQTGDSESVPDPQPLGEPPAAPSGVGPNTMAAGGGAPMADNNEGADGVGSSSGNWHCDSTWLGDRVITTSTRTWALPTYNNHLYKQISNGTSGGATNDNTYFGYSTPWGYFDFNRFHCHFSPRDWQRLINNNWGFRPKRLSFKLFNIQVKEVTQNEGTKTIANNLTSTIQVFTDSEYQLPYVLGSAHQGCLPPFPADVFMIPQYGYLTLNNGSQAVGRSSFYCLEYFPSQMLRTGNNFQFTYTFEDVPFHSSYAHSQSLDRLMNPLIDQYLYYLSRTQTTGGTANTQTLGFSQGGPNTMANQAKNWLPGPCYRQQRVSTTTGQNNNSNFAWTAGTKYHLNGRNSLANPGIAMATHKDDEERFFPSNGILIFGKQNAARDNADYSDVMLTSEEEIKTTNPVATEEYGIVADNLSFSRAVLCDGTVNSQGALPGMVWQNRDVYLQGPIWAKIPHTDGNFHPSPLMGGFGLKHPPPQILIKNTPVPADPPTTFNQSKLNSFITQYSTGQVSVEIEWELQKENSKRWNPEIQYTSNYYKSTSVDFAVNTEGVYSEPRPIGTRYLTRNL

SEQ ID NO: 121 - DNA, 4385 bp, Adeno-associated virus 9
cagagagggagtggccaactccatcactaggggtaatcgcgaagcgcctcccacgctgccgcgtcagcgctgacgtagattacgtcataggggagtggtcctgtattagctgtcacgtgagtgcttttgcgacattttgcgacaccacatggccatttgaggtatatatggccgagtgagcgagcaggatctccattttgaccgcgaaatttgaacgagcagcagccatgccgggcttctacgagattgtgatcaaggtgccgagcgacctggacgagcacctgccgggcatttctgactcttttgtgaactgggtggccgagaaggaatgggagctgcccccggattctgacatggatcggaatctgatcgagcaggcacccctgaccgtggccgagaagctgcagcgcgacttcctggtccaatggcgccgcgtgagtaaggccccggaggccctcttctttgttcagttcgagaagggcgagagctactttcacctgcacgttctggtcgagaccacgggggtcaagtccatggtgctaggccgcttcctgagtcagattcgggagaagctggtccagaccatctaccgcgggatcgagccgaccctgcccaactggttcgcggtgaccaagacgcgtaatggcgccggcggggggaacaaggtggtggacgagtgctacatccccaactacctcctgcccaagactcagcccgagctgcagtgggcgtggactaacatggaggagtatataagcgcgtgcttgaacctggccgagcgcaaacggctcgtggcgcagcacctgacccacgtcagccagacgcaggagcagaacaaggagaatctgaaccccaattctgacgcgcccgtgatcaggtcaaaaacctccgcgcgctacatggagctggtcgggtggctggtggaccggggcatcacctccgagaagcagtggatccaggaggaccaggcctcgtacatctccttcaacgccgcctccaactcgcggtcccagatcaaggccgcgctggacaatgccggcaagatcatggcgctgaccaaatccgcgcccgactacctggtaggcccttcacttccggtggacattacgcagaaccgcatctaccgcatcctgcagctcaacggctacgaccctgcctacgccggctccgtctttctcggctgggcacaaaagaagttcgggaaacgcaacaccatctggctgtttgggccggccaccacgggaaagaccaacatcgcagaagccattgcccacgccgtgcccttctacggctgcgtcaactggaccaatgagaactttcccttcaacgattgcgtcgacaagatggtgatctggtgggaggagggcaagatgacggccaaggtcgtggagtccgccaaggccattctcggcggcagcaaggtgcgcgtggaccaaaagtgcaagtcgtccgcccagatcgaccccactcccgtgatcgtcacctccaacaccaacatgtgcgccgtgattgacgggaacagcaccaccttcgagcaccagcagcctctccaggaccggatgtttaagttcgaactcacccgccgtctggagcacgactttggcaaggtgacaaagcaggaagtcaaagagttcttccgctgggccagtgatcacgtgaccgaggtggcgcatgagttttacgtcagaaagggcggagccagcaaaagacccgcccccgatgacgcggataaaagcgagcccaagcgggcctgcccctcagtcgcggatccatcgacgtcagacgcggaaggagctccggtggactttgccgacaggtaccaaaacaaatgttctcgtcacgcgggcatgcttcagatgctgcttccctgcaaaacgtgcgagagaatgaatcagaatttcaacatttgcttcacacacggggtcagagactgctcagagtgtttccccggcgtgtcagaatctcaaccggtcgtcagaaagaggacgtatcggaaactctgtgcgattcatcatctgctggggcgggctcccgagattgcttgctcggcctgcgatctggtcaacgtggacctggatgactgtgtttctgagcaataaatgacttaaaccaggtatggctgccgatggttatcttccagattggctcgaggacaacctctctgagggcattcgcgagtggtgggcgctgaaacctggagccccgaagcccaaagccaaccagcaaaagcaggacgacggccggggtctggtgcttcctggctacaagtacctcggacccttcaacggactcgacaagggggagcccgtcaacgcggcggacgcagcggccctcgagcacggcaaggcctacgaccagcagctgcaggcgggtgacaatccgtacctgcggtataaccacgccgacgccgagtttcaggagcgtctgcaagaagatacgtcttttgggggcaacctcgggcgagcagtcttccaggccaagaagcgggttctcgaacctctcggtctggttgaggaaggcgctaagacggctcctggaaagaagagaccggtagagccatcaccccagcgttctccagactcctctacgggcatcggcaagaaaggccaacagcccgccagaaaaagactcaattttggtcagactggcgactcagagtcagttccagaccctcaacctctcggagaacctccagcagcgccctctggtgtgggacctaatacaatggctgcaggcggtggcgcaccaatggcagacaataacgaaggcgccgacggagtgggtaattcctcgggaaattggcattgcgattccacatggctgggggacagagtcatcaccaccagcacccgaacctgggcattgcccacctacaacaaccacctctacaagcaaatctccaatggaacatcgggaggaagcaccaacgacaacacctactttggctacagcaccccctgggggtattttgacttcaacagattccactgccacttctcaccacgtgactggcagcgactcatcaacaacaactggggattccggccaaagagactcaacttcaagctgttcaacatccaggtcaaggaggttacgacgaacgaaggcaccaagaccatcgccaataaccttaccagcaccgtccaggtctttacggactcggagtaccagctaccgtacgtcctaggctctgcccaccaaggatgcctgccaccgtttcctgcagacgtcttcatggttcctcagtacggctacctgacgctcaacaatggaagtcaagcgttaggacgttcttctttctactgtctggaatacttcccttctcagatgctgagaaccggcaacaactttcagttcagctacactttcgaggacgtgcctttccacagcagctacgcacacagccagagtctagatcgactgatgaaccccctcatcgaccagtacctatactacctggtcagaacacagacaactggaactgggggaactcaaactttggcattcagccaagcaggccctagctcaatggccaatcaggctagaaactgggtacccgggccttgctaccgtcagcagcgcgtctccacaaccaccaaccaaaataacaacagcaactttgcgtggacgggagctgctaaattcaagctgaacgggagagactcgctaatgaatcctggcgtggctatggcatcgcacaaagacgacgaggaccgcttctttccatcaagtggcgttctcatatttggcaagcaaggagccgggaacgatggagtcgactacagccaggtgctgattacagatgaggaagaaattaaagccaccaaccctgtagccacagaggaatacggagcagtggccatcaacaaccaggccgctaacacgcaggcgcaaactggacttgtgcataaccagggagttattcctggtatggtctggcagaaccgggacgtgtacctgcagggccctatttgggctaaaatacctcacacagatggcaactttcacccgtctcctctgatgggtggatttggactgaaacacccacctccacagattctaattaaaaatacaccagtgccggcagatcctcctcttaccttcaatcaagccaagctgaactctttcatcacgcagtacagcacgggacaagtcagcgtggaaatcgagtgggagctgcagaaagaaaacagcaagcgctggaatccagagatccagtatacttcaaactactacaaatctacaaatgtggactttgctgtcaataccaaaggtgtttactctgagcctcgccccattggtactcgttacctcacccgtaatttgtaattgcctgttaatcaataaaccggttaattcgtttcagttgaactttggtctctgcg

SEQ ID NO: 122 - DNA, 4382 bp, Adeno-associated virus 9
cagagagggagtggccaactccatcactaggggtaatcgcgaagcgcctcccacgctgccgcgtcagcgctgacgtagattacgtcataggggagtggtcctgtattagctgtcacgtgagtgcttttgcgacattttgcgacaccacatggccatttgaggtatatatggccgagtgagcgagcaggatctccattttgaccgcgaaatttgaacgagcagcagccatgccgggcttctacgagattgtgatcaaggtgccgagcgacctggacgagcacctgccgggcatttctgactcttttgtgaactgggtggccgagaaggaatgggagctgcccccggattctgacatggatcggaatctgatcgagcaggcacccctgaccgtggccgagaagctgtagcgcgacttcctggtccaatggcgccgcgtgagtaaggccccggaggccctcttctttgttcagttcgagaagggcgagagctactttcacctgcacgttctggtcgagaccacgggggtcaagtccatggtgctaggccgcttcctgagtcagattcgggagaagctggtccagaccatctaccgcgggatcgagccgaccctgcccaactggttcgcggtgaccaagacgcgtaatggcgccggcggggggaacaaggtggtggacgagtgctacatccccaactacctcctgcccaagactcagcccgagctgcagtgggcgtggactaacatggaggagtatataagcgcgtgcttgaacctggccgagcgcaaacggctcgtggcgcagcacctgacccacgtcagccagacgcaggagcagaacaaggagaatctgaaccccaattctgacgcgcccgtgatcaggtcaaaaacctccgcgcgctacatggagctggtcgggtggctggtggaccggggcatcacctccgagaagcagtggatccaggaggaccaggcctcgtacatctccttcaacgccgcctccaactcgcggtcccagatcaaggccgcgctggacaatgccggcaagatcatggcgctgaccaaatccgcgcccgactacctggtaggcccttcacttccggtggacattacgcagaaccgcatctaccgcatcctgcagctcaacggctacgaccctgcctacgccggctccgtctttctcggctgggcacaaaagaagttcgggaaacgcaacaccatctggctgtttgggccggccaccacgggaaagaccaacatcgcagaagccattgcccacgccgtgcccttctacggctgcgtcaactggaccaatgagaactttcccttcaacgattgcgtcgacaagatggtgatctggtgggaggagggcaagatgacggccaaggtcgtggagtccgccaaggccattctcggcggcagcaaggtgcgcgtggaccaaaagtgcaagtcgtccgcccagatcgaccccactcccgtgatcgtcacctccaacaccaacatgtgcgccgtgattgacgggaacagcaccaccttcgagcaccagcagcctctccaggaccggatgtttaagttcgaactcacccgccgtctggagcacgactttggcaaggtgacaaagcaggaagtcaaagagttcttccgctgggccagtgatcacgtgaccgaggtggcgcatgagttttacgtcagaaagggcggagccagcaaaagacccgcccccgatgacgcggataaaagcgagcccaagcgggcctgcccctcagtcgcggatccatcgacgtcagacgcggaaggagctccggtggactttgccgacaggtaccaaaacaaatgttctcgtcacgcgggcatgcttcagatgctgcttccctgcaaaacgtgcgagagaatgaatcagaatttcaacatttgcttcacacacggggtcagagactgctcagagtgtttccccggcgtgtcagaatctcaaccggtcgtcagaaagaggacgtatcggaaactctgtgcgattcatcatctgctggggcgggctcccgagattgcttgctcggcctgcgatctggtcaacgtggacctggatgactgtgtttctgagcaataaatgacttaaaccaggtatggctgccgatggttatcttccagattggctcgaggacaacctctctgagggcattcgcgagtggtgggacctgaaacctggagccccgaaacccaaagccaaccagcaaaagcaggacgacggccggggtctggtgcttcctggctacaagtacctcggacccttcaacggactcgacaagggggagcccgtcaacgcggcggacgcagcggccctcgagcacgacaaggcctacgaccagcagctcaaagcgggtgacaatccgtacctgcggtataaccacgccgacgccgagtttcaggagcgtctgcaagaagatacgtcttttgggggcaacctcgggcgagcagtcttccaggccaagaagcgggttctcgaacctctcggtctggttgaggaaggcgctaagacggctcctggaaagaagagaccggtagagcagtcaccccaagaaccagactcatcctcgggcatcggcaaatcaggccagcagcccgctaaaaagagactcaattttggtcagactggcgactcagagtcagtccccgacccacaacctctcggagaacctccagaagccccctcaggtctgggacctaatacaatggcttcaggcggtggcgctccaatggcagacaataacgaaggcgccgacggagtgggtaattcctcgggaaattggcattgcgattccacatggctgggggacagagtcatcaccaccagcacccgaacctgggcattgcccacctacaacaaccacctctacaagcaaatctccaatggaacatcgggaggaagcaccaacgacaacacctactttggctacagcaccccctgggggtattttgacttcaacagattccactgccacttctcaccacgtgactggcagcgactcatcaacaacaactggggattccggccaaagagactcaacttcaagctgttcaacatccaggtcaaggaggttacgacgaacgaaggcaccaagaccatcgccaataaccttaccagcaccgtccaggtctttacggactcggagtaccagctaccgtacgtcctaggctctgcccaccaaggatgcctgccaccgtttcctgcagacgtcttcatggttcctcagtacggctacctgacgctcaacaatggaagtcaagcgttaggacgttcttctttctactgtctggaatacttcccttctcagatgctgagaaccggcaacaactttcagttcagctacactttcgaggacgtgcctttccacagcagctacgcacacagccagagtctagatcgactgatgaaccccctcatcgaccagtacctatactacctggtcagaacacagacaactggaactgggggaactcaaactttggcattcagccaagcaggccctagctcaatggccaatcaggctagaaactgggtacccgggccttgctaccgtcagcagcgcgtctccacaaccaccaaccaaaataacaacagcaactttgcgtggacgggagctgctaaattcaagctgaacgggagagactcgctaatgaatcctggcgtggctatggcatcgcacaaagacgacgaggaccgcttctttccatcaagtggcgttctcatatttggcaagcaaggagccgggaacgatggagtcgactacagccaggtgctgattacagatgaggaagaaattaaagccaccaaccctgtagccacagaggaatacggagcagtggccatcaacaaccaggccgctaacacgcaggcgcaaactggacttgtgcataaccagggagttattcctggtatggtctggcagaaccgggacgtgtacctgcagggccctatttgggctaaaatacctcacacagatggcaactttcacccgtctcctctgatgggtggatttggactgaaacacccacctccacagattctaattaaaaatacaccagtgccggcagatcctcctcttaccttcaatcaagccaagctgaactctttcatcacgcagtacagcacgggacaagtcagcgtggaaatcgagtgggagctgcagaaagaaaacagcaagcgctggaatccagagatccagtatacttcaaactactacaaatctacaaatgtggactttgctgtcaataccgaaggtgtttactctgagcctcgccccattggtactcgttacctcacccgtaatttgtaattgcctgttaatcaataaaccggttaattcgtttcagttgaactttggtctctgcg

SEQ ID NO: 123 - protein, 736 aa, Adeno-associated virus 9
MAADGYLPDWLEDNLSEGIREWWALKPGAPQPKANQQHQDNARGLVLPGYKYLGPGNGLDKGEPVNAADAAALEHDKAYDQQLKAGDNPYLKYNHADAEFQERLKEDTSFGGNLGRAVFQAKKRLLEPLGLVEEAAKTAPGKKRPVEQSPQEPDSSAGIGKSGAQPAKKRLNFGQTGDTESVPDPQPIGEPPAAPSGVGSLTMASGGGAPVADNNEGADGVGSSSGNWHCDSQWLGDRVITTSTRTWALPTYNNHLYKQISNSTSGGSSNDNAYFGYSTPWGYFDFNRFHCHFSPRDWQRLINNNWGFRPKRLNFKLFNIQVKEVTDNNGVKTIANNLTSTVQVFTDSDYQLPYVLGSAHEGCLPPFPADVFMIPQYGYLTLNDGSQAVGRSSFYCLEYFPSQMLRTGNNFQFSYEFENVPFHSSYAHSQSLDRLMNPLIDQYLYYLSKTINGSGQNQQTLKFSVAGPSNMAVQGRNYIPGPSYRQQRVSTTVTQNNNSEFAWPGASSWALNGRNSLMNPGPAMASHKEGEDRFFPLSGSLIFGKQGTGRDNVDADKVMITNEEEIKTTNPVATESYGQVATNHQSAQAQAQTGWVQNQGILPGMVWQDRDVYLQGPIWAKIPHTDGNFHPSPLMGGFGMKHPPPQILIKNTPVPADPPTAFNKDKLNSFITQYSTGQVSVEIEWELQKENSKRWNPEIQYTSNYYKSNNVEFAVNTEGVYSEPRPIGTRYLTRNL

SEQ ID NO: 124 - protein, 736 aa, Artificial Sequence
  Description of Artificial Sequence: Synthetic polypeptide
MAADGYLPDWLEDNLSEGIREWWDLKPGAPKPKANQQKQDDGRGLVLPGYKYLGPFNGLDKGEPVNAADAAALEHDKAYDQQLKAGDNPYLRYNHADAEFQERLQEDTSFGGNLGRAVFQAKKRVLEPLGLVEEGAKTAPGKKRPVEQSPQEPDSSSGIGKSGQQPAKKRLNFGQTGDSESVPDPQPLGEPPEAPSGLGPNTMASGGGAPMADNNEGADGVGNSSGNWHCDSTWLGDRVITTSTRTWALPTYNNHLYKQISNGTSGGSTNDNTYFGYSTPWGYFDFNRFHCHFSPRDWQRLINNNWGFRPKRLNFKLFNIQVKEVTTNEGTKTIANNLTSTVQVFTDSEYQLPYVLGSAHQGCLPPFPADVFMVPQYGYLTLNNGSQALGRSSFYCLEYFPSQMLRTGNNFQFSYTFEDVPFHSSYAHSQSLDRLMNPLIDQYLYYLVRTQTTGTGGTQTLAFSQAGPSSMANQARNWVPGPCYRQQRVSTTTNQNNNSNFAWTGAAKFKLNGRDSLMNPGVAMASHKDDEDRFFPSSGVLIFGKQGAGNDGVDYSQVLITDEEEIKATNPVATEEYGAVAINNQAANTQAQTGLVHNQGVIPGMVWQNRDVYLQGPIWAKIPHTDGNFHPSPLMGGFGLKHPPPQILIKNTPVPADPPLTFNQAKLNSFITQYSTGQVSVEIEWELQKENSKRWNPEIQYTSNYYKSTNVDFAVNTEGVYSEPRPIGTRYLTRNL

SEQ ID NO: 125 - protein, 623 aa, Artificial Sequence
  Description of Artificial Sequence: Synthetic polypeptide
MPGFYEIVIKVPSDLDEHLPGISDSFVNWVAEKEWELPPDSDMDRNLIEQAPLTVAEKLQRDFLVQWRRVSKAPEALFFVQFEKGESYFHLHVLVETTGVKSMVLGRFLSQIREKLVQTIYRGIEPTLPNWFAVTKTRNGAGGGNKVVDECYIPNYLLPKTQPELQWAWTNMEEYISACLNLAERKRLVAQHLTHVSQTQEQNKENLNPNSDAPVIRSKTSARYMELVGWLVDRGITSEKQWIQEDQASYISFNAASNSRSQIKAALDNAGKIMALTKSAPDYLVGPSLPVDITQNRIYRILQLNGYDPAYAGSVFLGWAQKKFGKRNTIWLFGPATTGKTNIAEAIAHAVPFYGCVNWTNENFPFNDCVDKMVIWWEEGKMTAKVVESAKAILGGSKVRVDQKCKSSAQIDPTPVIVTSNTNMCAVIDGNSTTFEHQQPLQDRMFKFELTRRLEHDFGKVTKQEVKEFFRWASDHVTEVAHEFYVRKGGASKRPAPDDADKSEPKRACPSVADPSTSDAEGAPVDFADRYQNKCSRHAGMLQMLLPCKTCERMNQNFNICFTHGVRDCSECFPGVSESQPVVRKRTYRKLCAIHHLLGRAPEIACSACDLVNVDLDDCVSEQ

SEQ ID NO: 126 - DNA, 2211 bp, Adeno-associated virus
atggctgccgatggttatcttccagattggctcgaggacaaccttagtgaaggaattcgcgagtggtgggctttgaaacctggagcccctcaacccaaggcaaatcaacaacatcaagacaacgctcgaggtcttgtgcttccgggttacaaataccttggacccggcaacggactcgacaagggggagccggtcaacgcagcagacgcggcggccctcgagcacgacaaggcctacgaccagcagctcaaggccggagacaacccgtacctcaagtacaaccacgccgacgccgagttccaggagcggctcaaagaagatacgtcttttgggggcaacctcgggcgagcagtcttccaggccaaaaagaggcttcttgaacctcttggtctggttgaggaagcggctaagacggctcctggaaagaagaggcctgtagagcagtctcctcaggaaccggactcctccgcgggtattggcaaatcgggtgcacagcccgctaaaaagagactcaatttcggtcagactggcgacacagagtcagtcccagaccctcaaccaatcggagaacctcccgcagccccctcaggtgtgggatctcttacaatggcttcaggtggtggcgcaccagtggcagacaataacgaaggtgccgatggagtgggtagttcctcgggaaattggcattgcgattcccaatggctgggggacagagtcatcaccaccagcacccgaacctgggccctgcccacctacaacaatcacctctacaagcaaatctccaacagcacatctggaggatcttcaaatgacaacgcctacttcggctacagcaccccctgggggtattttgacttcaacagattccactgccacttctcaccacgtgactggcagcgactcatcaacaacaactggggattccggcctaagcgactcaacttcaagctcttcaacattcaggtcaaagaggttacggacaacaatggagtcaagaccatcgccaataaccttaccagcacggtccaggtcttcacggactcagactatcagctcccgtacgtgctcgggtcggctcacgagggctgcctcccgccgttcccagcggacgttttcatgattcctcagtacgggtatctgacgcttaatgatggaagccaggccgtgggtcgttcgtccttttactgcctggaatatttcccgtcgcaaatgctaagaacgggtaacaacttccagttcagctacgagtttgagaacgtacctttccatagcagctacgctcacagccaaagcctggaccgactaatgaatccactcatcgaccaatacttgtactatctctcaaagactattaacggttctggacagaatcaacaaacgctaaaattcagtgtggccggacccagcaacatggctgtccagggaagaaactacatacctggacccagctaccgacaacaacgtgtctcaaccactgtgactcaaaacaacaacagcgaatttgcttggcctggagcttcttcttgggctctcaatggacgtaatagcttgatgaatcctggacctgctatggccagccacaaagaaggagaggaccgtttctttcctttgtctggatctttaatttttggcaaacaaggaactggaagagacaacgtggatgcggacaaagtcatgataaccaacgaagaagaaattaaaactactaacccggtagcaacggagtcctatggacaagtggccacaaaccaccagagtgcccaagcacaggcgcagaccggctgggttcaaaaccaaggaatacttccgggtatggtttggcaggacagagatgtgtacctgcaaggacccatttgggccaaaattcctcacacggacggcaactttcacccttctccgctgatgggagggtttggaatgaagcacccgcctcctcagatcctcatcaaaaacacacctgtacctgcggatcctccaacggccttcaacaaggacaagctgaactctttcatcacccagtattctactggccaagtcagcgtggagatcgagtgggagctgcagaaggaaaacagcaagcgctggaacccggagatccagtacacttccaactattacaagtctaataatgttgaatttgctgttaatactgaaggtgtatatagtgaaccccgccccattggcaccagatacctgactcgtaatctgtaa

SEQ ID NO: 127 - protein, 736 aa, Adeno-associated virus; identical to SEQ ID NO: 123

SEQ ID NO: 128 - DNA, 2460 bp, Adeno-associated virus
ggtaattcctccggaaattggcattgcgattccacatggctgggcgaccgagtcattaccaccagcacccggacttgggccctgcccacctacaacaaccacctctacaagcaaatctccagccaatcgggtgccaccaacgacaaccactacttcggctacagcaccccttgggggtattttgatttcaacagattccactgccatttctcaccacgtgactggcagcgactcatcaacaacaactggggattcatggctgccgatggttatcttccagattggctcgaggacactctctctgaaggaatcagacagtggtggaagctcaaacctggcccaccaccgccgaaacctaaccaacaacaccgggacgacagtaggggtcttgtgcttcctgggtacaagtacctcggacccttcaacggactcgacaaaggagagccggtcaacgaggcagacgccgcggccctcgagcacgacaaagcctacgaccaccagctcaagcaaggggacaacccgtacctcaaatacaaccacgcggacgctgaatttcaggagcgtcttcaagaagatacgtctttcgggggcaacctcgggcgagcagtcttccaggccaaaaagagggtactcgagcctcttggtctggttgaggaagctgttaagacggctcctggaaaaaagagacctatagagcagtctcctgcagaaccggactcttcctcgggcatcggcaaatcaggccagcagcccgctaagaaaagactcaattttggtcagactggcgacacagagtcagtcccagaccctcaaccaatcggagaaccccccgcagccccctctggtgtgggatctaatacaatggcttcaggcggtggggcaccaatggcagacaataacgaaggcgccgacggagtgggtaattcctcgggaaattggcattgcgattccacatggatgggcgacagagttatcaccaccagcacaagaacctgggccctccccacctacaataatcacctctacaagcaaatctccagcgaatcgggagccaccaacgacaaccactacttcggctacagcaccccctgggggtattttgactttaacagattccactgtcacttctcaccacgtgactggcagcgactcatcaacaacaactggggatttagacccaagaaactcaatttcaagctcttcaacatccaagtcaaggaggtcacgcagaatgatggaaccacgaccatcgccaataaccttaccagcacggtgcaggtcttcacagactctgagtaccagctgccctacgtcctcggttcggctcaccagggctgccttccgccgttcccagcagacgtcttcatgattcctcagtacggctacttgactctgaacaatggcagccaagcggtaggacgttcttcattctactgtctagagtattttccctctcagatgctgaggacgggaaacaacttcaccttcagctacacttttgaagacgtgcctttccacagcagctacgcgcacagccagagtctggatcggctgatgaatcctctcattgaccagtacctgtattacctgagcaaaactcagggtacaagtggaacaacgcagcaatcgagactgcagttcagccaagctgggcctagctccatggctcagcaggccaaaaactggctaccgggacccagctaccgacagcagcgaatgtctaagacggctaatgacaacaacaacagtgaatttgcttggactgcagccaccaaatattacctgaatggaagaaattctctggtcaatcccgggcccccaatggccagtcacaaggacgatgaggaaaagtatttccccatgcacggaaatctcatctttggaaaacaaggcacaggaactaccaatgtggacattgaatcagtgcttattacagacgaagaagaaatcagaacaactaatcctgtggctacagaacaatacggacaggttgccaccaaccatcagagtcagaacaccacagcttcctatggaagtgtggacagccagggaatcttacctggaatggtgtggcaggaccgcgatgtctatcttcaaggtcccatttgggccaaaactcctcacacggacggacactttcatccttctccgctcatgggaggctttggactgaaacaccctcctccccagatcctgatcaaaaacacacctgtgccagcgaatcccgcgaccactttcactcctggaaagtttgcttcgttcattacccagtattccaccggacaggtcagcgtggaaatagagtgggagctgcagaaagaaaacagcaaacgctggaacccagaaattcagtacacctccaactacaacaagtcggtgaatgtggagtttaccgtggacgcaaacggtgtttattctgaaccccgccctattggcactcgttaccttacccggaacttg

SEQ ID NO: 129 - DNA, 3123 bp, Adeno-associated virus
gaattcgccctttctacggctgcgtcaactggaccaatgaaaactttcccttcaacgattgcgtcgacaagatggtgatctggtgggaggagggaaagatgaccgccaaggtcgtggaatctgccaaagccattctgggtggaggcaaggttcgtgtggaccagaaatgcaagtcttcggcccagatcgacccgactccggtgattgtcacctctaacaccaacatgtgcgccgtgattgacggaaactcgaccaccttcgagcaccagcagccgttgcaagaccggatgttcaaatttgaacttacccgccgtttggatcatgactttgggaaggtcaccaagcaggaagtcaaagactttttccggtgggctcaagatcacgtgactgaggtggagcatgagttctacgtcaaaaagggtggagccaagaaaaggcccgcccccgatgatgtatatataaatgagcccaagcgggcgcgcgagtcagttgcgcagccatcgacgtcagacgcggaagcttcgataaactacgcggacaggtaccaaaacaaatgttctcgtcacgtgggcatgaatctgatgctgtttccctgtcgacaatgcgaaagaatgaatcagaattcaaatatctgcttcacacacgggcaaaaagactgtttggaatgctttcccgtgtcagaatctcaacccgtttctgtcgtcagaaaaacgtatcagaaactttgttacattcatcatatcatgggaaaagtaccagacgcctgcactgcctgcgacctggtaaatgtggacttggatgactgtatttctgagcaataaatgacttaaatcaggtatggctgctgacggttatcttccagattggctcgaggacactctctctgaaggaatcagacagtggtggaagctcaaacctggcccaccaccgccgaaacctaaccaacaacaccgggacgacagtaggggtcttgtgcttcctgggtacaagtacctcggacccttcaacggactcgacaaaggagagccggtcaacgaggcagacgccgcggccctcgagcacgacaaagcctacgaccaccagctcaagcaaggggacaacccgtacctcaaatacaaccacgcggacgctgaatttcaggagcgtcttcaagaagatacgtctttcgggggcaacctcgggcgagcagtcttccaggccaaaaagagggtactcgagcctcttggtctggttgaggaagctgttaagacggctcctggaaaaaagagacctatagagcagtctcctgcagaaccggactcttcctcgggcatcggcaaatcaggccagcagcccgctaagaaaagactcaattttggtcagactggcgacacagagtcagtcccaggccctcaaccaatcggagaaccccccgcagccccctctggtgtgggatctaatacaatggcttcaggcggtggggcaccaatggcagacaataacgaaggcgccgacggagtgggtaattcctcgggaaattggcattgcgattccacatggatgggcgacagagttatcaccaccagcacaagaacctgggccctccccacctacaataatcacctctacaagcaaatctccagcgaatcgggagccaccaacgacaaccactacttcggctacagcaccccctgggggtattttgactttaacagattccactgtcacttctcaccacgtgactggcagcgactcatcaacaacaactggggatttagacccaagaaactcaatttcaagctcttcaacatccaagtcaaggaggtcacgcagaatgatggaaccacgaccatcgccaataaccttaccagcgcggtgcaggtcttcacagactctgagtaccagctgccctacgtcctcggttcggctcaccagggctgccttccgccgttcccagcagacgtcttcatgattcctcagtacggctacttgactctgaacaatggcagccaagcggtaggacgttcttcattctactgtctagagtattttccctctcagatgctgaggacgggaaacaacttcaccttcagctacacttttgaagacgtgcctttccacagcagctacgcgcacagccagagtctggatcggctgatgaatcctctcattgaccagtacctgtattacctgagcaaaactcagggtacaagtggaacaacgcagcaatcgagactgcagttcagccaagctgggcctagctccatggctcagcaggccaaaaactggctaccgggacccagctaccgacagcagcgaatgtctaagacggctaatgacaacaacaacagtgaatttgcttggactgcagccaccaaatattacctgaatggaagaaattctctggtcaatcccgggcccccagtggccagtcacaaggacgatgaggaaaagtatttccccatgcacggaaatctcatctttggaaaacaaggcacaggaactaccaatgtggacattgaatcagtgcttattacagacgaagaagaaatcagaacaactaatcctgtggctacagaacaatacggacaggttgccaccaaccatcagagtcagaacaccacagcttcctatggaagtgtggacagccagggaatcttacctggaatggtgtggcaggaccgcgatgtctatcttcaaggtcccatttgggccaaaactcctcacacggacggacactttcatccttctccgctcatgggaggctttggactgaaacaccctcctccccagatcctgatcaaaaacacacctgtgccagcgaatcccgcgaccactttcactcctggaaagtttgcttcgttcattacccagtattccacctgacaggtcagcgtggaaatagagtgggagctgcagaaagaaaacagcaaacgctggaacccagaaattcagtacacctccaactacaacaagtcggtgaatgtggagtttaccgtggacgcaaacggtgtttattctgaaccccgccctattggcactcgttaccttacccggaacttgtaatttcctgttaatgaataagccgatttatgcgtttcagttgaactttggtctctgcgaagggcgaattcgtttaaacct

SEQ ID NO: 130 - protein, 735 aa, Artificial Sequence
  Description of Artificial Sequence: Synthetic polypeptide
MAADGYLPDWLEDTLSEGIRQWWKLKPGPPPPKPNQQHRDDSRGLVLPGYKYLGPFNGLDKGEPVNEADAAALEHDKAYDHQLKQGDNPYLKYNHADAEFQERLQEDTSFGGNLGRAVFQAKKRVLEPLGLVEEAVKTAPGKKRPIEQSPAEPDSSSGIGKSGQQPAKKRLNFGQTGDTESVPGPQPIGEPPAAPSGVGSNTMASGGGAPMADNNEGADGVGNSSGNWHCDSTWMGDRVITTSTRTWALPTYNNHLYKQISSESGATNDNHYFGYSTPWGYFDFNRFHCHFSPRDWQRLINNNWGFRPKKLNFKLFNIQVKEVTQNDGTTTIANNLTSAVQVFTDSEYQLPYVLGSAHQGCLPPFPADVFMIPQYGYLTLNNGSQAVGRSSFYCLEYFPSQMLRTGNNFTFSYTFEDVPFHSSYAHSQSLDRLMNPLIDQYLYYLSKTQGTSGTTQQSRLQFSQAGPSSMAQQAKNWLPGPSYRQQRMSKTANDNNNSEFAWTAATKYYLNGRNSLVNPGPPVASHKDDEEKYFPMHGNLIFGKQGTGTTNVDIESVLITDEEEIRTTNPVATEQYGQVATNHQSQNTTASYGSVDSQGILPGMVWQDRDVYLQGPIWAKTPHTDGHFHPSPLMGGFGLKHPPPQILIKNTPVPANPATTFTPGKFASFITQYSTGQVSVEIEWELQKENSKRWNPEIQYTSNYNKSVNVEFTVDANGVYSEPRPIGTRYLTRNL

SEQ ID NO: 131 - DNA, 3123 bp, Adeno-associated virus
gaattcgccctttctacggctgcgtcaactggaccaatgaaaactttcccttcaacgattgcgtcgacaagatggtgatctggtgggaggagggaaagatgaccgccaaggtcgtggaatctgccaaagccattctgggtggaagcaaggttcgtgtggaccagaaatgcaagtcttcggcccagatcgacccgactccggtgattgtcacctctaacaccaacatgtgcgccgtgattgacggaaactcgaccaccttcgagcaccagcagccgttgcaagaccggatgttcaaatttgaacttacccgccgtttggatcatgactttgggaaggtcaccaagcaggaagtcaaagactttttccggtgggctcaagatcacgtgactgaggtggagcatgagttctacgtcaaaaagggtggagccaagaaaaggcccgcccccgatgatgtatatataaatgagcccaagcgggcgcgcgagtcagttgcgcagccatcgacgtcagacgcggaagcttcgataaactacgcgggcaggtaccaaaacaaatgttctcgtcacgtgggcatgaatctgatgctgtttccctgtcgacaatgcgaaagaatgaatcagaattcaaatatctgcttcacacacgggcaaaaagactgtttggaatgctttcccgtgtcagaatctcaacccgtttctgtcgtcagaaaaacgtatcagaaactttgttacattcatcatatcatgggaaaagaaccagacgcctgcactgcctgcgacctggtaaatgtggacttggatgactgtatttctgagcaataaatgacttaaatcaggtatggctgctgacggttatcttccagattggctcgaggacactctctctgaaggaatcagacagtggtggaagctcaaacctggcccaccaccgccgaaacctaaccaacaacaccgggacgacagtaggggtcttgtgcttcctgggtacaagtacctcggacccttcaacggactcgacaaaggagagccggtcaacgaggcagacgccgcggccctcgagcacgacaaagcctacgaccaccagctcaagcaaggggacaacccgtacctcaaatacaaccacgcggacgctgaatttcaggagcgtcttcaagaagatacgtctttcgggggcaacctcgggcgagcagtcttccaggccaaaaagagggtactcgagcctcttggtctggttgaggaagctgttaagacggctcctggaaaaaagagacctatagagcagtctcctgcagaaccggactcttcctcgggcatcggcgaatcaggccagcagcccgctaagaaaagactcaattttggtcagactggcgacacagagtcagtcccagaccctcaaccaatcggagaaccccccgcagccccctctggtgtgggatctaatacaatggcttcaggcggtggggcaccaatggcagacgataacgaaggcgccgacggagtgggtaattcctcgggaaattggcattgcgattccacatggatgggcgacagagttatcaccaccagcacaagaacctgggccctccccacctacaataatcacctctacaagcaaatctccagcgaatcgggagccaccaacgacaaccactacttcggctacagcaccccctgggggtattttgactttaacagattccactgtcacttctcaccacgtgactggcagcgactcatcaacaacaactggggatttagacccaagaaactcaatttcaagctcttcaacatccaagtcaaggaggtcacgcagaatgatggaaccacgaccatcgccaataaccttaccagcacggtgcaggtcttcacagactctgagtaccagctgccctacgtcctcggttcggctcaccagggctgccttccgccgttcccagcagacgtcttcatgattcctcagtacggctacttgactctgaacaatggcagccaagcggtaggacgttcttcattctactgtctagagtattttccctctcagatgctgaggacgggaaacaacttcaccttcagctacacttttgaagacgtgcctttccacagcagctacgcgcacagccagagtctggatcggctgatgaatcctctcattgaccagtacctgtattacctgagcaaaactcagggtacaagtggaacaacgcagcaatcgagactgcagttcagccaagctgggcctagctccatggctcagcaggccaaaaactggctaccgggacccagctaccgacagcagcgaatgtctaagacggctaatgacaacaacaacagtgaatttgcttggactgcagccaccaaatattacctgaatggaagaaattctctggtcaatcccgggcccccaatggccagtcacaaggacgatgaggaaaagtatttccccatgcacggaaatctcatctttggaaaacaaggcacaggaactaccaatgtggacattgaatcagtgcttattacagacgaagaagaaatcagaacaactaatcctgtggctacagaacaatacggacaggttgccaccaaccatcagagtcaggacaccacagcttcctatggaagtgtggacagccagggaatcttacctggaatggtgtggcaggaccgcgatgtctatcttcaaggtcccatttgggccaaaactcctcacacggacggacactttcatccttctccgctcatgggaggctttggactgaaacaccctcctccccagatcctgatcaaaaacacacctgtgccagcgaatcccgcgaccactttcactcctggaaagtttgcttcgttcattacccagtattccaccggacaggtcagcgtggaaatagagtgggagctgcagaaagaaaacagcaaacgctggaacccagaaattcagtacacctccaactacaacaagtcggtgaatgtggagtttaccgtggacgcaaacggtgtttattctgaaccccgccctattggcactcgttaccttacccggaacttgtaatttcctgttaatgaataaaccgatttatgcgtttcagttgaactttggtctctgcgaagggcgaattcgcggccgcta

SEQ ID NO: 132 - protein, 735 aa, Artificial Sequence
  Description of Artificial Sequence: Synthetic polypeptide
MAADGYLPDWLEDTLSEGIRQWWKLKPGPPPPKPNQQHRDDSRGLVLPGYKYLGPFNGLDKGEPVNEADAAALEHDKAYDHQLKQGDNPYLKYNHADAEFQERLQEDTSFGGNLGRAVFQAKKRVLEPLGLVEEAVKTAPGKKRPIEQSPAEPDSSSGIGESGQQPAKKRLNFGQTGDTESVPDPQPIGEPPAAPSGVGSNTMASGGGAPMADDNEGADGVGNSSGNWHCDSTWMGDRVITTSTRTWALPTYNNHLYKQISSESGATNDNHYFGYSTPWGYFDFNRFHCHFSPRDWQRLINNNWGFRPKKLNFKLFNIQVKEVTQNDGTTTIANNLTSTVQVFTDSEYQLPYVLGSAHQGCLPPFPADVFMIPQYGYLTLNNGSQAVGRSSFYCLEYFPSQMLRTGNNFTFSYTFEDVPFHSSYAHSQSLDRLMNPLIDQYLYYLSKTQGTSGTTQQSRLQFSQAGPSSMAQQAKNWLPGPSYRQQRMSKTANDNNNSEFAWTAATKYYLNGRNSLVNPGPPMASHKDDEEKYFPMHGNLIFGKQGTGTTNVDIESVLITDEEEIRTTNPVATEQYGQVATNHQSQDTTASYGSVDSQGILPGMVWQDRDVYLQGPIWAKTPHTDGHFHPSPLMGGFGLKHPPPQILIKNTPVPANPATTFTPGKFASFITQYSTGQVSVEIEWELQKENSKRWNPEIQYTSNYNKSVNVEFTVDANGVYSEPRPIGTRYLTRNL

SEQ ID NO: 133 - DNA, 3113 bp, Adeno-associated virus
gaattcgccctttctacggctgcgtcaactggaccaatgaaaactttcccttcaacgattgcgtcgacaagatggtgatctggtgggaggagggaaagatgaccgccaaggtcgtggaatctgccaaagccattctgggtggaagcaaggttcgtgtggaccagaaatgcaagtcttcggcccagatcgacccgactccggtgattgtcacctctaacaccaacatgtgcgccgtgattgacggaaactcgaccaccttcgagcaccagcagccgttgcaagaccggatgttcaaatttgaacttacccgccgtttggatcatgactttgggaaggtcaccaagcaggaagtcaaagactttttccggtgggctcaagatcacgtgactgaggtggagcatgagttctacgtcaaaaagggtggagccaagaaaaggcccgcccccgatgatgtatatataaatgagcccaagcgggcgcgcgagtcagttgcgcagccatcgacgtcagacgcggaagcttcgataaactacgcggacaggtaccaaaacaaatgttctcgtcacgtgggcatgaatctgatgctgtttccctgtcgacaatgcgaaagaatgaatcagaattcaaatatctgcttcacacacgggcaaaaagactgtttggaatgctttcccgtgtcagaatctcaacccgttcctgtcgtcagaaaaacgtatcagaaactttgttacattcatcatatcatgggaaaagtaccagacgcctgcactgcctgcgacctggtaaatgtggacttggatgactgtatttctgagcaataaatgacttaaatcaggtatggctgctgacggttatcttccagattggctcgaggacactctctctgaaggaatcagacagtggtggaagctcaaacctggcccaccaccgccgaaacctaaccaacaacaccgggacgacagtaggggtcttgtgcttcctgggtacaagtacctcggacccttcaacggactcgacaaaggagagccggtcaacgaggcagacgccgcggccctcgagcacgacaaagcctacgaccaccagctcaagcaaggggacaacccgtacctcaaatacaaccacgcggacgctgaatttcaggagcgtcttcaagaagatacgtctttcgggggcaacctcgggcgagcagtcttccaggccaaaaagagggtactcgagcctcttggtctggttgaggaagctgttaagacggctcctggaaaaaagagacctatagagcagtctcctgcagaaccggactcttcctcgggcatcggcaaatcaggccagcagcccgctaagaaaagactcaattttggtcagactggcgacacagagtcagtcccagaccctcaaccaatcggagaaccccccgcagccccctctggtgtgggatctaatacaatggcttcaggcggtggggcaccaatggcagacaataacgaaggcgccgacggagtgggtaattcctcgggaaattggcattgcgattccacatggatgggcgacagagttatcaccaccagcacaagaacctgggccctccccacctacaataatcacctctacaagcaaatctccagcgaatcgggagccaccaacgacaaccactacttcggctacagcaccccctgggggtattttgactttaacagattccactgtcacttctcaccacgtgactggcagcgactcatcaataacaactggggatttagacccaagaaactcaatttcaagctcttcaacatccaagtcaaggaggtcacgcagaatgatggaaccacgaccatcgccaataaccttaccagcacggtgcaggtcttcacagactctgagtaccagctgccctacgtcctcggttcggctcaccagggctgccttccgccgttcccagcagacgtcttcatgattcctcagtacggctacttgactctgaacaatggcagccaagcggtaggacgttcttcattctactgtctagagtattttccctctcagatgctgaggacgggaaacaacttcaccttcagctacacttttgaagacgtgcctttccacagcagctacgcgcacagccagagtctggatcggctgatgaatcctctcattgaccagtacctgtattacctgagcaaaactcagggtacaagtggaacaacgcagcaatcgagactgcagttcaaccaagctgggcctagctccatggctcagcaggccaaaaactggctaccgggacccagctaccgacagcagcgaatgtctaagacggctaatgacaacaacaacagtgaatttgcttggactgcagccaccaaatattacccgaatggaagaaattctctggtcaatcccgggcccccaatggccagtcacaaggacgatgaggaaaagtatttccccatgcacggaaatctcatctttggaaaacaaggcacaggaactaccaatgtggacattgaatcagtgcttattacagacgaagaagaaatcagaacgactaatcctgtggctacagaacaatacggacaggttgccaccaaccgtcagagtcagaacaccacagcttcctatggaagtgtggacagccagggaatcttacctggaatggtgtggcaggaccgcgatgtctatcttcaaggtcccatttgggccaaaactcctcacacggacggacactttcatccttctccgctcatgggaggctttggactgaaacaccctcctccccagatcctgatcaaaaacacacctgtgccagcgaatcccgcgaccactttcactcctggaaagtttgcttcgttcattacccagtattccaccggacaggtcagcgtggaaatagagtgggagctgcagaaagaaaacagcaaacgctggaacccggaaattcagtacacctccaactacaacaagtcggtgaatgtggagtttaccgtggacgcaaacggtgtttattctgaaccccgccctattggcactcgttaccttacccggaacttgtaatttcctgttaatgaataaaccgatttatgcgtttcagttgaactttggtctctgcgaagggcgaattc

SEQ ID NO: 134 - protein, 735 aa, Artificial Sequence
  Description of Artificial Sequence: Synthetic polypeptide
MAADGYLPDWLEDTLSEGIRQWWKLKPGPPPPKPNQQHRDDSRGLVLPGYKYLGPFNGLDKGEPVNEADAAALEHDKAYDHQLKQGDNPYLKYNHADAEFQERLQEDTSFGGNLGRAVFQAKKRVLEPLGLVEEAVKTAPGKKRPIEQSPAEPDSSSGIGKSGQQPAKKRLNFGQTGDTESVPDPQPIGEPPAAPSGVGSNTMASGGGAPMADNNEGADGVGNSSGNWHCDSTWMGDRVITTSTRTWALPTYNNHLYKQISSESGATNDNHYFGYSTPWGYFDFNRFHCHFSPRDWQRLINNNWGFRPKKLNFKLFNIQVKEVTQNDGTTTIANNLTSTVQVFTDSEYQLPYVLGSAHQGCLPPFPADVFMIPQYGYLTLNNGSQAVGRSSFYCLEYFPSQMLRTGNNFTFSYTFEDVPFHSSYAHSQSLDRLMNPLIDQYLYYLSKTQGTSGTTQQSRLQFNQAGPSSMAQQAKNWLPGPSYRQQRMSKTANDNNNSEFAWTAATKYYPNGRNSLVNPGPPMASHKDDEEKYFPMHGNLIFGKQGTGTTNVDIESVLITDEEEIRTTNPVATEQYGQVATNRQSQNTTASYGSVDSQGILPGMVWQDRDVYLQGPIWAKTPHTDGHFHPSPLMGGFGLKHPPPQILIKNTPVPANPATTFTPGKFASFITQYSTGQVSVEIEWELQKENSKRWNPEIQYTSNYNKSVNVEFTVDANGVYSEPRPIGTRYLTRNL

SEQ ID NO: 135 - DNA, 3122 bp, Adeno-associated virus
agcggccgcgaattcgccctttctacggctgcgtcaactggaccaatgaaaactttcccttcaacgattgcgtcgacaagatggtgatctggtgggaggagggaaagatgaccgccaaggtcgtggaatctgccaaagccattctgggtggaagcaaggttcgtgtggaccagaaatgcaggtcttcggcccagatcgacccgactccggtgattgtcacctctaacaccaacatgtgcgccgtgattgacggaaactcgaccaccttcgagcaccagcagccgttgcaagaccggatgttcaaatttgaacttacccgccgtttggatcatgactttgggaaggtcaccaagcaggaagtcaaagactttttccggtgggctcaagatcacgtgactgaggtggagcatgagttctacgtcaaaaagggtggagccaagaaaaggcccgcccccgatgatgtatatataaatgagcccaagcgggcgcgcgagtcagttgcgcagccatcgacgtcagacgcggaagcttcgataaactacgcggacaggtaccaaaacaaatgttctcgtcacgtgggcatgaatctgatgctgtttccctgtcgacaatgcgaaagaatgaatcagaattcaaatatctgcttcacacacgggcaaaaagactgtttggaatgctttcccgtgtcagaatctcaacccgtttctgtcgtcagaaaaacgtatcagaaactttgttacattcatcatatcatgggaaaagtaccagacgcctgcactgcctgcgacctggtaaatgtggacttggatgactgtatttctgagcaataaatgacttaaatcaggtatggctgctgacggttatcttccagattggctcgaggacactctctctgaaggaatcagacagtggtggaagctcaaacctggcccaccaccgccgaaacctaaccaacaacaccgggacgacagtaggggtcttgtgcttcctgggtacaagtacctcggacccttcaacggactcgacaaaggagagccggtcaacgaggcagacgccgcggccctcgagcacgacaaagcctacgaccaccagctcaagcaaggggacaacccgtacctcaaatacaaccacgcggacgctgaatttcaggagcgtcttcaagaagatacgtctttcgggggcaacctcgggcgagcagtcttccaggccaaaaagagggtactcgagcctcttggtctggttgaggaagctgttaagacggctcctggaaaaaagagacctatagagcagtctcctgcagaaccggactcttcctcgggcatcggcaaatcaggccagcagcccgctaagaaaagactcaattttggtcagactggcgacacagagtcagtcccagaccctcaaccaatcggagaaccccccgcagccccctctggtgtgggatctaatacaatggcttcaggcggtggggcaccaatggcagacaataacgaaggcgccgacggagtgggtaattcctcgggaaattggcattgcgattccacatggatgggcgacagagttatcaccaccagcacaagaacctgggccctccccacctacaataatcgcctctacaagcaaatctccagcgaatcgggagccaccaacgacaaccactacttcggctacagcaccccctgggggtattttgactttaacagattccactgtcacttctcaccacgtgactggcagcgactcatcaacaacaactggggatttagacccaagaaactcaatttcaagctcttcaacatccaagtcaaggaggtcacgcagaatgatggaaccacgaccatcgccaataaccttaccagcacggtgcaggtcttcacagactctgagtaccagctgccctacgtcctcggttcggctcaccagggctgccttccgccgttcccagcagacgtcttcatgattcctcagtacggctacttgactctgaacaatggcagccaagcggtaggacgttcttcattctactgtctagagtattttccctctcagatgctgaggacgggaaacaacttcaccttcagctacacttttgaagacgtgcctttccacagcagctacgcgcacagccagagtctggatcggctgatgaatcctctcattgaccagtacctgtattacctgagcaaaactcagggtacaagtggaacaacgcagcaatcgagactgcagttcagccaagctgggcctagctccatggctcagcaggccaaaaactggctaccgggacccagctaccgacagcagcgaatgtctaagacggctaatgacaacaacaacagtgaatttgcttggactgcagccaccaaatattacctgaatggaagaaattctctggtcaatcccgggcccccaatggccagtcacaaggacgatgaggaaaagtatttccccatgcacggaaatctcatctttggaaaacaaggcacaggaactaccaatgtggacattgaatcagtgcttattacagacgaagaagaaatcagaacaactaatcctgtggctacagaacaatacggacaggttgccaccaaccatcagagtcagaacaccacagcttcctatggaagtgtggacagccagggaatcttacctggaatggtgtggcaggaccgcgatgtctatcttcaaggtcccatttgggccaaaactcctcacacggacggacactttcatccttctccgctcatgggaggctttggactgaaacaccctcctccccagatcctgatcaaaaacacacctgtgccagcgaatcccgcgaccactttcactcctggaaagtttgcttcgttcattacccagtattccaccggacaggtcagcgtggaaatagagtgggagctgcagaaagaaaacagcaaacgctggaacccagaaattcagtacacctccaactacaacaagtcggtgaatgtggagtttaccgtggacgcaaacggtgtttattctgaaccccgccctattggcactcgttaccttacccggaacttgtaatttcctgttaatgaataaaccgatttatgcgtttcagttgaactttggtctctgcgaagggcgaattc

SEQ ID NO: 136 - protein, 735 aa, Artificial Sequence
  Description of Artificial Sequence: Synthetic polypeptide
MAADGYLPDWLEDTLSEGIRQWWKLKPGPPPPKPNQQHRDDSRGLVLPGYKYLGPFNGLDKGEPVNEADAAALEHDKAYDHQLKQGDNPYLKYNHADAEFQERLQEDTSFGGNLGRAVFQAKKRVLEPLGLVEEAVKTAPGKKRPIEQSPAEPDSSSGIGKSGQQPAKKRLNFGQTGDTESVPDPQPIGEPPAAPSGVGSNTMASGGGAPMADNNEGADGVGNSSGNWHCDSTWMGDRVITTSTRTWALPTYNNRLYKQISSESGATNDNHYFGYSTPWGYFDFNRFHCHFSPRDWQRLINNNWGFRPKKLNFKLFNIQVKEVTQNDGTTTIANNLTSTVQVFTDSEYQLPYVLGSAHQGCLPPFPADVFMIPQYGYLTLNNGSQAVGRSSFYCLEYFPSQMLRTGNNFTFSYTFEDVPFHSSYAHSQSLDRLMNPLIDQYLYYLSKTQGTSGTTQQSRLQFSQAGPSSMAQQAKNWLPGPSYRQQRMSKTANDNNNSEFAWTAATKYYLNGRNSLVNPGPPMASHKDDEEKYFPMHGNLIFGKQGTGTTNVDIESVLITDEEEIRTTNPVATEQYGQVATNHQSQNTTASYGSVDSQGILPGMVWQDRDVYLQGPIWAKTPHTDGHFHPSPLMGGFGLKHPPPQILIKNTPVPANPATTFTPGKFASFITQYSTGQVSVEIEWELQKENSKRWNPEIQYTSNYNKSVNVEFTVDANGVYSEPRPIGTRYLTRNL

SEQ ID NO: 137 - DNA, 3121 bp, Adeno-associated virus
gaattcgcccttcgcagagaccaaagttcaactgaaacgaatcaaccggtttattgattaacaagcaattacagattacgggtgaggtaacgggtgccgatggggcgaggctcagaataagtgccatctgtgttaacagcaaagtccacatttgtagatttgtagtagttggaagtgtattgaatctctgggttccagcgtttgctgttttctttctgcagctcccattcaatttccacgctgacctgtccggtgctgtactgcgtgatgaacgacgccagcttagcttgactgaaggtagttggaggatccgcgggaacaggtgtattcttaatcaggatctgaggaggcgggtgtttcagtccaaagccccccatcagcggcgagggatgaaagtttccgtccgtgtgaggaatcttggcccagataggaccctgcaggtacacgtcccggttctgccagaccatgccaggtaaggctccttgactgttgacggcccctacaataggagcggcgttttgctgttgcaggttatcggccaccacgccgtactgttctgtggccactgggttggtggttttaatttcttcctcactggttagcataacgctgctatagtccacgttgccttttccagctccctgtttcccaaacattaagactccgctggacggaaaaaatcgctcttcgtcgtccttgtgggttgccatagcgacaccgggatttaccagagagtctctgccattcagatgatacttggtggcaccggtccaggcaaagttgctgttgttattttgcgacagtgtcgtggagacgcgttgctgccggtagcagggcccgggtagccagtttttggcctgagccgacatgttattaggcccggcctgagaaaatagcaactgctgagttcctgcggtacctcccgtggactgagtccgagacaggtagtacaggtactggtcgatgagggggttcatcagccggtccaggctttggctgtgcgcgtagctgctgtgaaaaggcacgtcctcaaactggtagctgaactcaaagttgttgcccgttctcagcatttgagaaggaaagtactccaggcagtagaaggaggaacggcccacggcctgactgccattgttcagagtcaggtacccgtactgaggaatcatgaagacgtccgccgggaacggaggcaggcagccctggcgcgcagagccgaggacgtacgggagctggtattccgagtccgtaaagacctgaatcgtgctggtaaggttattggcgatggtcttggtgccttcattctgcgtgacctccttgacctggatgttgaagagcttgaagttgagtctcttgggccggaatccccagttgttgttgatgagtcgctgccagtcacgtggtgagaagtggcagtggaatctgttaaagtcaaaatacccccagggggtgctgtagccgaagtaggtgttgtcgttggtgcttcctcccgaagtcccgttggagatttgcttgtagaggtggttgttgtaggtggggagggcccaggttcgggtgctggtggtgatgactctgtcgcccagccatgtggaatcgcaatgccaatttcctgaggaactacccactccgtcggcgccttcgttattgtctgccattggagcgccaccgcctgcagccattgtaccagatcccagaccagaggggcctgcggggggttctccgattggttgagggtcgggcactgactctgagtcgccagtctgcccaaagttgagtctctttttcgcgggctgctggcctttcttgccgatgcccgtagtggagtctggagaacgctggggtgatggctctaccggtctcttctttccaggagccgtcttagcgccttcctcaaccagaccgagaggttcgagaacccgcttcttggcctggaagactgctcgtccgaggttgcccccaaaagacgtatcttcttgcagacgctcctgaaactcggcgtcggcgtggttataccgcaggtacggattgtcacccgctttgagctgctggtcgtaggccttgtcgtgctcgagggccgctgcgtccgccgcgttgacgggctcccccttgtcgagtccgttgaagggtccgaggtacttgtagccaggaagcaccagaccccggccgtcgtcctgcttttgctggttggctttgggcttcggggctccaggtttcagcgcccaccactcgcgaatgccctcagagaggttgtcctcgagccaatctggaagataaccatcggcagccatacctgatctaaatcatttattgttcaaagatgcagtcatccaaatccacattgaccagatcgcaggcagtgcaagcgtctggcacctttcccatgatatgatgaatgtagcacagtttctgatacgcctttttgacgacagaaacgggttgagattctgacacgggaaagcactctaaacagtctttctgtccgtgagtgaagcagatatttgaattctgattcattctctcgcattgtctgcagggaaacagcatcagattcatgcccacgtgacgagaacatttgttttggtacctgtccgcgtagttgatcgaagcttccgcgtctgacgtcgatggctgcgcaactgactcgcgcacccgtttgggctcacttatatctgcgtcactgggggcgggtcttttcttggctccaccctttttgacgtagaattcatgctccacctcaaccacgtgatcctttgcccaccggaaaaagtctttgacttcctgcttggtgaccttcccaaagtcatgatccagacggcgggtgagttcaaatttgaacatccggtcttgcaacggctgctggtgttcgaaggtcgttgagttcccgtcaatcacggcgcacatgttggtgttggaggtgacgatcacgggagtcgggtctatctgggccgaggacttgcatttctggtccacgcgcaccttgcttcctccgagaatggctttggccgactccacgaccttggcggtcatcttcccctcctcccaccagatcaccatcttgtcgacacagtcgttgaagggaaagttctcattggtccagttgacgcagccgtagaagggcgaattc

SEQ ID NO: 138 - protein, 733 aa, Artificial Sequence
  Description of Artificial Sequence: Synthetic polypeptide
MAADGYLPDWLEDNLSEGIREWWDLKPGAPKLKANQQKQDDGRGLVLPGYKYLGPFHGLDKGEPVNAADAAALEHDKAYDQQLKAGDNPYLRYNHADAEFQERLQEDTSFGGNLGRAVFQAKKRVLEPLGLVEEGAKTAPGKKRPLESPQEPDSSSGIGKKGKQPAKKRLNFEEDTGAGDGPPEGSDTSAMSSDIEMRAAPGGNAVDAGQGSDGVGNASGDWHCDSTWSEGKVTTTSTRTWVLPTYNNHLYLRLGTTSNSNTYNGFSTPWGYFDFNRFHCHFSPRDWQRLINNNWGLRPKAMRVKIFNIQVKEVTTSNGETTVANNLTSTVQIFADSSYELPYVMDAGQEGSLPPFPNDVFMVPQYGYCGIVTGENQNQTDRNAFYCLEYFPSQMLRTGNNFEMAYNFEKVPFHSMYAHSQSLDRLMNPLLDQYLWHLQSTTSGETLNQGNAATTFGKIRSGDFAFYRKNWLPGPCVKQQRFSKTASQNYKIPASGGNALLKYDTHYTLNNRWSNIAPGPPMATAGPSDGDFSNAQLIFPGPSVTGNTTTSANNLLFTSEGEIAATNPRDTDMFGQIADNNQNATTAPITGNVTAMGVLPGMVWQNRDIYYQGPIWAKIPHADGHFHPSPLIGGFGLKHPPPQIFIKNTPVPANPATTFTAARVDSFITQYSTGQVAVQIEWEIEKERSKRRNPEVQFTSNYGNQSSMLWAPDTTGKYTEPRVIGSRYLTNHL

SEQ ID NO: 139 - protein, 735 aa, Adeno-associated virus
MAADGYLPDWLEDTLSEGIRQWWKLKPGPPPPKPNQQHRDDSRGLVLPGYKYLGPFNGLDKGEPVNEADAAALEHDKAYDHQLKQGDNPYLKYNHADAEFQERLQEDTSFGGNLGRAVFQAKKRVLEPLGLVEEAVKTAPGKKRPIEQSPAEPDSSSGIGKSGQQPAKKRLNFGQTGDTESVPDPQPIGEPPAAPSGVGSNTMASGGGAPMADNNEGADGVGNSSGNWHCDSTWMGDRVITTSTRTWALPTYNNHLYKQISSESGATNDNHYFGYSTPWGYFDFNRFHCHFSPRDWQRLINNNWGFRPKKLNFKLFNIQVKEVTQNDGTTTIANNLTSTVQVFTDSEYQLPYVLGSAHQGCLPPFPADVFMIPQYGYLTLNNGSQAVGRSSFYCLEYFPSQMLRTGNNFTFSYTFEDVPFHSSYAHSQSLDRLMNPLIDQYLYYLSKTQGTSGTTQQSRLQFSQAGPSSMAQQAKNWLPGPSYRQQRMSKTANDNNNSEFAWTAATKYYLNGRNSLVNPGPPMASHKDDEEKYFPMHGNLIFGKQGTGTTNVDIESVLITDEEEIRTTNPVATEQYGQVATNHQSQNTTASYGSVDSQGILPGMVWQDRDVYLQGPIWAKIPHTDGHFHPSPLMGGFGLKHPPPQILIKNTPVPANPATTFTPGKFASFITQYSTGQVSVEIEWELQKENSKRWNPEIQYTSNYNKSVNVEFTVDANGVYSEPRPIGTRYLTRNL

SEQ ID NO: 140 - DNA, 3127 bp, Adeno-associated virus
gcggccgcgaattcgcccttcgcagagaccaaagttcaactgaaacgaatcaaccggtttattgattaacatgcaattacagattacgggtgaggtaacgagtgccaatagggcgaggctcagagtaaacaccctggctgtcaacggcaaagtccacaccagtctgcttttcaaagttggaggtgtactgaatctccgggtcccagcgcttgctgttttccttctgcagctcccactcgatttccacgctgacttgtccggtgctgtactgtgtgatgaacgaagcaaacttggcaggagtaaacacctccggaggattagcgggaacgggagtgttcttgatcaggatctgaggaggcggatgtttaagtccaaagccgcccatcaaaggagacgggtgaaagttgccatccgtgtgaggaatcttggcccagatgggaccctgcaggtacacgtcccggttctgccagaccatgccaggtaaggctccctggttgttgacaacttgtgtctgggctgcagtattagccgcttgtaagttgctgctgactatcccgtattcttccgtggctacaggattagtaggacgaatttcttcttcatttgtcattaacacattttccaatgtagttttgttagttgctccagtttttccaaaaatcaggactccgctggatgggaaaaagcggtcctcgtcgtccttgtgagttgccatggcgacgccgggattaaccaacgagtttctgccgttcaggtgatatttggtggcaccagtccaagcaaagttgctgttgttgttttgatccagcgttttggagaccctttgttgccggaagcagggtccaggtaaccaattcttggcttgttcggccatagttgaaggcccgccctggtaaaactgcagttcccgattgccagctgtgcctcctgggtcactctgtgttctggccaggtagtacaagtactggtcgatgaggggattcatcagccggtccaggctctggctgtgtgcgtagctgctgtggaaaggcacgtcctcgaagctgtagctgaactcaaagttgttgcccgttctcagcatctgagaggggaagtactccaggcagtagaaggaggaacgtcccacagactgactgccattgttgagagtcaggtagccgtactgaggaatcatgaagacgtccgccgggaacggaggcaggcagccctggtgcgcagagccgaggacgtacggcagctggtattccgagtccgagaatacctgaatcgtgctggtaaggttattagcgatggtcgtaacgccgtcattcgtcgtgacctccttgacctggatgttgaagagcttgaaccgcagcttcttgggccggaatccccagttgttgttgatgagtcgctgccagtcacgtggtgagaagtggcagtggaatctgttaaagtcaaaatacccccagggggtgctgtagccgaagtaggtgttgtcgttggtactacctgcagtttcactggagatttgctcgtagaggtggttgttgtaggtgggcagggcccaggttcgggtgctggtggtaatgactctgtcgcccagccatgtggaatcgcaatgccaatttcctgaggcattacccactccgtcggcaccttcgttattgtctgccattggtgcgccaccgcctgcagccactgtaccagatcccacactagagggcgctgctggaggttctccgagaggttgagggtcggggactgactctgagtcgccagtctgaccgaaattgagtctctttctggcgggctgctggcccttcttgccgatgcccgtggaggagtcgggggaacgctgaggtgacggctctaccggtctcttctttgcaggagccgtcttagcgccttcctcaaccagaccgagaggttcgagaacccgcttcttggcctggaagactgctcgcccgaggttgcccccaaatgacgtatcttcttgcagacgctcctgaaactcggcgtcggcgtggttataccgcaggtacgggttgtcacccgcattgagctgctggtcgtaggccttgtcgtgctcgagggccgctgcgtccgccgcgttgacgggctcccccttgtcgagtccgttgaagggtccgaggtacttgtagccaggaagcaccagaccccggccgttgtcctgcttttgctggttggctttgggtttcggggctccaggtttcaggtcccaccactcgcgaatgccctcagagaggttgtcctcgagccaatctggaagataaccatcggcagccatacctgatttaaatcatttattgttcaaagatgcagtcatccaaatccacattgaccagatcgcaggcagtgcaagcgtctggcacctttcccatgatatgatgaatgtagcacagtttctgatacgcctttttgacgacagaaacgggtttagattctgacacgggaaagcactctaaacagtctttctgtccgtgagtgaagcagatatttgaattctgattcattctctcgcattgtctgcagggaaacagcatcagattcatgcccacgtgacgagaacatttgttttggtacctgtctgcgtagttgatcgaagcttccgcgtctgacgtcgatggctgcgcaactgactcgcgcacccgtttgggctcacttatatctgcgtcactgggggcgggtcttttcttggctccaccctttttgacgtagaattcatgctccacctcaaccacgtaatcctttgcccaccggaaaaagtctttgacttcctgcttggtgaccttcccaaagtcatgatccagacggcgggtgagttcaaatttgaacatccggtcttgcaacggctgctggtgttcgaaggtcgttgagttcccgtcgatcacggcgcacatgttggtgttggagatgacgatcgcgggagtcgggtctatctgggccgaggacttgcatttctggtccacgcgcaccttgcttcctccgagaatggctttggccgactccacgaccttggcggtcatcttcccctcctcccaccagatcaccatcttgtcgacacagtcgttgaagggaaagttctcattggtccagttgacgcagccgtagaaagggcgaattc

SEQ ID NO: 141 - protein, 728 aa, Artificial Sequence
  Description of Artificial Sequence: Synthetic polypeptide
MAADGYLPDWLEDNLSEGIREWWDLKPGAPKPKANQQKQDDGRGLVLPGYKYLRPFNGLDKGEPVNEADAAALEHDKAYDKQLEQGDNPYLKYNHADAEFQERLQEDTSFGGNLGRAVFQAKKRVLEPLGLVEEVAKTAPGKKRPIESPDSSTGIGKKGQQPAKKKLNFGQTGDSESVPDPQPLGEPPAAPSGLGSGTMAAGGGAPMADNNEGADGVGNASGNWHCDSTWLGDRVITTSTRTWALPTYNNHLYKQISSQSGATNDNHFFSYSTPWGYFDFNRFHCHFSPRDWQRLINNNWGFRPRKLRFKLFNIQVKEVTTNDGVTTIANNLTSTIQVFSDSEYQLPYVLGSAHQGCLPPFPADVFMIPQYGYLTLNNGSQSVGRSSFYCLEYFPSQMLRTGNNFEFSYTFEEVPFHSSYVHSQSLDRLMNPLIDQYLYYLARTQSTTGSTRELQFHQAGPNTMAEQSKNWLPGPCYRQQRLSKNIDSNNNSNFAWTGATKYHLNGRNSLTNPGVAMATNKDDEDQFFPINGVLVFGKTGAANKTTLENVLMTSEEEIKTTNPVATEEYGVVSSNLQSSTAGPQTQTVNSQGALPGMVWQNRDVCLQGPIWAKIPHTDGNFHPSPLMGGFGLKHPPPQILIKNTPVPANPPEVFTPAKFASFITQYSTGQVSVEIEWELQKENSKRWNPEIQYTSNYAKSNNVEFAVNNEGVYTEPRPIGTRYLTRNL

SEQ ID NO: 142 - DNA, 3106 bp, Adeno-associated virus
gcggccgcgaattcgcccttcgcagagaccaaagttcaactgaaacgaatcaaccggtttattgattaacaagtaattacaggttacgggtgaggtaacgggtgccaatggggcgaggctcagtataaaccccttcgttgttgacagcaaattccacattattagacttggcataatttgaggtgtactgaatctctggattccagcgtttgctgttttctttctgcagttcccactcgatctccacgctgacctggccggtgctgtactgcgtgataaatgaggcaaacttggcaggagtaaacacctctggaggattagcaggtaccggggtgtttttgatgagaatttgaggaggcgggtgtttgagtccaaatccgcccatcaggggagacgggtgaaagttgccgtccgtgtgaggaattttggcccagatgggaccctgcaggcacacgtcccggttctgccagaccatgccgggcagagccccctggctgttgacagtctgtgtctggggtccggccgtagacgattgcaggttgctggagaccacaccgtattcttctgtagccacgggattggtggttttgatctcctcctcgctggtcattagcacgttttccagcgttgtcttgttggcagcccccgttttgccaaaaaccagcactccgttgatgggaaagaactggtcctcgtcgtccttgttggtggccatggctacgcccgggttggttaatgaatttctaccattcagatggtatttagtggccccggtccaggcaaagttactgttgttgttgctgtctatgttttttgacagtctctgctgccgataacagggtccgggcagccagttctttgattgctcggccatggtgttgggcccagcctgatggaactgcagctcccttgtggaccccgtagtgctctgggtccgggccaggtagtacaggtactggtcgatgaggggattcatcagccggtctaggctctggctgtgcacatagctgctgtggaaaggcacttcctcaaaggtgtagctgaattcaaagttattgcccgttctcagcatctgagaaggaaagtactccaggcagtagaaggaggaacgtcccacagactgactgccgttgtttagagtcagatatccgtactgaggaatcatgaacacgtccgcagggaacggagggaggcagccctggtgcgcagagccgaggacgtacggcagttggtactccgagtccgagaagacctgaatcgtgctggtaaggttattagcgatggtcgtaacgccgtcgttcgtcgtgacctccttgacctggatgttgaacaacttgaaccgcagctttctgggccggaatccccagttgttgttgatgagtcgctgccagtcacgtggtgagaagtggcagtggaatctgttgaagtcaaaatagccccagggggtgctgtagctgaagaagtggttgtcgttggtagccccgctctgacttgatatctgcttgtagaggtggttgttgtaggtgggcagggcccaggtgcgggtgctggtggtgatgactctgtcgcccagccatgtggaatcgcaatgccaatttccggaggcattacccactccgtcggcgccttcgttattgtctgccattggtgcgccaccgcctgcagccattgtaccagatcccagacctgagggcgcggcgggaggttctccgagaggttgggggtcgggcactgactctgagtcgccagtctgcccaaagttgagcttctttttagcgggctgctggcctttcttgccgatgcccgtggaggagtcgggggattctatgggtctcttctttccaggagccgtcttagcgacttcctcaaccagaccgagaggttcgagaacccgcttcttggcctggaagactgctcgcccgaggttgcccccaaaagacgtatcttcttgaagacgctcctgaaactcggcgtcggcgtggttgtacttgaggtacgggttgtccccctgctcgagctgcttgtcgtaggccttgtcgtgctcgagggccgcggcgtctgcctcgttgaccggctctcccttgtcgagtccgttgaagggtctgaggtacttgtagccaggaagcaccagaccccggccgtcgtcctgcttttgctggttggctttgggtttcggggctccaggtttcaagtcccaccactcgcgaatgccctcagagaggttgtcctcgagccaatctggaagataaccatcggcagccatacctggtttaagtcatttattgctcagaaacacagtcatccaggtccacgttgaccagatcgcaggccgagcaagcaatctcgggagcccgccccagcagatgatgaatggcacagagtttccgatacgtcctctttctgacgaccggttgagattctgacacgccggggaaacattctgaacagtctctggtcccgtgcgtgaagcaaatgttgaaattctgattcactctctcgcatgtcttgcagggaaacagcatctgaagcatgcccgcgtgacgagaacatttgttttggtacctgtcggcaaagtccaccggagctccttccgcgtctgacgtcgatggattcgcgactgaggggcaggcccgcttgggctcgcttttatccgcgtcatcgggggcgggtctcttgttggccccaccctttctgacgtagaacccatgcgccacctcggtcacgtgatcctgcgcccagcggaagaaccttttgacttcctgctttgtcaccttgccaaagttatgctccagacggcgggtgggttcaaatttgaacatccggtcctgcaacggctgctggtgctcgaaggtggcgctgttcccgtcaatcacggcgcacatgttggtgttggaggtgacggtcacgggggtggggtcgatctgggcggacgacttgcacttttggtccacgcgcaccttgctgccgccgagaatggccttggcggactccacgaccttggccgtcatcttgccctcctcccaccagatcaccatcttgtcggcgcaatcgttgaagggaaagttctcattggtccagttgacgcagccgtagaaagggcgaattc

SEQ ID NO: 143 - protein, 728 aa, Artificial Sequence
  Description of Artificial Sequence: Synthetic polypeptide
MAADGYLPDWLEDNLSEGIREWWDLKPGAPKPKANQQKQDDGRGLVLPGYKYLGPFNGLDKGEPVNEADAAALEHDKAYDKQLEQGDNPYLKYNHADAEFQERLQEDTSFGGNLGRAVFQAKKRVLEPLGLVEEGAKTASGKKRPIESPDSSTGIGKKGQQPAKKKLNFGQTGDSESVPDPQPLGEPPAAPSGLGSGTMAAGGGAPMADNNEGADGVGNASGNWHCDSTWLGDRVITTSTRTWALPTYNNHLYKQISSQSGATNDNHFFGYSTPWGYFDFNRFHCHFSPRDWQRLINNNWGFRPRKLRFKLFNIQVKEVTTNDGVTTIANNLTSTIQVFSDSEYQLPYVLGSAHQGCLPPFPADVFMIPQYGYLTLNNGSQSVGRSSFCCLEYFPSQMLRTGNNFEFSYTFEEVPFHSSYAHSQSLDRLMNPLIDQYLYYLARTQSTTGSTRELQFHQAGPNTVAEQSKNWLPGPCYRQQRLSKNIDSNNNSNFAWTGATKYHLNGRNSLTNPGVAMATNKDDEDQFLPINGVLVFGKTGAANKTTLENVLMTSEEEIKTTNPVATEEYGVVSSNLQSSTAGPRTQTVNSQGALPGMVWQNRDVYLQGPIWAEIPHTDGNFHPSPLMGGFGLKHPPPQILIKNTPVPANPPEVFTPAKFASFITQYSTGQVSVEIEWELQKENSKRWNPEIQYTSNYAKSNNVEFAVNNEGVYTEPRPIGTRYLTRNL

SEQ ID NO: 144 - DNA, 3102 bp, Adeno-associated virus
gcggccgcgaattcgcccttcgcagagaccaaagttcaactgaaacgaatcaaccggtttattgattaacaagtaattacaggttacgggtgaggtaacgggtgccaatggggcgaggctcagtataaaccccttcgttgttgacagcaaattccacattattagacttggcataatttgaggtgtactgaatctctggattccagcgtttgctgttttctttctgcagttcccactcgatctccacgctgacctggccggtgctgtactgcgtgataaatgaggcaaacttggcaggagtaaacacctctggaggattagcaggtaccggggtgtttttgatgagaatttgaggaggcgggtgtttgagtccaaatccgcccatcaggggagacgggtgaaagttgccgtccgtgtgaggaatttcggcccagatgggaccctgcaggtacacgtcccggttctgccagaccatgccgggcagagccccctggctgttgacagtctgtgtccggggtccggccgtagacgattgcaggttgctggagaccacaccgtattcttctgtagccacgggattggtggttttgatctcctcctcgctggtcattagcacgttttccagcgttgtcttgttggcagcccccgttttgccaaaaaccagcactccgttgatgggaaggaactggtcctcgtcgtccttgttggtggccatggctacgcccgggttggttaatgaatttctaccattcagatggtatttagtggccccggtccaggcaaagttactgttgttgttgctgtctatgttttttgacagtctctgctgccgataacagggtccgggcagccagttctttgattgctcggccacggtgttgggcccagcctgatggaactgcagctcccttgtggaccccgtagtgctctgggtccgggccaggtagtacaggtactggtcgatgaggggattcatcagccggtccaggctctggctgtgcgcatagctgctgtggaaaggcacttcctcaaaggtgtagctgaattcaaagttattgcccgttctcagcatctgagaaggaaagtactccaggcagcagaaggaggaacgtcccacagactgactgccgttgtttagagtcagatatccgtactgaggaatcatgaacacgtccgcagggaacggagggaggcagccctggtgcgcagagccgaggacgtacggcagttggtactccgagtccgagaagacctgaatcgtgctggtaaggttattagcgatggtcgtaacgccgtcgttcgtcgtgacctccttgacctggatgttgaacaacttgaaccgcagctttctgggccggaatccccagttgttgttgatgagtcgctgccagtcacgtggtgagaagtggcagtggaatctgttgaagtcaaaatagccccagggggtgctgtagccgaagaagtggttgtcgttggtagccccgctctgacttgatatctgcttgtagaggtggttgttgtaggtgggcagggcccaggtgcgggtgctggtggtgatgactctgtcgcccagccatgtggaatcgcaatgccaatttccggaggcattacccactccgtcggcgccttcgttattgtctgccattggtgcgccaccgcctgcagccattgtaccagatcccagacctgagggcgcggcgggaggttctccgagaggttgggggtcgggcactgactctgagtcgccagtctgcccaaagttgagcttctttttagcgggctgctggcctttcttgccgatgcccgtggaggagtcgggggattctatgggtctcttctttccggaagccgtcttagcgccttcctcaaccagaccgagaggttcgagaacccgcttcttggcctggaagactgctcgcccgaggttgcccccaaaagacgtatcttcttgaagacgctcctgaaactcggcgtcggcgtggttgtacttgaggtacgggttgtccccctgctcgagctgcttgtcgtaggccttgtcgtgctcgagggccgcggcgtctgcctcgttgaccggctctcccttgtcgagtccgttgaagggtccgaggtacttgtagccaggaagcaccagaccccggccgtcgtcctgcttttgctggttggctttgggtttcggggctccaggtttcaagtcccaccactcgcgaatgccctcagagaggttgtcctcgagccaatctggaagataaccatcggcagccatacctggtttaagtcatttattgctcagaaacacagtcatccaggtccacgttgaccagatcgcaggccgagcaagcaatctcgggagcccgccccagcagatgatgaatggcacagagtttccgatacgtcctctttctgacgaccggttgagattctgacacgccggggaaacattctgaacagtctctggtcccgtgcgtgaagcaaatgttgaaattctgattcattctctcgcatgtcttgcagggaaacagcatctgaagcatgcccgcgtgacgagaacatttgttttggtacctgtcggcaaagtccaccggagctccttccgcgtctgacgtcgatggatccgcgactgaggggcaagcccgcttgggctcgcttttatccgcgtcatcgggggcgggtctcttgttggctccaccctttctgacgtagaactcatgcgccacctcggtcacgtgatcctgcgcccagcggaagaactctttgacttcctgctttgtcaccttgccaaagtcatgctccagacggcgggtgagttcaaatttgaacatccggtcttgtaacggctgctggtgctcgaaggtggtgctgttcccgtcaatcacggcgcacatgttggtgttggaagtgacgatcacgggggtgggatcgatctgggcggacgacttgcacttttggtccacgcgcaccttgctgccgccgagaatggccttggcggactccacgaccttggccgtcatcttgccctcctcccaccagatcaccatcttgtcgacgcaatcgttgaagggaaagttctcattggtccagttgacgcagccgaagggcgaattc

SEQ ID NO: 145 - protein, 728 aa, Adeno-associated virus
MAADGYLPDWLEDNLSEGIREWWDLKPGAPKPKANQQKQDDGRGLVLPGYRYLGPFNGLDKGEPVNEADAAALEHDKAYDKQLEQGDNPYLKYNHADAEFQERLQEDTSFGGNLGRAVFQAKKRVLEPLGLVEEGAKTAPGKKRPIESPDSSTGIGKNGQPPAKKKLNFGQTGDSESVPDPQPLGEPPAAPSGLGSGTMAAGGGAPMADNNEGADGVGNASGNWHCDSTWLGDRVITTSTRTWALPTYNNHLYKQISSQSGATNDNHFFGYSTPWGYFDFNRFHCHFSPRDWQRLINNNWGFRPRKLRFKLFNIQVKEVTTNDGVTTIANNLTSTIQVFSDSEYQLPYVLGSAHQGCLPPFPADVFMIPQYGYLTLNNGSQSVGRSSFYCLEYFPSQMLRTGNNFEFSYTFEEVPFHSSYAHSQSLDRLMNPLIDQYLYYLARTQSTTGSTRELQFHQAGPNTMAEQSKNWLPGPCYRQQRLSKNIDSNNNSNFAWTGATKYHLNGRNSLTNPGVAMATNKDDEDQFFPINGVLVFGKTGAANKTTLENVLMTSEEEIKTTNPVATEEYGVVSSNLQSSTAGPQTQTVNSQGALPGMVWQNRDVYLQGPIWAKIPHTDGNFHPSPLMGGFGLKHPPPQILIKNTPVPANPPEVFTPAKFASFITQYSTGQVSVEIEWELQKENSKRWNPEIQYTSNYAKSNNVEFAVNNEGVYTEPRPIGTRYLTRNL

SEQ ID NO: 146 - protein, 728 aa, Artificial Sequence
  Description of Artificial Sequence: Synthetic polypeptide
MAADGYLPDWLEGNLSEGIREWWDLKPGAPKPKANQQKQDDGRGLVLPGYRYLGPFNGLDKGEPVNEADAAALEHDKAYDKQLEQGDNPYLKYNHADAEFQERLQEDTSFGGNLGRAVFQAKKRVLEPLGLVEEGAKTAPGKKRPIESPDSSTGIGKNGQPPAKKKLNFGQTGDSESVPDPQPLGEPPAAPSGLGSGTMAAGGGAPMADNNEGADGVGNASGNWHCDSTWLGDRVITTSTRTWALPTYNNHLYKQISSQSGATNDNHFFGYSTPWGYFDFNRFHCHFSPRDWQRLINNNWGFRPRKLRFKLFNIQVKEVTTNDGVTTIANNLTSTIQVFSDSEYQLPYVLGSAHQGCLPPFPADVFMIPQYGYLTLNNGSQSVGRSSFYCLEYFPSQMLRTGDNFEFSYTFEEVPFHSSYAHSQSLDRLMNPLIDQYLYYLARTQSTTGSTRELQFHQAGPNTMAEQSKNWLPGPCYRQQRLSKNIDSNNNSNFAWTGATKYHLNGRNSLTNPGVAMATNKDDEDQFFPINGVLVFGKTGAANKTTLENVLMTSEEEIKTTNPVATEEYGVVSSNLQSSTAGPQTQTVNSQGALPGMVWQNRDVYLQGPIWAKIPHTDGNFHPSPLMGGFGLKHPPPQILIKNTPVPANPPEVFTPAKFASFITQYSTGQVSVEIEWELQKENSKRWNPEIQYTSNYAKSNNVEFAVNNEGVYTEPRPIGTRYLTRNL

SEQ ID NO: 147 - DNA, 3106 bp, Adeno-associated virus
gcggccgcgaattcgcccttcgcagagaccaaagttcaactgaaacgaatcagccggtttattgattaacaagtaattacaggttacgggtgaggtaacgggtgccaatggggcgaggctcagtataaaccccttcgttgttgacagcaaattccacattattagacttggcataatttgaggtgtactgaatctctggattccagcgtttgctgttttctttctgcagttcccactcgatctccacgctgacctggccggtgctgtactgcgtgataaatgaggcaaacttggcaggagtaaacacctctggaggattagcaggtaccggggtgtttttgatgagaatttgaggaggcgggtgtttgagtccaaatccgcccatcaggggagacgggtgaaagttgccgtccgtgtgaggaattttggcccagatgggaccctgcaggtacacgtcccggttctgccagaccatgccgggcagagccccctggctgttgacagtctgtgtctggggtccggccgtagacgattgcaggttgctggagaccacaccgtattcttctgtagccacgggattggtggttttgatctcctcctcgctggtcattagcacgttttccagcgttgtcttgttggcagcccccgttttgccaaaaaccagcactccgttgatgggaaagaactggtcctcgtcgtccttgttggtggccatggctacgcccgggttggttaatgaatttctaccattcagatggtatttagtggccccggtccaggcaaagttactgttgttgttgctgtctatgttttttgacagtctctgctgccgataacagggtccgggcagccagttctttgattgctcggccatggtgttgggcccagcctgatggaactgcagctcccttgtggaccccgtagtgctctgggtccgggccaggtagtacaggtactggtcgatgaggggattcatcagccggtccaggctctggctgtgcgcatagctgctgtggaaaggcacttcctcaaaggtgtagctgaattcaaagttatcgcccgttctcagcatctgagaaggaaagtactccaggcagtagaaggaggaacgtcccacagactgactgccgttgtttagagtcagatatccgtactgaggaatcatgaacacgtccgcagggaacggagggaggcagccctggtgcgcagagccgaggacgtacggcagttggtactccgagtccgagaagacctgaatcgtgctggtaaggttattagcgatggtcgtaacgccgtcgttcgtcgtgacctccttgacctggatgttgaacaacttgaaccgcagctttctgggccggaatccccagttgttgttgatgagtcgctgccagtcacgtggtgagaagtggcagtggaatctgttgaagtcaaaatagccccagggggtgctgtagccgaagaagtggttgtcgttggtagccccgctctgacttgatatctgcttgtagaggtggttgttgtaggtgggcagggcccaggtgcgggtgctggtggtgatgactctgtcgcccagccatgtggaatcgcaatgccaatttccggaggcattacccactccgtcggcgccttcgttattgtctgccattggtgcgccaccgcctgcagccattgtaccagatcccagacctgagggcgcggcgggaggttctccgagaggttgggggtcgggcactgactctgagtcgccagtctgcccaaagttgagcttctttttagcgggcggctggccgttcttgccgatgcccgtggaggagtcgggggattctatgggtctcttctttccaggagccgtcttagcgccttcctcaaccagaccgagaggttcgagaacccgcttcttggcctggaagactgctcgcccgaggttgcccccaaaagacgtatcttcttgaagacgctcctgaaactcggcgtcggcgtggttgtacttgaggtacgggttgtccccctgctcgagctgcttgtcgtaggccttgtcgtgctcgagggccgcggcgtctgcctcgttgaccggctctcccttgtcgagtccgttgaagggtccgaggtacctgtagccaggaagcaccagaccccggccgtcgtcctgcttttgctggttggctttgggtttcggggctccaggtttcaagtcccaccactcgcgaatgccctcagagaggttgccctcgagccaatctggaagataaccatcggcagccatacctggtttaagtcatttattgctcagaaacacagtcatccaggtccacgttggccagatcgcaggccgagcaagcaatctcgggagcccgccccagcagatgatgaatggcacagagtttccgatacgtcctctttctgacgaccggttgagattctgacacgccggggaaacattctgaacagtctctggtcccgtgcgtgaagcaaatgttgaaattctgattcattctctcgcatgtcttgcaggggaacagcatctgaagcatgcccgcgtgacgagaacatttgttttggtacctgtcggcaaagtccaccggagctccttccgcgtctgacgtcgatggatccgcgactgaggggcaggcccgcttgggctcgcttttatccgcgtcatcgggggcgggtctcttgttggctccaccctttctgacgtagaactcatacgccacctcggtcacgtgatcctgcgcccagcggaagaactctttgacttcctgctttgtcaccttgccaaagtcatgctccagacggcgggtgagttcaaatttgaacatccggtcttgtaacggctgctggtgctcgaaggtggtgctgttcccgtcaatcacggcgcacatgttggtgttggaagtgacgatcacgggggtgggatcgatctgggcggacgacttgcacttttggtccacgcgcaccttgctgccgccgagaatggccttggcggactccacgaccttggccgtcatcctgccctcctcccaccagatcaccatcttgtcgacgcaatcgttgaagggaaagttctcattggtccagttgacgcagccgtagaaagggcgaattc

SEQ ID NO: 148 - protein, 728 aa, Artificial Sequence
  Description of Artificial Sequence: Synthetic polypeptide
MAADGYLPDWLEDNLSEGIREWWDLKPGAPKPKANQQKQDDGRGLVLPGYKYLGPFNGLDKGEPVNEADAAALEHDKAYDKQLEQGDNPYLKYNHADAEFQERLQEDTSFGGNLGRAVFQAKKRVLEPLGLVEEGAKTAPGKKRPIESPDSSTGIGKKGQQPAKKKLNFGQTGDSESVPDPQPLGEPPAAPSGLGSGTMAAGGGAPMADNNEGADGVGNASGNWHCDSTWLGDRVITTSTRTWALPTYNNHLYKQISSQSGATNDNHFFGYSTPWGYFDFNRFHCHFSPRDWQRLINNNWGFRPRKLRFKLFNIQVKEVTTNDGVTTIANNLTSTIQVFSDSEYQLPYVLGSAHQGCLPPFPADVFMIPQYGYLTLNNGSQSMGRSSFYCLEYFPSQMLRTGNNFEFSYTFEEVPFHSSYAHSQSLDRLMNPLIDQYLYYLARTQSTTGSTRELQFHQAGPNTMAEQSKNWLPGPCYRQQRLSKNIDSNNNSNFAWTGATKYHLNGRNSLTNPGVAMATNKDDEGQFFPINGVLVFGKTGAANKTTLENVLMTSEEEIKTTNPVATEEYGVVSSNLQSSTAGPQTQTVNSQGALPGMVWQNRDVYLQGPIWAKIPHTDGNFHPSPLMGGFGLKHPPPQILIKNTPVPANPPGVFTPALFASFITQYSTGQVSVEIEWELQKENSKRWNPEIQYTSNYAKSNNVEFAVNNEGVYTEPRPIGTRYLTRNL

SEQ ID NO: 149 - DNA, 3098 bp, Adeno-associated virus
gaattcgcccttcgcagagaccaaagttcaactgaaacgaatcaaccggtttattgattaacaagtaattacaggttacgggtgaggtaacgggtgccaatggggcgaggctcagtataaaccccttcgttgttgacagcaaattccacattattagacttggcataatttgaggtgtactgaatctctggattccagcgtttgctgttttctttctgcagttcccactcgatctccacgctgacctggccggtgctgtactgcgtgataaatgaggcaaactaggcaggagtaaacacccctggaggattagcaggtaccggggtgtttttgatgagaatttgaggaggcgggtgtttgagtccaaatccgcccatcaggggagacgggtgaaagttgccgtccgtgtgaggaattttggcccagatgggaccctgcaggtacacgtcccggttctgccagaccatgccgggcagagccccctggctgttgacagtctgtgtctggggtccggccgtagacgattgcaggttgctggagaccacaccgtattcttctgtagccacgggattggtggttttgatctcctcctcgctggtcattagcacgttttccagcgttgtcttgttggcagcccccgttttgccaaaaaccagcactccgttgatgggaaagaactggccctcgtcgtccttgttggtggccatggctacgcccgggttggttaatgaatttctaccattcagatggtatttagtggccccggtccaggcaaagttactgttgttgttgctgtctatgttttttgacagtctctgctgccgataacagggtccgggcagccagttctttgattgctcggccatggtgttgggcccagcctgatggaactgcagctcccttgtggaccccgtagtgctctgggtccgggccaggtagtacaggtactggtcgatgaggggattcatcagccggtccaggctctggctgtgcgcatagctgctgtggaaaggcacttcctcaaaggtgtagctgaattcaaagttattgcccgttctcagcatctgagaaggaaagtactccaggcagtagaaggaggaacgtcccatagactgactgccgttgtttagagtcagatatccgtactgaggaatcatgaacacgtccgcagggaacggagggaggcagccctggtgcgcagagccgaggacgtacggcagttggtactccgagtccgagaagacctgaatcgtgctggtaaggttattagcgatggtcgtaacgccgtcgttcgtcgtgacctccttgacctggatgttgaacaacttgaaccgcagctttctgggccggaatccccagttgttgttgatgagtcgctgccagtcacgtggtgagaagtggcagtggaatctgttgaagtcaaaatagccccagggggtgctgtagccgaagaagtggttgtcgttggtagccccgctctgacttgatatctgcttgtagaggtggttgttgtaggtgggcagggcccaggtgcgggtgctggtggtgatgactctgtcgcccagccatgtggaatcgcaatgccaatttccggaggcattacccactccgtcggcgccttcgttattgtctgccattggtgcgccaccgcctgcagccattgtaccagatcccagacctgagggcgcggcgggaggttctccgagaggttgggggtcgggcactgactctgagtcgccagtctgcccaaagttgagcttctttttagcgggctgctggcctttcttgccgatgcccgtggaggagtcgggggattctatgggtctcttctttccaggagccgtcttagcgccttcctcaaccagaccgagaggttcgagaacccgcttcttggcctggaagactgctcgcccgaggttgcccccaaaagacgtatcttcttgaagacgctcctgaaactcagcgtcggcgtggttgtacttgaggtacgggttgtccccctgctcgagctgcttgtcgtaggccttgtcgtgctcgagggccgcggcgtctgcctcgttgaccggctctcccttgtcgagtccgttgaagggtccgaggtacttgtagccaggaagcaccagaccccggccgtcgtcctgcttttgctggttggctttgggtttcggggctccaggtttcaagtcccaccactcgcgaatgccctcagagaggttgtcctcgagccaatctggaagataaccatcggcagccatacctggtttaagtcatttattgctcagaaacacagtcatccaggtccacgttgaccagatcgcaggccgagcaagcaatctcgggagcccgccccagcagatgatgaatggcacagagtttccgatacgtcctctttctgacgaccggttgagattctgacacgccggggaaacattctgaacagtctctggtcccgtgcgtgaagcaaatgttgaaattctgattcattctctcgcatgtcttgcagggaaacagcatctgaagcatgcccgcgtgacgagaacatttgttttggtacctgtcggcaaagtccaccggagctccttccgcgtctgacgtcgatggatccgcgactgaggggcaggcccgcttgggctcgcttttatccgcgtcatcgggggcgggcctcttgttggctccaccctttctgacgtagaactcatgcgccacctcggtcacgtgatcctgcgcccagcggaagaactctttgacttcctgctttgtcaccttgccaaagtcctgctccagacggcgggtgagttcaaatttgaacatccggtcttgtaacggctgctggtgctcgaaggtggtgctgttcccgtcaatcacggcgcacatgttggtgttggaagtgacgatcacgggggtgggatcgatctgggcggacgacttgcacttttggtccacgcgcaccttgctgccgccgagaatggccttggcggactccacgaccttggccgtcatcttgccctcctcccaccagatcaccatcttgtcgacgcaatcgttgaagggaaagttctcattggtccagttgacgcagccgtagaaagggcgaattc

SEQ ID NO: 150 - DNA, 2187 bp, Adeno-associated virus
atggctgccgatggttatcttccagattggctcgagggcaacctctctgagggcattcgcgagtggtgggacttgaaacctggagccccgaaacccaaagccaaccagcaaaagcaggacgacggccggggtctggtgcttcctggctacaggtacctcggacccttcaacggactcgacaagggagagccggtcaacgaggcagacgccgcggccctcgagcacgacaaggcctacgacaagcagctcgagcagggggacaacccgtacctcaagtacaaccacgccgacgccgagtttcaggagcgtcttcaagaagatacgtcttttgggggcaacctcgggcgagcagtcttccaggccaagaagcgggttctcgaacctctcggtctggttgaggaaggcgctaagacggctcctggaaagaagagacccatagaatcccccgactcctccacgggcatcggcaagaacggccagccgcccgctaaaaagaagctcaactttgggcagactggcgactcagagtcagtgcccgacccccaacctctcggagaacctcccgccgcgccctcaggtctgggatctggtacaatggctgcaggcggtggcgcaccaatggcagacaataacgaaggcgccgacggagtgggtaatgcctccggaaattggcattgcgattccacatggctgggcgacagagtcatcaccaccagcacccgcacctgggccctgcccacctacaacaaccacctctacaagcagatatcaagtcagagcggggctaccaacgacaaccacttcttcggctacagcaccccctggggctattttgacttcaacagattccactgccacttctcaccacgtgactggcagcgactcatcaacaacaactggggattccggcccagaaagctgcggttcaagttgttcaacatccaggtcaaggaggtcacgacgaacgacggcgttacgaccatcgctaataaccttaccagcacgattcaggtcttctcggactcggagtaccaactgccgtacgtcctcggctctgcgcaccagggctgcctccctccgttccctgcggacgtgttcatgattcctcagtacggatatctgactctaaacaacggcagtcagtctgtgggacgttcctccttctactgcctggagtactttccttctcagatgctgagaacgggcgataactttgaattcagctacacctttgaggaagtgcctttccacagcagctatgcgcacagccagagcctggaccggctgatgaatcccctcatcgaccagtacctgtactacctggcccggacccagagcactacggggtccacaagggagctgcagttccatcaggctgggcccaacaccatggccgagcaatcaaagaactggctgcccggaccctgttatcggcagcagagactgtcaaaaaacatagacagcaacaacaacagtaactttgcctggaccggggccactaaataccatctgaatggtagaaattcattaaccaacccgggcgtagccatggccaccaacaaggacgacgaggaccagttctttcccatcaacggagtgctggtttttggcaaaacgggggctgccaacaagacaacgctggaaaacgtgctaatgaccagcgaggaggagatcaaaaccaccaatcccgtggctacagaagaatacggtgtggtctccagcaacctgcaatcgtctacggccggaccccagacacagactgtcaacagccagggggctctgcccggcatggtctggcagaaccgggacgtgtacctgcagggtcccatctgggccaaaattcctcacacggacggcaactttcacccgtctcccctgatgggcggatttggactcaaacacccgcctcctcaaattctcatcaaaaacaccccggtacctgctaatcctccagaggtgtttactcctgccaagtttgcctcatttatcacgcagtacagcaccggccaggtcagcgtggagatcgagtgggaactgcagaaagaaaacagcaaacgctggaatccagagattcagtacacctcaaattatgccaagtctaataatgtggaatttgctgtcaacaacgaaggggtttatactgagcctcgccccattggcacccgttacctcacccgtaacctgtaa

SEQ ID NO: 151 - protein, 728 aa, Adeno-associated virus; identical to SEQ ID NO: 146

SEQ ID NO: 152 - protein, 728 aa, Adeno-associated virus
MAADGYLPDWLEDNLSEGIREWWDLKPGAPKPKANQQKQDDGRGLVLPGYRYLGPFNGLDKGEPVNEADAAALEHDKAYDKQLEQGDNPYLKYNHADAEFQERLQEDTSFGGNLGRAVFQAKKRVLEPLGLVEEGAKTAPGKKRPIESPDSSTGIGKNGQPPAKKKLNFGQTGDSESVPDPQPLGEPPAAPSGLGSGTMAAGGGAPMADNNEGADGVGNASGNWHCDSTWLGDRVITTSTRTWALPTYNNHLYKQISSQSGATNDNHFFGYSTPWGYFDFNRFHCHFSPRDWQRLINNNWGFRPRKLRFKLFNIQVKEVTTNDGVTTIANNLTSTIQVFSDSEYQLPYVLGSAHQGCLPPFPADVFMIPQYGYLTLNNGSQSVGRSSFYCLEYFPSQMLRTGDNFEFSYTFEEVPFHSSYAHSQSLDRLMNPLIDQYLYYLARTQSTTGSTRELQFHQAGPNTMAEQSKNWLPGPCYRQQRLSKNIDSNNNSNFAWTGATKYHLNGRNSLTNPGVAMATNKDDEDQFFPINGVLVFGKTGAANKTTLENVLMTSEEEIKTTNPVATEEYGVVSSNLQSSTAGPQTQTVNSQGALPGMVWQNRDVYLQGPIWAKIPHTDGNFHPSPLMGGFGLKHPPPQILIKNTPVPANPPEVFTPAKFASFITQYSTGQVSVEIEWELQKENSKRWNPEIQYTSNYAKSNNVEFAVNNEGVYTEPRPIGTRYLTRNL

SEQ ID NO: 153 - protein, 728 aa, Adeno-associated virus; identical to SEQ ID NO: 145

SEQ ID NO: 154 - protein, 728 aa, Adeno-associated virus
MAADGYLPDWLEDNLSEGIREWWDLKPGAPKPKANQQKQDDGRGLVLPGYKYLGPFNGLDKGEPVNEADAAALEHDKAYDKQLEQGDNPYLKYNHADAEFQERLQEDTSFGGNLGRAVFQAKKRVLEPLGLVEEGAKTAPGKKRPIESPDSSTGIGKNGQPPAKKKLNFGQTGDSESVPDPQPLGEPPAAPSGLGSGTMAAGGGAPMADNNEGADGVGNASGNWHCDSTWLGDRVITTSTRTWALPTYNNHLYKQISSQSGATNDNHFFGYSTPWGYFDFNRFHCHFSPRDWQRLINNNWGFRPRKLRFKLFNIQVKEVTTNDGVTTIANNLTSTIQVFSDSEYQLPYVLGSAHQGCLPPFPADVFMIPQYGYLTLNNGSQSVGRSSFYCLEYFPSQMLRTGNNFEFSYTFEEVPFHSSYAHSQSLDRLMNPLIDQYLYYLARTQSTTGSTRELQFHQAGPNTMAEQSKNWLPGPCYRQQRLSKNIDSNNNSNFAWTGATKYHLNGRNSLTNPGVAMATNKDDEDQFFPINGVLVFGKTGAANKTTLENVLMTSEEEIKTTNPVATEEYGVVSSNLQSSTAGPQTQTVNSQGALPGMVWQNRDVYLQGPIWAKIPHTDGNFHPSPLMGGFGLKHPPPQILIKNTPVPANPPEVFTPAKFASFITQYSTGQVSVEIEWELQKENSKRWNPEIQYTSNYAKSNNVEFAVNNEGVYTEPRPIGTRYLTRNL

SEQ ID NO: 155 - protein, 728 aa, Adeno-associated virus
MAADGYLPDWLEDNLSEGIREWWDLKPGAPKPKANQQKQDDGRGLVLPGYKYLGPFNGLDKGEPVNEADAAALEHDKAYDKQLEQGDNPYLKYNHADAEFQERLQEDTSFGGNLGRAVFQAKKRVLEPLGLVEEGAKTAPGKKRPIESPDSSTGIGKKGQQPAKKKLNFGQTGDSESVPDPQPLGEPPAAPSGLGSGTMAAGGGAPMADNNEGADGVGNASGNWHCDSTWLGDRVITTSTRTWALPTYNNHLYKQISSQSGATNDNHFFGYSTPWGYFDFNRFHCHFSPRDWQRLINNNWGFRPRKLRFKLFNIQVKEVTTNDGVTTIANNLTSTIQVFSDSEYQLPYVLGSAHQGCLPPFPADVFMIPQYGYLTLNNGSQSVGRSSFYCLEYFPSQMLRTGNNFEFSYTFEEVPFHSSYAHSQSLDRLMNPLIDQYLYYLARTQSTTGSTRELQFHQAGPNTMAEQSKNWLPGPCYRQQRLSKNIDSNNNSNFAWTGATKYHLNGRNSLTNPGVAMATNKDDEDQFFPINGVLVFGKTGAANKTTLENVLMTSEEEIKTTNPVATEEYGVVSSNLQSSTAGPQTQTVNSQGALPGMVWQNRDVYLQGPIWAKIPHTDGNFHPSPLMGGFGLKHPPPQILIKNTPVPANPPEVFTPAKFASFITQYSTGQVSVEIEWELQKENSKRWNPEIQYTSNYAKSNNVEFAVNNEGVYTEPRPIGTRYLTRNL

SEQ ID NO: 156 - DNA, 2215 bp, Artificial Sequence
  Description of Artificial Sequence: Synthetic polynucleotide
atggctgccgatggttatcttccagattggctcgaggacactctctctgaaggaataagacagtggtggaagctcaaacctggcccaccaccaccaaagcccgcagagcggcataaggacgacagcaggggtcttgtgcttcctgggtacaagtacctcggacccttcaacggactcgacaagggagagccggtcaacgaggcagacgccgcggccctcgagcacgacaaagcctacgaccggcagctcgacagcggagacaacccgtacctcaagtacaaccacgccgacgccgagttccaggagcggctcaaagaagatacgtcttttgggggcaacctcgggcgagcagtcttccaggccaaaaagaggcttcttgaacctcttggtctggttgaggaagcggctaagacggctcctggaaagaagaggcctgtagagcactctcctgtggagccagactcctcctcgggaaccggaaaggcgggccagcagcctgcaagaaaaagattgaattttggtcagactggagacgcagactcagtcccagaccctcaaccaatcggagaacctcccgcagccccctcaggtgtgggatctcttacaatggctgcaggcggtggcgcaccaatggcagacaataacgagggcgccgacggagtgggtaattcctcgggaaattggcattgcgattccacatggatgggcgacagagtcatcaccaccagcacccgaacctgggccctgcccacctacaacaaccacctctacaagcaaatctccaacagcacatctggaggatcttcaaatgacaacgcctacttcggctacagcaccccctgggggtattttgactttaacagattccactgccacttttcaccacgtgactggcagcgactcatcaacaacaactggggattccggcccaagagactcagcttcaagctcttcaacatccaggtcaaggaggtcacgcagaatgaaggcaccaagaccatcgccaataacctcaccagcaccatccaggtgtttacggactcggagtaccagctgccgtacgttctcggctctgcccaccagggctgcctgcctccgttcccggcggacgtgttcatgattccccagtacggctacctaacactcaacaacggtagtcaggccgtgggacgctcctccttctactgcctggaatactttccttcgcagatgctgagaaccggcaacaacttccagtttacttacaccttcgaggacgtgcctttccacagcagctacgcccacagccagagcttggaccggctgatgaatcctctgattgaccagtacctgtactacttgtctcggactcaaacaacaggaggcacgacaaatacgcagactctgggcttcagccaaggtgggcctaatacaatggccaatcaggcaaagaactggctgccaggaccctgttaccgccagcagcgagtatcaaagacatctgcggataacaacaacagtgaatactcgtggactggagctaccaagtaccacctcaatggcagagactctctggtgaatccgggcccggccatggcaagccacaaggacgatgaagaaaagtttttttcctcagagcggggttctcatctttgggaagcaaggctcagagaaaacaaatgtggacattgaaaaggtcatgattacagacgaagaggaaatcaggacaaccaatcccgtggctacggagcagtatggttctgtatctaccaacctccagagaggcaacagacaagcagctaccgcagatgtcaacacacaaggcgttcttccaggcatggtctggcaggacagagatgtgtaccttcaggggcccatctgggcaaagattccacacacggacggacattttcacccctctcccctcatgggtggattcggacttaaacaccctccgcctcagatcctgatcaagaacacgcctgtacctgcggatcctccgaccaccttcaaccagtcaaagctgaactctttcatcacccagtattctactggccaagtcagcgtggagatcgagtgggagctgcagaaggaaaacagcaagcgctggaaccccgagatccagtacacctccaactactacaaatctacaagtgtggactttgctgttaatacagaaggcgtgtactctgaaccccgccccattggcacccgttacctcacccgtaatctgtaa

SEQ ID NO: 157 - protein, 737 aa, Artificial Sequence
  Description of Artificial Sequence: Synthetic polypeptide
MAADGYLPDWLEDTLSEGIRQWWKLKPGPPPPKPAERHKDDSRGLVLPGYKYLGPFNGLDKGEPVNEADAAALEHDKAYDRQLDSGDNPYLKYNHADAEFQERLKEDTSFGGNLGRAVFQAKKRLLEPLGLVEEAAKTAPGKKRPVEHSPVEPDSSSGTGKAGQQPARKRLNFGQTGDADSVPDPQPIGEPPAAPSGVGSLTMAAGGGAPMADNNEGADGVGNSSGNWHCDSTWMGDRVITTSTRTWALPTYNNHLYKQISNSTSGGSSNDNAYFGYSTPWGYFDFNRFHCHFSPRDWQRLINNNWGFRPKRLSFKLFNIQVKEVTQNEGTKTIANNLTSTIQVFTDSEYQLPYVLGSAHQGCLPPFPADVFMIPQYGYLTLNNGSQAVGRSSFYCLEYFPSQMLKTGNNFQFTYTFEDVPFHSSYAHSQSLDRLMNPLIDQYLYYLSRTQTTGGTTNTQTLGFSQGGPNTMANQAKNWLPGPCYRQQRVSKTSADNNNSEYSWTGATKYHLNGRDSLVNPGPAMASHKDDEEKFFPQSGVLIFGKQGSEKTNVDIEKVMITDEEEIRTTNPVATEQYGSVSTNLQRGNRQAATADVNTQGVLPGMVWQDRDVYLQGPIWAKIPHTDGHFHPSPLMGGFGLKHPPPQILIKNTPVPADPPTTFNQSKLNSFITQYSTGQVSVEIEWELQKENSKRWNPEIQYTSNYYKSTSVDFAVNTEGVYSEPRPIGTRYLTRNL

SEQ ID NO: 158 - protein, 737 aa, Artificial Sequence
  Description of Artificial Sequence: Synthetic polypeptide
MAADGYLPDWLEDTLSEGIRQWWKLKPGPPPPKPAERHKDDSRGLVLPGYKYLGPFNGLDKGEPVNEADAAALEHDKAYDRQLDSGDNPYLKYNHADAEFQERLKEDTSFGGNLGRAVFQAKKRLLEPLGLVEEAAKTAPGKKRPVEHSPVEPDSSSGTGKAGQQPARKRLNFGQTGDADSVPDPQPIGEPPAAPSGVGSLTMAAGGGAPMADNNEGADGVGNSSGNWHCDSTWMGDRVITTSTRTWALPTYNNHLYKQISNSTSGGSSNDNAYFGYSTPWGYFDFNRFHCHFSPRDWQRLINNNWGFRPKRLSFKLFNIQVKEVTQNEGTKTIANNLTSTIQVFTDSEYQLPYVLGSAHQGCLPPFPADVFMIPQYGYLTLNNGSQAVGRSSFYCLEYFPSQMLKTGNNFQFTYTFEDVPFHSSYAHSQSLDRLMNPLIDQYLYYLSRTQTTGGTTNTQTLGFSQGGPNTMANQAKNWLPGPCYRQQRVSKTSADNNNSEYSWTGATKYHLNGRDSLVNPGPAMASHKDDEEKFFPQSGVLIFGKQGSEKTNVDIEKVMITDEEEIRTTNPVATEQYGSVSTNLQQGNTQAATADVNTQGVLPGMVWQDRDVYLQGPIWAKIPHTDGHFHPSPLMGGFGLKHPPPQILIKNTPVPADPPTTFNQSKLNSFITQYSTGQVSVEIEWELQKENSKRWNPEIQYTSNYYKSTSVDFAVNTEGVYSEPRPIGTRYLTRNL

SEQ ID NO: 159 - protein, 737 aa, Artificial Sequence
  Description of Artificial Sequence: Synthetic polypeptide
MAADGYLPDWLEDTLSEGIRQWWKLKPGPPPPKPAERHKDDSRGLVLPGYKYLGPFNGLDKGEPVNEADAAALEHDKAYDRQLDSGDNPYLKYNHADAEFQERLKEDTSFGGNLGRAVFQAKKRLLEPLGLVEEAAKTAPGKKRPVEHSPVEPDSSSGTGKAGQQPARKRLNFGQTGDADSVPDPQPIGEPPAAPSGVGSLTMAAGGGAPMADNNEGADGVGNSSGNWHCDSTWMGDRVITTSTRTWALPTYNNHLYKQISNSTSGGSSNDNAYFGYSTPWGYFDFNRFHCHFSPRDWQRLINNNWGFRPKRLSFKLFNIQVKEVTQNEGTKTIANNLTSTIQVFTDSEYQLPYVLGSAHQGCLPPFPADVFMIPQYGYLTLNNGSQAVGRSSFYCLEYFPSQMLRTGNNFQFTYTFEDVPFHSSYAHSQSLDRLMNPLIDQYLYYLSRTQTTGGTTNTQTLGFSQGGPNTMANQAKNWLPGPCYRQQRVSKTSADNNNSEYSWTGATKYHLNGRDSLVNPGPAMASHKDDEEKFFPQSGVLIFGKQGSEKTNVDIEKVMITDEEEIRTTNPVATEQYGSVSTNLQQGNTQAATADVNTQGVLPGMVWQDRDVYLQGPIWAKIPHTDGHFHPSPLMGGFGLKHPPPQILIKNTPVPADPPTTFNQSKLNSFITQYSTGQVSVEIEWELQKENSKRWNPEIQYTSNYYKSTSVDFAVNTEGVYSEPRPIGTRYLTRNL

SEQ ID NO: 160 - protein, 729 aa, Artificial Sequence
  Description of Artificial Sequence: Synthetic polypeptide
MAADGYLPDWLEDNLSEGIREWWDLKPGAPKPKANQQKQDDGRGLVLPGYKYLGPFNGLDKGEPVNAADAAALEHDKAYDQQLKAGDNPYLRYNHADAEFQERLQEDTSFGGNLGRAVFQAKKRVLEPLGLVEEGAKTAPGKKRPIDSPDSSTGIGKKGQQPAKKKLNFGQTGDSESVPDPQPLGEPPAAPSSVGSGTMAAGGGAPTADNNEGADGVGNASGNWHCDSTWLGDRVITTSTRTWALPTYNNHLYKQISSSSSGATNDNHYFGYSTPWGYFDFNRFHCHFSPRDWQRLINNNWGFRPKKLRFKLFNIQVKEVTTNDGVTTIANNLTSTVQVFSDSEYQLPYVLGSAHQGCLPPFPADVFMIPQYGYLTLNNGSQSVGRSSFYCLEYFPSQMLRTGNNFEFSYSFEDVPFHSSYAHSQSLDRLMNPLIDQYLYYLARTQSTTGSTRELQFHQAGPNTMAEQSKNWLPGPCYRQQRLSKNLDFNNNSNFAWTAATKYHLNGRNSLTNPGIPMATNKDDEDQFFPINGVLVFGKTGAANKTTLENVLMTSEEEIKTTNPVATEEYGVVSSNLQSSTAGPQSQTINSQGALPGMVWQNRDVYLQGPIWAKIPHTDGNFHPSPLMGGFGLEHPPPQILIKNTPVPANPPEVFTPAKFASFITQYSTGQVSVEIEWELQKENSKRWNPEIQYTSNYAKSNNVEFAVNPDGVYTEPRPIGTRYLTRNL

SEQ ID NO: 161 - DNA, 3075 bp, Adeno-associated virus
tgagaactttcctttcaacgattgcgtcggacaagatggtgatctggtgggaggaggggaagatgaccgccaaggtcgtggagtcggccaaagccattcttggaggaagcaaggtgcgtgtggaccagaaatgcaagtcctcggcccagatagacccgactcccgtgatcgtcacctccaacaccaacatgtgcgccgtgattgacgggaactcaacgaccttcgagcaccagcagccgttgcaagaccggatgttcaaatttgaacttacccgccgtctggatcatgactttggaaaggtcaccaagcaggaagtgaaagactttttccggtgggcaaaggatcacgtggttgaggtggagcatgaattctacgtcaaaaagggtggagctaagaaaagacccgcccccagtgacgcagatataagtgagcccaaacgggcgcgcgagtcagttgcgcagccatcaacgtcagacgcggaagcttcgatcaactacgcggacaggtaccaaaaacaaatgttctcgtcacgtgggcatgaatctgatgctgtttccctgcagacaatgcgagagaatgaatcagaattcaaatatctgcttcactcacggacagaaagactgtttagagtgctttcccgtgtcagaatctcaacccgtttctgtcgtcaaaaaggcgtatcagaaactgtgctacattcatcatatcatgggaaaggtgccagacgcttgcactgcctgcgatctggtcaatgtggatttggatgactgcatctctgaacaataaatgatttaaatcaggtatggctgccgatggttatcctccagattggctcgaggacactctctctgaagggataagacagtggtggaagctcaaacctggcccaccaccaccaaagcccgcagagcggcataaggacgacagcaggggtcttgtgcttcctgggtacaagtacctcggacccttcaacggactcgacaagggggagccggtcaacgaggcagacgccgcggccctcgagcacgacaaggcctacgaccggcagctcgacagcggagacaacccgtacctcaagtacaaccacgccgacgcagagtttcaggagcgccttaaagaagatacgtcttttgggggcaacctcggacgagcagtcttccaggcgaaaaagagggttcttgaacctctgggcctggttgaggaacctgttaagacggctccgggaaaaaagaggccggtagagcactctcctgtggagccagactcctcctcgggaaccggaaaagcgggccagcggcctgcaagaaaaagattaaattttggtcagactggagacgcagactccgtacctgacccccagcctctcggacagccaccagcagccccctctggtctgggatctactacaatggctacaggcagtggcgcaccaatggcagacaataacgagggtgccgatggagtgggtaattcctcaggaaattggcattgcgattcccaatggctgggcgacagagtcatcaccaccagcacccgaacctgggccctgcccacatacaacaaccacctctacaagcaaatctccagccaatcaggagccagcaacgacaaccactactttggctacagcaccccctgggggtattttgacttcaacagattccactgccacttttcaccacgtgactggcaaagactcatcaacaacaactggggattccggcccaaaagactcaacttcaagctctttaatattcaagtcaaagaggtcacgcagaatgacggtacgacgacgattgccaataaccttaccagcacggttcaggtgtttactgactcggagtaccagctcccgtacgtcctgggctcggcgcatcaaggatgcctcccgccgtttccagcggacgtcttcatggtcccacagtatggatacctcaccctgaacaacgggagtcaggcggtaggacgctcttccttttactgcctggagtactttccttctcagatgctgcgtactggaaacaactttcagttcagctacacttttgaagacgtgcctttccacagcagctacgctcacagccagagtctggatcggctgatgaatcctctgatcgaccagtacctgtattatctgaacaagacacaaacaaatagtggaactcttcagcagtctcggctactgtttagccaagctggaccaaccaacatgtctcttcaagctaaaaactggctgcctggaccttgctacagacagcagcgtctgtcaaaacaggcaaacgacaacaacaacagcaactttccctggactgcagctacaaagtatcatctaaatggccgggactcgttggttaatccaggaccagctatggccagtcacaaggatgacgaagaaaagtttttccccatgcatggaaccctgatatttggtaaacaaggaacaaatgccaacgacgcggatttggaaaatgtcatgattacagatgaagaagaaatcagggccaccaatcccgtggctacggagcagtacgggactgtgtcaaataatttgcaaaactcaaacactggtccaactactggaactgtcaatcgccaaggagcgttacctggtatggtgtggcaggatcgagacgtgtacctgcagggacccatttgggccaagattcctcacaccgatggacactttcatccttctccactgatgggaggttttggactcaaacacccgcctcctcagatcatgatcaaaaacactcccgttccagccaatcctcccacaaacttcagttctgccaagtttgcttctttcatcacacagtattccacgggacaggtcagcgtggagatcgagtgggagctgcagaaggagaacagcaaacgctggaatcccgaaattcagtacacttccaactacaacaagtctgttaatgtggactttactgtggacactaatggtgtgtattcagagcctcgccccattggcaccagatacctgactcgtaatctgtaattgcttgttaatcaataaaccgtttaattcgtttcagttgaactttggtctctgcgaagggcgaa

SEQ ID NO: 162 - DNA, 3142 bp, Adeno-associated virus
aaaacgacgggccagtgattgtaatacgactcactatagggcgaaattgaaattagcggccgcgaattcgcctttcgcagagaccaaagttcaactgaaacgaattaaacggtttattgattaacaagcaattacagattacgagtcaggtatctggtgccaatggggcgaggctctgaatacacaccattagtgtccacagtaaagtccacattaacagacttgttgtagttggaagtgtactgaatttcgggattccagcgtttgctgttctccttctgcagctcccactcgatctccacgctgacctgtcccgtggaatactgtgtgatgaaagaagcaaacttggcagaactgaagtttgtgggaggattggctggaacgggagtgtttttgatcatgatctgaggaggcgggtgtttgagtccaaaacctcccatcagtggagaaggatgaaagtgtccatcggtgtgaggaatcttggcccaaatgggtccctgcaggtacacgtctcgatcctgccacaccataccaggtaacgctccttggtgattgacagttccagtagttggaccagtgtttgagttttgcaaattatttgacacagtcccgtactgctccgtagccacgggattggtggccctgatttcttcttcatctgtaatcatgacattttccaaatccgcgtcgttggcatttgttccttgtttaccaaatatcagggttccatgcatggggaaaaacttttcttcgtcatccttgtgactggccatagctggtcctggattaaccaacgagtcccggccatttagatgatactttgtagctgcagtccagggaaagttgctgttgttgttgtcgtttgcctgttttgacagacgctgctgtctgtagcaaggtccaggcagccagtttttagcttgaagagacatgttggttggtccagcttggctaaacagtagccgagactgctgaagagttccactatttgtttgtgtcttgttcagataatacaggtactggtcgatcagaggattcatcagccgatccagactctggctgtgagcgtagctgctgtggaaaggcacgtcttcaaaagtgtagctgaactgaaagttgtttccagtacgcagcatctgagaaggaaagtactccaggcagtaaaaggaagagcgtcctaccgcctgactcccgttgttcagggtgaggtatccatactgtgggaccatgaagacgtccgctggaaacggcgggaggcatccttgatgcgccgagcccaggacgtacgggagctggtactccgagtcagtaaacacctgaaccgtgctggtaaggttattggcaatcgtcgtcgtaccgtcattctgcgtgacctctttgacttgaatattaaagagcttgaagttgagtcttttgggccggaatccccggttgttgttgacgagtctttgccagtcacgtggtgaaaagtggcagtggaatctgttgaagtcaaaatacccccagggggtgctgtagccaaagtagtggttgtcgttgctggctcctgattggctggagatttgcttgtagaggtggttgttgtatgtgggcagggcccaggttcgggtgctggtggtgatgactctgtcgcccagccattgggaatcgcaatgccaatttcctgaggaattacccactccatcggcaccctcgttattgtctgccattggtgcgccactgcctgtagccattgtagtagatcccagaccagagggggctgctggtggctgtccgagaggctgggggtcaggtacggagtctgcgtctccagtctgaccaaaatttaatctttttcttgcaggctgctggcccgcttttccggttcccgaggaggagtctggctccacaggagagtgctctaccggcctcttttttcccggagccgtcttaacaggctcctcaaccaggcccagaggttcaagaaccctctttttcgcctggaagactgctcgtccgaggttgcccccaaaagacgtatcttctttaaggcgctcctgaaactctgcgtcggcgtggttgtacttgaggtacgggttgtctccgctgtcgagctgccggtcgtaggccttgtcgtgctcgagggccgcggcgtctgcctcgttgaccggctcccccttgtcgagtccgttgaagggtccgaggtacttgtacccaggaagcacaagacccctgctgtcgtccttatgccgctctgcgggctttggtggtggtgggccaggtttgagcttccaccactgtcttattccttcagagagagtgtcctcgagccaatctggaagataaccatcggcagccatacctgatttaaatcatttattgttcagagatgcagtcatccaaatccacattgaccagatcgcaggcagtgcaagcgtctggcacctttcccatgatatgatgaatgtagcacagtttctgatacgcctttttgacgacagaaacgggttgagattctgacacgggaaagcactctaaacagtctttctgtccgtgagtgaagcagatatttgaattctgattcattctctcgcattgtctgcagggaaacagcatcagattcatgcccacgtgacgagaacatttgttttggtacctgtccgcgtagttgatcgaagcttccgcgtctgacgtcgatggctgcgcaactgactcgcgcgcccgtttgggctcacttatatctgcgtcactgggggcgggtcttttcttagctccaccctttttgacgtagaattcatgctccacctcaaccacgtgatcctttgcccaccggaaaaagtctttcacttcctgcttggtgacctttccaaagtcatgatccagacggcgggtaagttcaaatttgaacatccggtcttgcaacggctgctggtgctcgaaggtcgttgagttcccgtcaatcacggcgcacatgttggtgttggaggtgacgatcacgggagtcgggtctatctgggccgaggacttgcatttctggtccacacgcaccttgcttcctccaagaatggctttggccgactccacgaccttggcggtcatcttcccctcctcccaccagatcaccatcttgtcgacgcaatggtaaaaggaaagttctcattgg

SEQ ID NO: 163 - protein, 735 aa, Adeno-associated virus 2
MAADGYLPDWLEDTLSEGIRQWWKLKPGPPPPKPAERHKDDSRGLVLPGYKYLGPFNGLDKGEPVNEADAAALEHDKAYDRQLDSGDNPYLKYNHADAEFQERLKEDTSFGGNLGRAVFQAKKRVLEPLGLVEEPVKTAPGKKRPVEHSPVEPDSSSGTGKAGQQPARKRLNFGQTGDADSVPDPQPLGEPPATPAAVGPTTMASGGGAPMADNNEGADGVGNASGNWHCDSTWLGDRVITTSTRTWALPTYNNHLYKQISSASTGASNDNHYFGYSTPWGYFDFNRFHCHFSPRDWQRLINNNWGFRPKRLNFKLFNIQVKEVTQNDGTTTIANNLTSTVQVFTDSEYQLPYVLGSAHQGCLPPFPADVFMIPQYGYLTLNNGSQAVGRSSFYCLEYFPSQMLRTGNNFTFSYTFEDVPFHSSYAHSQSLDRLMNPLIDQYLYYLNRTQNQSGSAQDKALLFSRGSPAGMSVQPKNWLPGPCYRQQRVSKTKTDNNNSNFTWTGASKYNLNGRESIINPGTAMASHKDDKDKFFPMSGVMIFGKESAGASNTALDNVMITDEEEIKATNPVATERFGTVAVNFQSSSTDPATGDVHVMGALPGMVWQDRDVYLQGPIWAKIPHTDGHFHPSPLMGGFGLKHPPPQILIKNTPVPANPPAEFSATKFASFITQYSTGQVSVEIEWELQKENSKRWNPEVQYTSNYAKSANVDFTVDNNGLYTEPRPIGTRYLTRP

SEQ ID NO: 164 - protein, 740 aa, Adeno-associated virus 2
MAADGYLPDWLEDTLSEGIRQWWKLKPGPPPPKPAERHKDDSRGLVLPGYKYLGPFNGLDKGEPVNAADAAALEHDKAYDRQLDSGDNPYLKYNHADAEFQERLKEDTSFGGNLGRAVFQAKKRVLEPLGLVEEPVKTAPGKKRPVEHSPVEPDSSSGTGKAGQQPARKRLNFGQTGDADSVPDPQPLGQPPAAPSGLGTNTMATGSGAPMADNNEGADGVGNSSGNWHCDSTWMGDRVITTSTRTWALPTYNNHLYKQISSQSGASNDNHYFGYSTPWGYFDFNRFHCHFSPRDWQRLINNNWGFRPKRLNFKLFNIQVKEVTQNDGTTTIANNLTSTVQVFTDSEYQLPYVLGSAHQGCLPPFPADVFMVPQYGYLTLNNGSQAVGRSSFYCLEYFPSQMLRTGNNFTFSYTFEDVPFHSSYAHSQSLDRLMNPLIDQYLYYLSRTNTPSGTTTQSGLQFSQAGASDIRDQSRNWLPGPCYRQQRVSKTSADNNNSEYSWTGATKYHLNGRDSLVNPGPAMASHKDDEEKFFPQSGVLIFGKQGSEKTNVDIEKVMITDEEEIRTTNPVATEQYGSVSTNLQRGNRQAATADVNTQGVLPGMVWQDRDVYLQGPIWAKIPHTDGHFHPSPLMGGFGLKHPPPQILIKNTPVPANPSTTFSAAKFASFITQYSTGQVSVEIEWELQKENSKRWNPEIQYTSNYNKSVNVDFTVDTNGVYSEPRPIGTRYLTRNLLLAAA

SEQ ID NO: 165 - protein, 734 aa, Adeno-associated virus 2
MAADGYLPDWLEDTLSEGIRQWWKLKPGPPPPKPAERHKDDSRGLVLPGYKYLGPFNGLDKGEPVNEADAAALEHDKAYDRQLDSGDNPYLKYNHADAEFQERLKEDTSFGGNLGRAVFQAKKRVLEPLGLVEEPVKTAPGKKRPVEHSPVEPDSSSGTGKAGQQPARKRLNFGQTGDADSVPDPQPLGQPPAAPSGLGTNTMATGSGAPMADNNEGADGVGNSSGNWHCDSTWMGDRVITTSTRTWALPTYNNHLYKQISSQSGASNDNHYFGYSTPWGYFDFNRFHCHFSPRDWQRLINNNWGFRPKRLNFKLFNIQVKEVTQNDGTTTIANNLTSTVQVFTDSEYQLPYVLGSAHQGCLPPFPADVFMVPQYGYLTLNNGSQAVGRSSFYCLEYFPSQMLRTGNNFTFSYTFEDVPFHSSYAHSQSLDRLMNPLIDQYLYYLSRTNTPSGTTTQSGLQFSQAGASDIRDQSRNWLPGPCYRQQRVSKTSADNNNSEYSWTGATMYHLNGRDSLVNPGPAMASHKDDEEKFFPQSGVLIFGKQGSEKTNVDIEKVMITDEEEIRTTNPVATEQYGSVSTNLQRGNRQAATADVNTQGVLPGMVWQDRDVYLQGPIWAKIPHTDGHFHPSPLMGGFGLKHPPPQILIKNTPVPANPSTTFSAAKFASFITQYSTGQVSVEIEWELQKENSKRWNPEIQYTSNYNKSINVDFTVDTNGVYSEPRPIGTRYLTRN

SEQ ID NO: 166 - protein, 734 aa, Adeno-associated virus 2
MAADGYLPDWLEDTLSEGIRQWWKLKPGPPPPKPAERHKDDSRGLVLPGYKYLGPFNGLDKGEPVNEADAAALEHDKAYDRQLDSGDNPYLKYNHADAEFQERLKEDTSFGGNLGRAVFQAKKRVLEPLGLVEEPVKTAPGKKRPVEHSPVEPDSSSGTGKAGQQPARKRLNFGQTGDADSVPDPQPLGQPPAAPSGLGTNTMATGSGAPMADNNEGADGVGNSSGNWHCDSTWMGDRVITTSTRTWALPTYNNHLYKQISSQSGASNDNHYFGYSTPWGYFDFNRFHCHFSPRDWQRLINNNWGFRPKRLNFKLFNIQVKEVTQNDGTTTIANNLTSTVQVFTDSEYQLPYVLGSAHQGCLPPFPADVFMVPQYGYLTLNNGSQAVGRSSFYCLEYFPSQMLRTGNNFTFSYTFEDVPFHSSYAHSQSLDRLMNPLIDQYLYYLSRTNTPSGTTTQSGLQFSQAGASDIRDQSRNWLPGPCYRQQRVSKTSADNNNSEYSWTGATKYHLNGRDSLVNPGPAMASHKDDEEKFFPQSGVLIFGKQGSEKTNVDIEKVMITDEEEIRTTNPVATEQYGSVSTNLQRGNRQAATADVNTQGVLPGMVWQDRDVYLQGPIWAKIPHTDGHFHPSPLMGGFGLKHPPPQILIKNTPVPANPSTTFSEAKFASFITQYSTGQVSVEIEWELQKENSKRWNPEIQYTSNYNKSVNVDFTVDTNGVYSEPRPIGTRYLTRN

SEQ ID NO: 167 - protein, 739 aa, Adeno-associated virus 2
MAADGYLPDWLEDTLSEGIRQWWKLKPGPPPPKPAERHKDDSRGLVLPGYKYLGPFNGLDKGEPVNEADAAALEHDKAYDRQLDSGDNPYLKYNHADAEFQERLKEDTSFGGNLGRAVFQAKKRVLEPLGLVEEPVKTAPGKKRPVEHSPVEPDSSSGTGKAGQQPARKRLNFGQTGDADSVPDPQPLGQPPAAPSGLGTNTMATGSGAPMADNNEGADGVGNSSGNWHCDSTWMGDRVITTSTRTWALPTYNNHLYKQISSQSGASNDNHYFGYSTPWGYFDFNRFHCHFSPRDWQRLINNNWGFRPKRLNFKLFNIQVKEVTQNDGTTTIANNLTSTVQVFTDSEYQLPYVLGSAHQGCLPPFPADVFMVPQYGYLTLNNGSQAVGRSSFYCLEYFPSQMLRTGNNFTFSYTFEDVPFHSSYAHSQSLDRLMNPLIDQYLYYLSRTNTPSGTTTQSGLQFSQAGASDIRDQSRNWLPGPCYRQQRVSKTSADNNNSEYSWTGATKYHLNGRDSLVNPGPAMASHKDDEEKFFPQSGVLIFGKQGSEKTNVDIEKVMITDEEEIRTTNPVATEQYGSVSTNLQRGNRQAATADVNTQGVLPGMVWQDRDVYLQGPIWAKIPHTDGHFHPSPLMGGFGLKHPPPQILIKNTPVPANPSTTFSAAKFASFITQYSTGQVSVEIEWELQKENSKRWNPEIQYTSNYNKSVNVDFTVDTNGVYSEPRPIGTRYLTRNLLLAA

SEQ ID NO: 168 - protein, 725 aa, Adeno-associated virus 2
MAADGYLPDWLEDTLSEGIRQWWKLKPGPPPPKPAERHKDDSRGLVLPGYKYLGPFNGLDKGEPVNEADAAALEHDKAYDRQLDSGDNPYLKYNHADAEFQERLKEDTSFGGNLGRAVFQAKKRVLEPLGLVEEPVKTAPGKKRPVEHSPVEPDSSSGTGKAGQQPARKRLNFGQTGDADSVPDPQPLGQPPAAPSGLGTNTMATGSGAPMADNNEGADGVGNSSGNWHCDSTWMGDRVITTSTRTWALPTYNNHLYKQISSQSGASNDNHYFGYSTPWGYFDFNRFHCHFSPRDWQRLINNNWGFRPKRLNFKLFNIQVKEVTQNDGTTTIANNLTSTVQVFTDSEYQLPYVLGSAHQGCLPPFPADVFMVPQYGYLTLNNGSQAVGRSSFYCLEYFPSQMLRTGNNFTFSYTFEDVPFHSSYAHSQSLDRLMNPLIDQYLYYLSRTNTPSGTTTQSGLQFSQAGASDIRDQSRNWLPGPCYRQQRVSKTSADNNNSEYSWTGATKYHLNGRDSLVNPGPAMASHKDDEEKFFPQSGVLIFGKQGSEKTNVDIEKVMITDEEEIRTTNPVATEQYGSVSTNLQRGNRQAATADVNTQGVLPGMVWQDRDVYLQGPIWAKIPHTDGHFHPSPLMGGFGLKHPPPQILIKNTPVPANPSTTFSAAKFASFITQYSTGQVSVEIEWELQKENSKRWNPEIQYTSNYNKSVNVDFTVDTNGVYSEPRP

SEQ ID NO: 169 - protein, 707 aa, Adeno-associated virus 2
MAADGYLPDWLEDTLSEGIRQWWKLKPGPPPPKPAERHKDDSRGLVLPGYKYLGPFNGLDKGEPVNEADAAALEHDKAYDRQLDSGDNPYLKYNHADAEFQERLKEDTSFGGNLGRAVFQAKKRVLEPLGLVEEPVKTAPGKKRPVEHSPVEPDSSSGTGKAGQQPARKRLNFGQTGDADSVPDPQPLGQPPAAPSGLGTNTMATGSGAPMADNNEGADGVGNSSGNWHCDSTWMGDRVITTSTRTWALPTYNNHLYKQISSQSGASNDNHYFGYSTPWGYFDFNRFHCHFSPRDWQRLINNNWGFRPKRLNFKLFNIQVKEVTQNDGTTTIANNLTSTVQVFTDSEYQLPYVLGSAHQGCLPPFPADVFMVPQYGYLTLNNGSQAVGRSSFYCLEYFPSQMLRTGNNFTFSYTFEDVPFHSSYAHSQSLDRLMNPLIDQYLYYLSRTNTPSGTTTQSGLQFSQAGASDIRDQSRNWLPGPCYRQQRVSKTSADNNNSEYSWTGATKYHLNGRDSLVNPGPAMASHKDDEEKFFPQSGVLIFGKQGSEKTNVDIEKVMITDEEEIRTTNPVATEQYGSCIYQPPERQQTSSYRRCQHTRRSSRHGLAGQRCVPSGAHLGKDSTHGRTFSPLSPHGWIRTTPSSTDSHQEHPGTCESFDHLQCGKVCFLHHTVLHGTGQRGDRVRAAEGKQQTLESRNSVHFQLQQVC

SEQ ID NO: 170 - protein, 739 aa, Adeno-associated virus 2; identical to SEQ ID NO: 167

SEQ ID NO: 171 - protein, 737 aa, Adeno-associated virus 2
MASDGYLPDWLEDNLSEGIREWWDLKPGAPKPKANQQKQDDGRGLVLPGYKYLGPFNGLDKGEPVNAADAAALEHDKAYDQQLKAGDNPYLRYNHADAEFQERLQEDTSFGGNLGRAVFQAKKRVLEPFGLVEEGAKTAPGKKRPVEQSPQEPDSSSGIGKTGQQPAKKRLNFGQTGDSESVPDPQPLGEPPATPAAVGPTTMASGGGAPMADNNEGADGVGNASGNWHCDSTWLGDRVITTSTRTWALPTYNNHLYKQISSASTGASNDNHYFGYSTPWGYFDFNRFHCHFSPRDWQRLINNNWGFRPKRLNFKLFNIQVKEVTTNDGTTTIANNLTSTVQVFTDSEYQLPYVLGSAHQGCLPPFPADVFMVPQYGYLTLNNGSQAVGRSSFYCLEYFPSQMLRTGNNFTFSYTFEDVPFHSSYAHSQSLDRLMNPLIDQYLYYLSRTNTPSGTTTQSGLQFSQAGASDIRDQSRNWLPGPCYRQQRVSKTSADNNNSEYSWTGATKYHLNGRDSLVNPGPAMASHKDDEEKFFPQSGVLIFGKQGSEKTNVDIEKVMITDEEEIRTTNPVATEQYGSVSTNLQRGNRQAATADVNTQGVLPGMVWQDRDVYLQGPIWAKIPHTDGHFHPSPLMGGFGLKHHPPQILIKNTPVPANPSTTFSAAKFASFITQYSTGQVSVEIEWELQKENSKRWNPEIQYTSNYNKSVNVDFTVDTNGVYSEPRPIGTRYLTRNLL

SEQ ID NO: 172 - protein, 741 aa, Adeno-associated virus 2
MAADGYLPDWLEDTLSEGIREWWALKPGAPKPKANQQKQDDGRGLVLPGYKYLGPFNGLDKGEPVNEADAAALEHDKAYDQQLQAGDNPYLRYNHADAEFQERLQEDTSFGGNLGRAVFQAKKRVLEPLGLVEEPVKTAPGKKRPVEHSPVEPDSSSGTGKSGQQPARKRLNFGQTGDADSVPDPQPLGQPPAAPSGLGTNTMATGSGAPMADNNEGADGVGNSSGNWHCDSTWMGDRVITTSTRTWALPTYNNHLYKQISSQSGASNDNHYFGYSTPWGYFDFNRFHCHFSPRDWQRLINNNWGFRPKRLNFKLFNIQVKEVTQNDGTTTIANNLTSTVQVFTDSEYQLPYVLGSAHQGCLPPFPADVFMVPQYGYLTLNNGSQAVGRSSFYCLEYFPSQMLRTGNNFTFSYTFEDVPFHSSYAHSQSLDRLMNPLIDQYLYYLSRTNTPSGTTTQSGLQFSQAGASDIRDQSRNWLPGPCYRQQRVSKTSADNNNSEYSWTGATKYHLNGRDSLVNPGPAMASHKDDEEKFFPQSGVLIFGKQGSEKTNVDIEKVMITDEEEIRTTNPVATEQYGSVSTNLQRGNLANHNNTTNARQAATADVNTQGVLPGMVWQDRDVYLQGPIWAKIPHTDGHFHPSPLMGGFGLKHPPPQILIKNTPVPANPSTTFSAAKFASFITQYSTGQVSVEIEWELQKENSKRWNPEIQYTSNYNKSINVDFTVDTNGVYSEPRPIGTRYL

SEQ ID NO: 173 - protein, 730 aa, Adeno-associated virus 2
MASDGYLPDWLEDNLSEGIREWWDLKPGAPKPKANQQKQDDGRGLVLPGYKYLGPFNGLDKGEPVNAADAAALEHDKAYDQQLKAGDNPYLRYNHADAEFQERLQEDTSFGGNLGRAVFQAKKRVLEPFGLVEEGAKTAPGKKRPVEQSPQEPDSSSGIGKTGQQPAKKRLNFGQTGDSESVPDPQPLGEPPATPAAVGPTTMASGGGAPMADNNEGADGVGNASGNWHCDSTWLGDRVITTSTRTWALPTYNNHLYKQISSASTGASNDNHYFGYSTPWGYFDFNRFHCHFSPRDWQRLINNNWGFRPKRLNFKLFNIQVKEVTTNDGVTTIANNLTSTVQVFSDSEYQLPYVLGSAHQGCLPPFPADVFMIPQYGYLTLNNGSQAVGRSSFYCLEYFPSQMLRTGNNFTFSYTFEDVPFHSSYAHSQSLDRLMNPLIDQYLYYLNRTQNQSGSAQNNDLLFSRGSPAGMSVQPKNWLPGPCYRQQRVSKTKTDNNNSNFTWTGASKYNLNGRESIINPGTAMASHKDDKDKFFPMSGVMIFGKESAGASNTALDNVMITDEEEIKATNPVATERFGTVAVNLQSSSTDPATGDVHVMGALPGMVWQDRDVYLQGPIWAKIPHTDGHFHPSPLMGGFGLKNPPPQILIKNTPVPANPPAEFSATKFASFITQYSTGQVSVEIEWELQKENSKRWNPEVQYTSNYAKSANVDFTVDNNGLYTEPRPIGTR

SEQ ID NO: 174 - protein, 735 aa, Adeno-associated virus 2
  MOD_RES (239)..(239): Xaa = any amino acid
MASDGYLPDWLEDNLSEGIREWWDLKPGAPKPKANQQKQDDGRGLVLPGYKYLGPFNGLDKGEPVNAADAAALEHDKAYDQQLKAGDNPYLRYNHADAEFQERLQEDTSFGGNLGRAVFQAKKRVLEPFGLVEEGAKTAPGKKRPVEQSPQEPDSSSGIGKTGQQPAKKRLNFGQTGDSESVPDPQPLGEPPATPAAVGPTTMASGGGAPMADNNEGADGVGNASGNWHCDSTWLGDRXITTSTRTWALPTYNNHLYKQISSASTGASNDNHYFGYSTPWGYFDFNRFHCHFSPRDWQRLINNNWGFRPKRLNFKLFNIQVKEVTTNDGVTTIANNLTSTVQVFSDSEYQLPYVLGSAHQGCLPPFPADVFMIPQYGYLTLNNGSQAVGRSSFYCLEYFPSQMLRTGNNFTFSYTFEDVPFHSSYAHSQSLDRLMNPLIDQYLYYLNRTQNQSGSAQNNDLLFSRGSPAGMSVQPKNWLPGPCYRQQRVSKTKTDNNNSNFTWTGASKYNLNGRESIINPGTAMASHKDDKDKFFPMSGVMIFGKESAGASNTALDNVMITDEEEIKATNPVATERFGTVAVNLQSSSTDPATGDVHVMGALPGMVWQDRDVYLQGPIWAKIPHTDGHFHPSPLMGGFGLKNPPPQILIKNTPVPANPPAEFSATKFASFITQYSTGQVSVEIEWELQKENSKRWNPEVQYTSNYAKSANVDFTVDNNGLYTEPRPIGTRYLTRP

SEQ ID NO: 175 - protein, 733 aa, Adeno-associated virus 2
MASDGYLPDWLEDNLSEGIREWWDLKPGAPKPKANQQKQDDGRGLVLPGYKYLGPFNGLDKGEPVNAADAAALEHDKAYDQQLKAGDNPYLRYNHADAEFQERLQEDTSFGGNLGRAVFLAKKRVLEPFGLVEEGAKTAPGKKRPVEQSPQEPDSSSGIGKTGQQPAKKRLNFGQTGDSESVPDPQPLGEPPATPAAVGPTTMASGGGAPMADNNEGADGVGNASGNWHCDSTWLGDRVITTSTRTWALPTYNNHLYKQISSASTGASNDNHYFGYSTPWGYFDFNRFHCHFSPRDWQRLINNNWGFRPKRLNFKLFNIQVKEVTTNDGVTTIANNLTSTVQVFSDSEYQLPYVLGSAHQGCLPPFPADVFMIPQYGYLTLNNGSQAVGRSSFYCLEYFPSQMLRTGNNFTFSYTFEDVPFHSSYAHSQSLDRLMNPLIDQYLYYLNRTQNQSGSAQNNDLLFSRGSPAGMSVQPKNWLPGPCYRQQRVSKTKTDNNNSNFTWTGASKYNLNGRESIINPGTAMASHKDDKDKFFPMSGVMIFGKESAGASNTALDNVMITDEEEIKATNPVATERFGTVAVNLQSSSTDPATGDVHVMGALPGMVWQDRDVYLQGPIWAKIPHTDGHFHPSPLMGGFGLKNPPPQILIKNTPVPANPPAEFSATKFASFITQYSTGQVSVEIEWELQKENSKRWNPEVQYTSNYAKSANVDFTVDNNGLYTEPRPIGTRYLT

SEQ ID NO: 176 - protein, 734 aa, Adeno-associated virus 2
MAADGYLPDWLEDTLSEGIRQWWKLKPGPPPPKPAERHKDDSRGLVLPGCKYLGPFNGLDKGEPVNEADAAALEHDKAYDRQLDSGDNPYLKYNHADAEFQERLKEDTSFGGNLGRAVFQAKKRVLEPLGLVEEPVKTAPGKKRPVEHSPVEPDSSSGTGKAGQQPARKRLNFGQTGDADSVPDPQPLGQPPAAPSGLGTNTMATGSGAPMADNNEGADGVGNSSGNWHCDSTWMGDRVITTSTRTWALPTYNNHLYKQISSQSGASNDNHYFGYSTPWGYFDFNRFHCHFSPRDWQRLINNNWGFRPKRLNFKLFNIQVKEVTQNDGTTTIANNLTSTVQVFSDSEYQLPYVLGSAHQGCLPPFPADVFMIPQYGYLTLNNGSQAVGRSSFYCLEYFPSQMLRTGNNFTFNYTFEDVPFHSSYAHSQSLDRLMNPLIDQYLYYLNRTQNQSGSAQNNDLLFSRGSPAGMSVQPKNWLPGPCYRQQRVSKTKTDNNNSNFTWTGASKYNLNGRESIINPGTAMASHKDDKDKFFPMSGVMIFGKESAGASNTALDNVMITDEEEIKATNPVATERFGTVAVNLQSSSTDPATGDVHVMGALPGMVWQDRDVYLQGPIWAKIPHTDGHFHPSPLMGGFGLKNPPPQILIKNTPVPANPPAEFSATKFASFITQYSTGQVSVEIEWELQKENSKRWNPEVQYTSNYAKSANVDFTVDNNGLYTEPRPIGTRYLTRP

SEQ ID NO: 177 - protein, 734 aa, Adeno-associated virus 2
MAADGYLPDWLEDTLSEGIRQWWKLKPGPPPPKPAERHKDDSRGLVLPGYKYLGPFNGLDKGEPVNEADAAALEHDKAYDRQLDSGDNPYLKYNHADAEFQERLKEDTSFGGNLGRAVFQAKKRVLEPLGLVEEPVKTAPGKKRPVEHSPVEPDSSSGTGKAGQQPARKRLNFGQTGDADSVPDPQPLGQPPAAPSGLGTNTMATGSGAPMADNNEGADGVGNSSGNWHCDSTWMGDRVITTSTRTWALSTYNNHLYKQISSQSGASNDNHYFGYSTPWGYFDFNRFHCHFSPRDWQRLINNNWGFRPKRLNFKLFNIQVKEVTQNDGTTTIANNLTSTVQVFTDSEYQLPYVLGSAHQGCLPPFPADVFMVPQYGYLTLNNGSQAVGRSSFYCLEYFPSQMLRTGNNFTFSYTFEDVPFHSSYAHSQSLDRLMNPLIDQYLYYLSRTNTPSGTTTQSRLQFSQAGASDIRDQSRNWLPGPCYRQQRVSKTSADNNNSEYSWTGATKYHLNGRDSLVNPGPAMASHKDDEEKFFPQSGVLIFGKQGSEKTNVDIEKVMITDEEEIRTTNPVATEQYGSVSTNLQRGNRQAATADVNTQGVLPGMVWQDRDVYLQGPIWAKIPHTDGHFHPSPLMGGFGLKHPPPQILIKNTPVPANPSTTFSAAKFASFITQYSTGQVSVEIEWELQKENSKRWNPEIQYTSNYNKSINVDFTVDTNGVYSEPRPIGTRYLTRN

SEQ ID NO: 178 - protein, 738 aa, Adeno-associated virus 2
MAADGYLPDWLEDTLSEGIRQWWKLKPGPPPPKPAERHKDDSRGLVLPGYKYLGPFNGLDKGEPVNEADAAALEHDKAYDRQLDGGDNPYLKYNHADAEFQERLKEDTSFGGNLGRAVFQAKKRVLEPLGLVEEPVKTAPGKKRPVEHSPVEPDSSSGTGKAGQQPARKRLNFGQTGDADSVPDPQPLGQPPAAPSGLGTNTMATGSGAPMADNNEGADGVGNSSGNWHCDSTWMGDRVITTSTRTWALPTYNNHLYKQISSQSGASNDNHYFGYSTPWGYFDFNRFHCHFSPRDWQRLINNNWGFRPKRLNFKLFNIQVKEVTQNDGTTTIANNLTSTVQVFTDSEYQLPYVLGSAHQGCLPPFPADVFMVPQYGYLTLNNGSQAVGRSSFYCLEYFPSQMLRTGNNFTFSYTFEDVPFHSSYAHSQSLDRLMNPLIDQYLYYLSRTNTPSGTTTQSGLQFSQAGASDIRDQSRNWLPGPCYRQQRVSKTSADNNNSEYSWTGATKYHLNGRDSLVNPGPAMASHKDDEEKFFPQSGVLIFGKQGSEKTNVDIEKVMITDEEEIRTTNPVATEQYGSVSTNLQRGNRQAATADVNTQGVLPGMVWQDRDVYLQGPIWAKIPHTDGHFHPSPLMGGFGLKHPPPQILIKNTPVPANPSTTFSAAKFASFITQYSTGQVSVEIEWELQKENSKRWNPEIQYTSNYNKSVNVDFTVDTNGVYSEPRPIGTRYLTRNLLRP

SEQ ID NO: 179 - DNA, 2208 bp, Adeno-associated virus
atggctgccgatggttatcttccagattggctcgaggacactctctctgaaggaataagacagtggtggaagctcaaacctggcccaccaccaccaaagcccgcagagcggcataaggacgacagcaggggtcttgtgcttcctgggtacaagtacctcggacccttcaacggactcgacaagggggagccggtcaacgaggcagacgccgcggccctcgagcacgacaaggcctacgaccggcagctcgacagcggagacaacccgtacctcaagtacaaccacgccgacgcagagtttcaggagcgccttaaagaagatacgtcttttgggggcaacctcggacgagcagtcttccaggcgaaaaagagggttcttgaacctctgggcctggttgaggaacctgttaagacggctccgggaaaaaagaggccggtagagcactctcctgtggagccagactcctcctcgggaaccggaaaagcgggccagcagcctgcaagaaaaagattaaattttggtcagactggagacgcagactccgtacctgacccccagcctctcggacagccaccagcagccccctctggtctgggatctactacaatggctacaggcagtggcgcaccaatggcagacaataacgagggtgccgatggagtgggtaattcctcaggaaattggcattgcgattcccaatggctgggcgacagagtcatcaccaccagcacccgaacctgggccctgcccacatacaacaaccacctctacaagcaaatctccagccaatcaggagccagcaacgacaaccactactttggctacagcaccccctgggggtattttgacttcaacagattccactgccacttttcaccacgtgactggcaaagactcatcaacaacaactggggattccggcccaaaagactcaacttcaagctctttaatattcaagtcaaagaggtcacgcagaatggcggtacgacgacgattgccaataaccttaccagcacggttcaggtgtttactgactcggagtaccagctcccgtacgtcctgggctcggcgcatcaaggatgcctcccgccgtttccagcggacgtcttcatggtcccacagtatggatacctcaccctgaacaacgggagtcaggcggtaggacgctcttccttttactgcctggagtactttccttctcagatgctgcgtactggaaacaactttcagttcagctacacttttgaagacgtgcctttccacagcagctacgctcacagccagagtctggatcggctgatgaatcctctgatcgaccagtacctgtattatctgaacaagacacaaacaaatagtggaactcttcagcagtctcggctactgtttagccaagctggaccaaccaacatgtctcttcaagctaaaaactggctgcctggaccttgctacagacagcagcgtctgtcaaaacaggcaaacggcaacaacaacagcaactttccctggactgcagctacaaagtatcatctaaatggccgggactcgttggttaatccaggaccagctatggccagtcacaaggatgacgaagaaaagtttttccccatgcatggaaccctgatatttggtaaacaaggaacaaatgccaacgacgcggatttggaaaatgtcatgattacagatgaagaagaaatcagggccaccaatcccgtggctacggagcagtacgggactgtgtcaaataatttgcaaaactcaaacactggtccaactactggaactgtcaatcaccaaggagcgttacctggtatggtgtggcaggatcgagacgtgtacctgcagggacccatttgggccaagattcctcacaccgatggacactttcatccttctccactgacgggaggttttggactcaaacacccgcctcctcagatcatgatcaaaaacactcccgttccagccaatcctcccacaaacttcagttctgccaagtttgcttctttcatcacacagtattccacgggacaggtcagcgtggagatcgagtgggagctgcagaaggagaacagcaaacgctggaatcccgaaattcagtacacttccaactacaacaagtctgttaatgtggactttactgtggacactaatggtgtgtattcagagcctcgccccattggcaccagatacctgactcgtaatctgtaa

SEQ ID NO: 180 - protein, 735 aa, Adeno-associated virus
MAADGYLPDWLEDTLSEGIRQWWKLKPGPPPPKPAERHKDDSRGLVLPGYKYLGPFNGLDKGEPVNEADAAALEHDKAYDRQLDSGDNPYLKYNHADAEFQERLKEDTSFGGNLGRAVFQAKKRVLEPLGLVEEPVKTAPGKKRPVEHSPVEPDSSSGTGKAGQQPARKRLNFGQTGDADSVPDPQPLGQPPAAPSGLGSTTMATGSGAPMADNNEGADGVGNSSGNWHCDSQWLGDRVITTSTRTWALPTYNNHLYKQISSQSGASNDNHYFGYSTPWGYFDFNRFHCHFSPRDWQRLINNNWGFRPKRLNFKLFNIQVKEVTQNGGTTTIANNLTSTVQVFTDSEYQLPYVLGSAHQGCLPPFPADVFMVPQYGYLTLNNGSQAVGRSSFYCLEYFPSQMLRTGNNFQFSYTFEDVPFHSSYAHSQSLDRLMNPLIDQYLYYLNKTQTNSGTLQQSRLLFSQAGPTNMSLQAKNWLPGPCYRQQRLSKQANGNNNSNFPWTAATKYHLNGRDSLVNPGPAMASHKDDEEKFFPMHGTLIFGKQGTNANDADLENVMITDEEEIRATNPVATEQYGTVSNNLQNSNTGPTTGTVNHQGALPGMVWQDRDVYLQGPIWAKIPHTDGHFHPSPLTGGFGLKHPPPQIMIKNTPVPANPPTNFSSAKFASFITQYSTGQVSVEIEWELQKENSKRWNPEIQYTSNYNKSVNVDFTVDTNGVYSEPRPIGTRYLTRNL

SEQ ID NO: 181 - DNA, 2208 bp, Adeno-associated virus
atggctgccgatggttatcttccagattggctcgaggacactctctctgaaggaataagacagtggtggaagctcaaacctggcccaccaccaccaaagctcgcagagcggcatcaggacgacagcaggggtcttgtgcttcctgggtacaagtacctcggacccttcaacggactcgacaaaggagagccggtcaacgaggcagacgccgcggccctcgagcacgacaaggcctacgaccggcagctcgacagcggagacaacccgtacctcaagtacaaccacgccgacgcggagtttcaggagcgtcttaaagaagatacgtcttttgggggcaacctcggacgagcagtcttccaggcgaaaaagagggttcttgaacctctgggcctggttgaggaacctgttaagacggctccgggaaaaaagaggccggtagagcactctcctgtggagccagactcctcctcgggaaccggaaaggcgggccatcagcctgcgagaaagagattgaattttggtcagactggagacgcagactccgtacctgacccccagcctctcggacagccaccagcagcccccacaagtctgggatctactacaatggctacaggcagtggcgcaccaatggcagacaataacgagggtgccgatggagtgggtaattcctcaggaaattggcattgcgattcccaatggctgggcgacagagtcatcaccaccagcacccgaacctgggccctgcccacctacaacaaccacctctacaagcaaatctccagccaatcaggagcctcgaacgacaaccactactttggctacagcaccccctgggggtattttgacttcaacagattccactgtcacttctccccacgtgattggcaaagactcatcaacaacaactggggattccgacccaagagactcaacttcaagctctttaacattcaagtcaaagaggtcacgcagaatgacggtacgacgacgattgccaataaccttaccagcacggttcaggtgtttactgactcggagtaccagctcccgtacgtcctcggctcggcgcatcaaggatgcctcccgccgtttccagcggacgtcttcacggtcccacagtatggatacctcaccctgaacaacgggagtcaggcggtaggacgctcttccttttactgcctggagtactttccttctcagatgctgcgtactggaaacaaccttaccttcagctacacctttgaggacgttcctttccacagcagctacgctcacagccagagtttggaccggctgatgaatcctctgatcgaccagtatctatattatctgaacaggacacaatcaaatagtggaactcttcagcagtctaggctactgtttagccaagctggacccaccagcatgtctcttcaagctaaaaactggctgcctggaccttgctacagacagcagcgtctttcaaagcaggcaaacgacaacaacaacagcaactttccctggactgcggctacaaagtatcatctaaatggccgggactcgttggttaatccaggaccagctatggccagccacaaagacgatgaagaaaagtttttccccatgcatggaaccctgatatttggtaaacaaggaacaaatgctaacgacgcggatttggagcatgttatgattacagatgaagaagaaatcaggaccaccaatcctgtggctacagagcagtacggaaacgtgtcaaataatttgcaaaactcaaatactggtccaactacagaaaatgtcaatcaccagggagcgttacctggtatggtgtggcaggatcgagacgtgtacctgcagggacccatttgggccaagattcctcacaccgacggacactttcacccttctccactgatgggaggttttggactcaaacacccgcctcctcaaatcatgatcaaaaacactcccgttccagccaatcctcccacaaactacagttctgccaagtttgcttctttcatcacacagtattccacgggccaggtcagcgtggagattgagtgggagctgcggaaggagaacagcaaacgctggaaccccgagatccagtatacttccaactacaacaaatctgttaatgtggactttactgtggacactaatggtgtgtattcagagcctcgccccattggcaccagatacctgactcgtaatctgtaa

SEQ ID NO: 182 - protein, 735 aa, Adeno-associated virus
MAADGYLPDWLEDTLSEGIRQWWKLKPGPPPPKLAERHQDDSRGLVLPGYKYLGPFNGLDKGEPVNEADAAALEHDKAYDRQLDSGDNPYLKYNHADAEFQERLKEDTSFGGNLGRAVFQAKKRVLEPLGLVEEPVKTAPGKKRPVEHSPVEPDSSSGTGKAGHQPARKRLNFGQTGDADSVPDPQPLGQPPAAPTSLGSTTMATGSGAPMADNNEGADGVGNSSGNWHCDSQWLGDRVITTSTRTWALPTYNNHLYKQISSQSGASNDNHYFGYSTPWGYFDFNRFHCHFSPRDWQRLINNNWGFRPKRLNFKLFNIQVKEVTQNDGTTTIANNLTSTVQVFTDSEYQLPYVLGSAHQGCLPPFPADVFTVPQYGYLTLNNGSQAVGRSSFYCLEYFPSQMLRTGNNLTFSYTFEDVPFHSSYAHSQSLDRLMNPLIDQYLYYLNRTQSNSGTLQQSRLLFSQAGPTSMSLQAKNWLPGPCYRQQRLSKQANDNNNSNFPWTAATKYHLNGRDSLVNPGPAMASHKDDEEKFFPMHGTLIFGKQGTNANDADLEHVMITDEEEIRTTNPVATEQYGNVSNNLQNSNTGPTTENVNHQGALPGMVWQDRDVYLQGPIWAKIPHTDGHFHPSPLMGGFGLKHPPPQIMIKNTPVPANPPTNYSSAKFASFITQYSTGQVSVEIEWELRKENSKRWNPEIQYTSNYNKSVNVDFTVDTNGVYSEPRPIGTRYLTRNL

SEQ ID NO: 183 - DNA, 2208 bp, Adeno-associated virus
atggctgccgatggttatcttccagattggctcgaggacactctctctgaaggaataagacagtggtggaagctcaaacctggcccaccaccaccaaagcccgcagagcggcatcaggacgacagcaggggtcttgtgcttcctgggtacaagtacctcggacccttcaacggactcgacaaaggagagccggtcaacgaggcagacgccgcggccctcgagcacgacaaggcctacgaccggcagctcgacagcggagacaacccgtacctcaagtacaaccacgccgacgcggagtttcaggagcgtcttaaagaagatacgtcttttgggggcaacctcggacgagcagtcttccaggcgaaaaagagggttcttgaacctctgggcctggttgaggaacctgttaagacggctccgggaaaaaagaggccggtagagcactctcctgtggagccagactcctcctcgggaaccggaaaagcgggccatcagcctgcgagaaagagattgaattttggtcagactggagacgcagactccgtacctgacccccagcctctcggacagccaccagcagcccccacaagtttgggatctactacaatggctacaggcagtggcgcaccaatggcagacaataacgagggtgccgatggagtgggtaattcctcaggaaattggcattgcgattcccaatggctgggcgacagagtcatcaccaccagcacccgaacctgggccctgcccacctacaacaaccacctctacaagcaaatctccagccaatcaggagcctcgaacgacaaccactactttggctacagcaccccctgggggtattttgacttcaacagattccactgtcacttctccccacgtgattggcaaagactcatcaacaacaactggggattccgacccaagagactcaacttcaagctctttaacattcaagtcaaggaggtcacgcagaatgacggtacgacgacgattgccaataaccttaccagcacggttcaggtgtttactgactcggagtaccagctcccgtacgtcctcggctcggcgcatcaaggatgcctcccgccgtttccagcggacgtcttcatggtcccacagtatggatacctcaccctgaacaacgggagtcaggcggtaggacgctcttccttttactgcctggagtactttccttctcagatgctgcgtactggaaacaactttaccttcagctacacctttgaggacgttcctttccacagcagctacgctcacagccagagtttggaccggctgatgaatcctctgatcgaccagtatctatattatctgaacaggacacaatcaaatagtggaactcttcagcagtctaggctactgtttagccaagctggacccaccagcatgtctcttcaagctaaaaactggctgcctggaccttgctacagacagcagcgtctttcaaagcaggcaaacgacaacaacaacagcaactttccctggactgcggctacaaagtatcgtctaaatggccgggactcgttggttaatccaggaccagctatggccagccacaaagacgatgaagaaaagtttttccccatgcatggaaccctgatatttggtaaacaaggaacaaatgctaacgacgcggatttggagcatgttatgattacagatgaagaagaaatcaggaccaccaatcctgtggctacagagcagtacggaaacgtgtcaaataatttgcaaaactcaaatactggtccaactacagaaaatgtcaatcaccagggagcgttacctggtatggtgtggcaggatcgagacgtgtacctgcagggacccatttgggccaagattcctcacaccgacggacactttcacccttctccactgatgggaggttttggactcaaacacccgcctcctcaaatcatgatcaaaaacactcccgttccagccaatcctcccacaaacttcagttctgccaagtttgcttctttcatcacacagtattccacgggccaggtcagcgtggagattgagtgggagctgcagaaggagaacagcaaacgctggaaccccgagatccagtatacttccaactacaacaaatctgttaatgtggactttactgtggacactaatggtgtgtattcagagcctcgccccattggcaccagatacctgactcgtaatctgtaa

SEQ ID NO: 184 - protein, 735 aa, Adeno-associated virus
MAADGYLPDWLEDTLSEGIRQWWKLKPGPPPPKPAERHQDDSRGLVLPGYKYLGPFNGLDKGEPVNEADAAALEHDKAYDRQLDSGDNPYLKYNHADAEFQERLKEDTSFGGNLGRAVFQAKKRVLEPLGLVEEPVKTAPGKKRPVEHSPVEPDSSSGTGKAGHQPARKRLNFGQTGDADSVPDPQPLGQPPAAPTSLGSTTMATGSGAPMADNNEGADGVGNSSGNWHCDSQWLGDRVITTSTRTWALPTYNNHLYKQISSQSGASNDNHYFGYSTPWGYFDFNRFHCHFSPRDWQRLINNNWGFRPKRLNFKLFNIQVKEVTQNDGTTTIANNLTSTVQVFTDSEYQLPYVLGSAHQGCLPPFPADVFMVPQYGYLTLNNGSQAVGRSSFYCLEYFPSQMLRTGNNFTFSYTFEDVPFHSSYAHSQSLDRLMNPLIDQYLYYLNRTQSNSGTLQQSRLLFSQAGPTSMSLQAKNWLPGPCYRQQRLSKQANDNNNSNFPWTAATKYRLNGRDSLVNPGPAMASHKDDEEKFFPMHGTLIFGKQGTNANDADLEHVMITDEEEIRTTNPVATEQYGNVSNNLQNSNTGPTTENVNHQGALPGMVWQDRDVYLQGPIWAKIPHTDGHFHPSPLMGGFGLKHPPPQIMIKNTPVPANPPTNFSSAKFASFITQYSTGQVSVEIEWELQKENSKRWNPEIQYTSNYNKSVNVDFTVDTNGVYSEPRPIGTRYLTRNL

SEQ ID NO: 185 - DNA, 2208 bp, Adeno-associated virus
atggctgccgatggttatcttccagattggctcgaggacactctctctgaaggaataagacagtggtggaagctcaaacctggcccaccaccaccaaagcccgcagagcggcatcaggacgacagcaggggtcttgtgcttcctgggtacaagtacctcggacccttcaacggactcgacaaaggagagccggtcaacgaggcagacgccgcggccctcgagcacgacaaggcctacgaccggcagctcgacagcggagacaacccgtacctcaagtacaaccacgccgacgcggagtttcaggagcgtcttaaagaagatacgtcttttgggggcaacctcggacgagcagtcttccaggcgaaaaagagggttcttgaacctctgggcctggttgaggaacctgttaagacggctccgggaaaaaagaggccggtagagcactctcctgtggagccagactcctcctcgggaaccggaaaagcgggccatcagcctgcgagaaagagattgaattttggtcagactggagacgcagactccgtacctgacccccagcctctcggacagccaccagcagcccccacaagtttgggatctactacaatggctacaggcagtggcgcaccaatggcagacaataacgagggtgccgatggagtgggtaattcctcaggaaattggcattgcgattcccaatggctgggcgacagagtcatcaccaccagcacccgaacctgggccctgcccacctacaacaaccacctctacaagcaaatctccagccaatcaggagcctcgaacgacaaccactactttggctacagcaccccctgggggtattttgacttcaacagattccactgtcacttctccccacgtgattggcaaagactcatcaacaacaactggggattccgacccaagagactcaacttcaagctctttaacattcaagtcaaagaggtcacgcagaatgacggtacgacgacgattgccaataaccttaccagcacggttcaggtgtttactgactcggagtaccagctcccgtacgtcctcggctcggcgcatcaaggatgcctcccgccgtttccagcggacgtcttcatggtcccacagtatggatacctcaccctgaacaacgggagtcaggcggtaggacgcccttccttttactgcctggagtactttccttctcagatgctgcgtactggaaacaactttaccttcagctacacctttgaggacgttcctttccacagcagctacgctcacagccagagtttggaccggctgatgaatcctctgatcgaccagtatctatattatctgaacaggacacaatcaaatagtggaactcttcagcagtctaggctactgtttagccaagctggacccaccagcatgtctcttcaagctaaaaactggctgcctggaccttgctacagacagcagcgtctttcaaagcaggcaaacgacaacaacaacagcaactttccctggactgcggctacaaagtatcatctaaatggccgggactcgttggttaatccaggaccagctatggccagccacaaagacgatgaagaaaagtttttccccatgcatgggaccctgatatttggtaaacaaggaacaaatgctaacgacgcggatttggagcatgttatgattacagatgaagaagaaatcaggaccaccaatcctgtggctacagagcagtacggaaacgtgtcaaataatttgcaaaactcaaatactggtccaactacagaaaatgtcaatcaccagggagcgttacctggtatggtgtggcaggatcgagacgtgtacctgcagggacccatttgggccaagattcctcacaccgacggacactttcacccttctccactgatgggaggttttggactcaaacacccgcctcctcaaatcatgatcaaaaacactcccgttccagccaatcctcccacaaacttcagttctgccaagtttgcttctttcatcacacagtattccacgggccaggtcagcgtggagattgagtgggagctgcagaaggagaacagcaaacgctggaaccccgagatccagtatacttccaactacaacaaatctgttaatgtggactttactgtggacactaatggtgtgtattcagagcctcgccccattggcaccagatacctgactcgtaatctgtaa

SEQ ID NO: 186 - protein, 735 aa, Adeno-associated virus
MAADGYLPDWLEDTLSEGIRQWWKLKPGPPPPKPAERHQDDSRGLVLPGYKYLGPFNGLDKGEPVNEADAAALEHDKAYDRQLDSGDNPYLKYNHADAEFQERLKEDTSFGGNLGRAVFQAKKRVLEPLGLVEEPVKTAPGKKRPVEHSPVEPDSSSGTGKAGHQPARKRLNFGQTGDADSVPDPQPLGQPPAAPTSLGSTTMATGSGAPMADNNEGADGVGNSSGNWHCDSQWLGDRVITTSTRTWALPTYNNHLYKQISSQSGASNDNHYFGYSTPWGYFDFNRFHCHFSPRDWQRLINNNWGFRPKRLNFKLFNIQVKEVTQNDGTTTIANNLTSTVQVFTDSEYQLPYVLGSAHQGCLPPFPADVFMVPQYGYLTLNNGSQAVGRPSFYCLEYFPSQMLRTGNNFTFSYTFEDVPFHSSYAHSQSLDRLMNPLIDQYLYYLNRTQSNSGTLQQSRLLFSQAGPTSMSLQAKNWLPGPCYRQQRLSKQANDNNNSNFPWTAATKYHLNGRDSLVNPGPAMASHKDDEEKFFPMHGTLIFGKQGTNANDADLEHVMITDEEEIRTTNPVATEQYGNVSNNLQNSNTGPTTENVNHQGALPGMVWQDRDVYLQGPIWAKIPHTDGHFHPSPLMGGFGLKHPPPQIMIKNTPVPANPPTNFSSAKFASFITQYSTGQVSVEIEWELQKENSKRWNPEIQYTSNYNKSVNVDFTVDTNGVYSEPRPIGTRYLTRNL

SEQ ID NO: 187 - DNA, 2208 bp, Adeno-associated virus
atggctgccgatggttatcttccagattggctcgaggacactctctctgaaggaataagacagtggtggaagctcaaacctggcccaccaccaccaaagcccgcagagcggcataaggacgacagcaggggtcttgtgcttcctgggtacaagtacctcggacccttcaacggactcgacaagggagagccggtcaacgaggcagacgccgcggccctcgagcacgacaaggcctacgaccggcagctcgacagcggagacaacccgtacctcaagtacaaccacgccgacgcggagtttcaggagcgccttaaagaagatacgtcttttgggggcaacctcggacgagcagtcttccaggcaaaaaagagggttcttgaacctctgggcctggttgaggagcctgttaaaacggctccgggaaaaaagaggccggtagagcactctcctgcggagccagactcctcctcgggaaccggaaaagcgggccagcagcctgcaagaaaaagattgaatttcggtcagactggagacgcagactccgtacctgacccccagcctctcggacagccaccagcagccccctctggtctgggaactaatacgatggcttcaggcagtggcgcaccaatggcagacaataacgagggcgccgacggagtgggtaattcctcgggaaattggcattgcgattccacatggatgggcgacagagtcatcaccaccagcacccgaacttgggccctgcccacctacaacaaccatctctacaagcaaatctccagccaatcaggagccagcaacgacaaccactactttggctacagcaccccttgggggtattttgacttcaacagattccactgccacttttcaccacgtgactggcaaagactcatcaacaacaactggggattccggcccaagagactcaacttcaagctctttaacattcaagtcaaagaggtcacgcagaatgacggtacgacgacgattgccaataaccttaccagcacggttcaggtgtttactgactcggagtaccagctcccgtacgtcctcggctcggcgcatcaaggatgcctcccgccgttcccagcagacgtcttcatggtgccacagtatggatacctcaccctgaacaacgggagtcaggcagtaggacgctcttcattttactgcctggagtactttccttctcagatgctgcgtaccggaaacaactttaccttcagctacacctttgaggacgttcctttccacagcagctacgctcacagccagagtttggaccgtctcatgaatcctctcatcgaccagtacctgtattacttgagcagaacaaacactccaagcggaaccaccacgcagtccaggcttcagttttctcaggccggagcaagtgacattcgggaccagtctaggaactggcttcctggaccctgttaccgccagcagcgagtatcaaagacatctgcggataacaacaacagtgaatactcgtggactggagctaccaagtaccacctcaatggcagagactctctggtgaatccgggcccggccatggccagccacaaggacgatgaagaaaagttttttcctcagagcggggttctcatctttgggaagcaaggctcagagaaaacaaatgtggacattgaaaaggtcatgattacagacgaagaggaaatcaggaccaccaatcccgtggctacggagcagtatggttctgtatctaccaacctgcagggcggcaacacacaagcagctaccgcagatgtcaacacacaaggcgttcttccaggcatggtctggcaggacagagacgtgtacctgcaggggcccatctgggcaaagattccacacacggacggacattttcacccctctcccctcatgggcggattcggacttaaacaccctcctccacagattctcatcaagaacaccccggtacctgcgaatccttcgaccaccttcagtgcggcaaagtttgcttctttcatcacacagtattccacggggcaggtcagcgtggagatcgagtgggagctgcagaaggagaacagcaaacgctggaatcccgagatccagtacacttccaactacaacaaatctgttaatgtggactttactgttgacactaatggcgtgtattcagagcctcgccccattggcaccagatacctgactcgtaatctgtaa

SEQ ID NO: 188 - protein, 735 aa, Adeno-associated virus
MAADGYLPDWLEDTLSEGIRQWWKLKPGPPPPKPAERHKDDSRGLVLPGYKYLGPFNGLDKGEPVNEADAAALEHDKAYDRQLDSGDNPYLKYNHADAEFQERLKEDTSFGGNLGRAVFQAKKRVLEPLGLVEEPVKTAPGKKRPVEHSPAEPDSSSGTGKAGQQPARKRLNFGQTGDADSVPDPQPLGQPPAAPSGLGTNTMASGSGAPMADNNEGADGVGNSSGNWHCDSTWMGDRVITTSTRTWALPTYNNHLYKQISSQSGASNDNHYFGYSTPWGYFDFNRFHCHFSPRDWQRLINNNWGFRPKRLNFKLFNIQVKEVTQNDGTTTIANNLTSTVQVFTDSEYQLPYVLGSAHQGCLPPFPADVFMVPQYGYLTLNNGSQAVGRSSFYCLEYFPSQMLRTGNNFTFSYTFEDVPFHSSYAHSQSLDRLMNPLIDQYLYYLSRTNTPSGTTTQSRLQFSQAGASDIRDQSRNWLPGPCYRQQRVSKTSADNNNSEYSWTGATKYHLNGRDSLVNPGPAMASHKDDEEKFFPQSGVLIFGKQGSEKTNVDIEKVMITDEEEIRTTNPVATEQYGSVSTNLQGGNTQAATADVNTQGVLPGMVWQDRDVYLQGPIWAKIPHTDGHFHPSPLMGGFGLKHPPPQILIKNTPVPANPSTTFSAAKFASFITQYSTGQVSVEIEWELQKENSKRWNPEIQYTSNYNKSVNVDFTVDTNGVYSEPRPIGTRYLTRNL

SEQ ID NO: 189 - DNA, 3161 bp, Adeno-associated virus
gattgaatttagcggccgcgaattcgcccttgctgcgtcaactggaccaatgagaactttccattcaatgattgcgtcgacaagatggtgatctggtgggaggagggaaagatgaccgccaaggtcatggagtcggccaaagccattctcggaggaagcaaggtgcgcgtggaccagaaatgtaagtcctcggcccagatagacccgactcccgtgattgtcacctccaacaccaacatgtgcgccgtgattgacgggaactcaacgaccttcgagcaccagcagccgttgcaagaccggatgttcaaatttgaactcacccgccgtctggatcatgactttgggaaggtcaccaagcaggaagtcaaagactttttccggtgggcaaaggatcacgtggttgaggtggagcatgaattctacgtcaaaaagggtggagccaagaaaagacccgcccccagtgacgcagatataagtgagcccaaacgggcgcgcgggtcagttgcgcagccatcgacgtcagacgcggaagcttcgatcaactacgcggacaggtaccaaaacaaatgttctcgtcacgtgggcatgaatctgatgctgtttccctgcagacaatgcgagagaatgaatcaaaattcaaatatctgcttcactcacggacagaaggactgtttagagtgctttcccgtgtcagaatctcaacccgtttctgtcgtcaaaaaggcgtatcagaaactttgctacattcatcatatcatgggaaaggtgccagacgcttgcactgcctgcgatctggtcaatgtggatttggatgactgcatctctgaacaataaatgatttaaatcaggtatggctgccgatggttatcttccagattggctcaaggacactctctctgaaggaataagacagtggtggaagctcaaacctggcccaccaccaccaaagcccgcagagcggcataaggacgacagcgggggtcttgtgcttcctgggtacaagtacctcggacccttcaacggactcgacaagggagagccggtcaacgaggcagacgccgcggccctcgagtacgacaaggcctacgaccggcagctcgacagcggagacaacccgtacctcaagtacaaccacgccgacgcggagtttcaggagcgccttaaagaagatacgtcttttgggggcaacctcggacgagcagtcttccaggcgaaaaagagggttcttgaacctctgggcctggttgaggaacctgttaagacggctccgggaaaaaagaggccggtagagcactctcctgtggagccagactcctcctcgggaacaggaaaagcgggccagcagcctgcgagaaagagattgaattttggtcagactggagacgcagactccgtacctgacccccagcctctcggacagccaccagcagccccctctggtctgggaactaatacgatggctacaggcagtggcgcaccaatggcagacaataacgagggcgccgacggagtgggtaattcctcgggaagttggcattgcgattccacatggatgggcgacagagtcatcaccaccagcacccgaacctgggctctgcccacctacaacaaccatctgtacaagcagatctccagccaatcaggagccagcaacgacaaccactactttggctacagcaccccttgggggtattttgacttcaacagattccactgccacttttcaccacgtgactggcaaagactcatcaacaacaactggggattccggcccaagagactcaacttcaagctctttaacattcaagtcaaggaggtcacgcagaatgacggtacgacgacgattgccaataaccttaccagcacggttcaggtgtttactgactcggagtaccagctcccgtacgtccccggctcggcgcatcaaggatgcctcccgccgttcccagcagacgtcttcatggtgccacagtatggatacctcaccctgaacaacgggagtcaggcagtaggacgctcttcattttactgcctggagtactttccttctcagatgcttcgtaccggaaacaactttaccttcagctacacctttgaggatgttcctttccacagcagctacgctcacagccagagtttggaccgtctcatgaatcctctcatcgaccagtacctgtattacttgagcagaacaaacactccaagcggaaccaccacgcagtccaggcttcagttttctcaggccggagcaagtgacattcgggaccagtctaggaactggcttcctggaccctgttaccgccagcagcgagtatcaaagacagctgcggacaacaacaacagtgaatactcgtggactggagctaccaagtaccacctcaatggcagagactctctggtgaatccgggcccggccatggccagccacaaggacgatgaagaaaagttttttcctcaaagcggggttctcatctttgggaagcaaggctcagagaaaacaaatgtggacattgaaaaggtcatgattacagacgaagaggaaatcagaaccaccaatcccgtggccacggagcagtatggttctgtatctaccaacctccagagcggcaacacacaagcagctactgcagatgtcaacacacaaggcgttcttccaggcatggtctggcaggacagagacgtgcacctgcaggggcctatctgggcaaagattccacacacggacggacattttcacccctctcccctcatgggcggatttggacttaaacaccctcctccacagattctcatcaagaacaccccggtacctgcaaatccttcgaccaccttcagtgcggcaaagtttgcttccttcatcacacagtattccacagggcaggtcagcgtggagatcgagtgggagctgcagaaggagaacagcaaacgctggaaccccgagatccagtacacttccaactacaacaaatctgttaatgtggactttactgtggacactaatggtgtgtattcagagcctcgccccattggcaccagatacctgactcgtaatctgtaattgcttgttaatcaataaaccgtttaattcgtttcagttgaactttggtctctgcgaagggcgaattcgtttaaaccctgcaggactagtccctttagtgagg

SEQ ID NO: 190 - DNA, 3162 bp, Adeno-associated virus
gaattgaatttagcggccgcgaattcgcccttcgcagagaccaaagttcaactgaaacgaattaaacggtttattgattaacaagcaattacagattacgagtcaggtatctggtgccaatggggcgaggctctgaatacacgccattagtgtccacagtaaagtccacattaacagacttgttgtagttggaagtgtactgaatttcgggattccagcgtttgctgttttccttctgcagctcccactcgatctccacgctgacctgtcccgtggagtactgtgtgatgaaggaagcaaactttgccgcactgaaggtggtcgaaggattcgcaggtaccggggtgttcttgatgagaatctgtggaggagggtgtttaagtccgaatccacccatgaggggagaggggtgaaaatgtccgtccgtgtgtggaatctttgcccagatgggcccctgaaggtacacatctctgtcctgccagaccatgcctggaagaacgccttgtgtgttgacatctgcggtagctgcttgtctgttgcctctctggaggttggtagatacagaaccgtactgctccgtagccacgggattggttgtcctgatttcctcttcgtctgtaatcatgaccttttcaatgtccacatttgttttctctgagccttgcttcccaaagatgagaaccccgctctgaggaaaaaacttttcttcattgtccttgtggcttgccatggccgggcccggattcaccagagagtctctgccattgaggtggtacttggtagctccagtccacgagtattcactgttgttgttatccgcagatgtctttgatactcgctgctggcggtaacagggtccaggaagccagttcctagactggtcccgaatgtcactcgctccggcctgagaaaactgaagccttgactgcgtggtggttccacttggagtgtttgttgtgctcaagtaatacaggtactggtcgatgagaggattcatgagacggtccagactctggctgtgagcgtagccgctgtggaaaggaacgtcctcaaaagtgtagctgaaggtaaagttgtttccggtacgcagcatctgagaaggaaagtactccaggcagtaaaatgaagagcgtcctactgcctgactcccgttgttcagggtgaggtatccatactgtggcaccatgaagacgtctgctgggaacggcgggaggcatccttgatgcgccgagccgaggacgtacgggagctggtactccgagtcagtaaacacctgaaccgtgctggtaaggttattggcaatcgtcgtcgtaccgtcattctgcgtgacctctttgacttgaatgttaaagagcttgaagttgagtctcttgggtcggaatccccagttgttgttgatgagtctttgccagtcacgtggtgaaaagtggcagtggaatctgttgaagtcaaaatacccccaaggggtgctgtagccaaagtagtgattgtcgttcgaggctcctgattggctggaaatttgtttgtagaggtggttgttgtaggtgggcagggcccaggttcgggtgctggtggtgatgactctgtcgcccatccatgtggaatcgcaatgccaatttcccgaggaattacccactccgtcggcgccctcgttattgtctgccattggtgcgccactgcctgtagccatcgtattagttcccagaccagagggggctgctggtggctgtccgagaggctgggggtcaggtactgagtctgcgtctccagtctgaccaaaattcaatctttttcttgcaggctgctggcccgcctttccggttcccgaggaggagtctggctccacaggagagtgctctaccggcctcttttttcctggagccgtcttgacaggttccccaaccaggcccagaggttcaagaaccctctttttcgcctggaagactgctcgtccgaggttgcccccaaaagacgtatcttctttaaggcgctcctgaaactccgcgtcggcgtggttgtacttgaggtacgggttgtctccgctgtcgagctgccggtcgtaggctttgtcgtgctcgagggccgcggcgtctgcctcgttgaccggctctcccttgtcgagtccgttgaagggtccgaggtacttgtacccaggaagcacaagacccctgctgtcgtccttatgccgctctgcgggctttggtggtggtgggccaggtttgagcttccaccactgtcttattccttcagagagagtgtcctcgagccaatctggaagataaccatcggcagccatacctgatttaaatcatttattgttcaaagatgcagtcatccaaatccacattgaccagatcgcaggcagtgcaagcgtctggcacctttcccatgatatgatgaatgtagcacagtttctgatacgcctttttgacgacagaaacgggttgagattctgacacgggaaagcactctaaacagtctttctgtccgtgagtgaagcagatatttgaattctgattcattctctcgcattgtctgcagggaaacagcatcagattcatgcccacgtgacgagaacatttgttttggtacctgtctgcgtagttgatcgaagcttccgcgtctgacgtcgatggctgcgcaactgactcgcgcacccgtttgggctcacttatatctgcgtcactgggggcgggtcttttcttggctccaccctttttgacgtagaattcatgctccacctcaaccacgtgatcctttgcccaccggaaaaagtctttgacttcctgcttggtgaccttcccaaagtcatgatccagacggcgggtgagttcaaatttgaacatccggtcttgcaacggctgctggtgttcgaaggtcgttgagttcccgtcaatcacggcgcacatgttggtgttggaggtgacgatcacgggagtcgggtctatctgggccgaggacttgcatttctggtccacgcgcaccttgcttcctccgagaatggctttggccgactccacgaccttggcggtcatcttcccctcctcccaccagatcaccatcttgtcgacacagtcgttgaagggaaagttctcattggtccagttgacgcagcaagggcgaattcgtttaaacctgcaggactagtccctttagtgaggg

SEQ ID NO: 191 - DNA, 3164 bp, Adeno-associated virus
gcgaattgaatttagcggccgcgaattcgcccttcgcagagaccaaagttcaactgaaacgaattaaacggtttattgattaacaagcaattacaaattacgagtcaggtatctggtgccaatggggcgaggctctgaatacacgccattagtgtccacagtaaagtccacattaacagacttgttgtagttggaagtgtactgaatttcgggattccagcgtttgctgttttccttctgcagctcccactcgatctccacgctgacctgtcccgtggagtactgtgtgatgaaggaagcaaactttgccgcactgaaggtggtcgaaggattcgcaggtaccggggtgttcttgatgagaatctgtggaggagggtgtttaggtccgaatccacccatgaggggagaggggtgaaaatgtccgtccgtgtgtggaatctttgcccagatgggcccctgaaggtacacatctctgtcctgccagaccatgcctggaagaacgccttgtgtgttgacatctgcggtagctgcttgtctgttgcctctctggaggttggtagatacagaaccatactgctccgtagccacgggattggttgtcctgatttcctcttcgtctgtaatcatgaccttttcaatgtccacatttgttttctctgagccttgcttcccaaagatgagaaccccgctctgaggaaaaaacttttcttcattgtccttgtggcttgccatggccgggcccggattcaccagagagtctctgccattgaggtggtacttggtagctccagtccacgagtattcactgttgttgttatccgcagatgtctttgatactcgctgctggcggtaacagggtccaggaagccagttcctagactggtcccgaatgtcactcgctccggcctgagaaaactgaagccttgactgcgtggtggttccacttggagtgtttgttgtgctcaagtaatacaggtactggtcgatgagaggattcatgagacggtccagactctggctgtgagcgtagctgctgtggaaaggaacgtcctcaaaagtgtagctgaaggtaaagttgtttccggtacgcagcatctgagaaggaaagtactccgggcagtaaaatgaagagcgtcctactgcctgactcccgttgctcagggtgaggtatccatactgtggcaccatgaagacgtctgctgggaacggcgggaggcatccttgatgcgccgagccgaggacgtacgggagctggtactccgagtcagtaaacacctgaaccgtgctggtaaggttattggcaatcgtcgtcgtaccgtcattctgcgtgacctctttgacttgaatgttaaagagcttgaagttgagtctcttgggtcggaatccccagttgttgttgatgagtctttgccagtcacgtggtgaaaagtggcagtggaatctgttgaagtcaaaatacccccaaggggtgctgtagccaaagtagtgattgtcgttcgaggctcctgattggctggaaatttgtctgtagaggtggttgttgtaggtgggcagggcccaggttcgggtgctggtggtgatgactctgtcgcccatccatgtggaatcgcaatgccgatttcccgaggaattacccactccgtcggcgccctcgttattgtctgccattggtgcgccactgcctgtagccatcgtattagttcccagaccagagggggctgctggtggctgtccgagaggctgggggtcaggtactgagtctgcgtctccagtctgaccaaaattcaatctttttcttgcaggctgctggcccgcctttccggttcccgaggaggagtctggctccacaggagagtgctctaccggcctcttttttcccggagccgtcttaacaggttccccaaccaggcccagaggttcaagaaccctctttttcgcctggaagactgctcgtccgaggttgcccccaaaagacgtatcttctttaaggcgctcctgaaactccgcgtcggcgtggttgtacttgaggtacgggttgtctccgctgtcgagctgccggtcgtaggctttgtcgtgctcgagggccgcggcgtctgcctcgttgaccggctctcccttgtcgagtccgttgaagggtccgaggtacttgtacccaggaagcacaagacccctgctgtcgtccttatgccgctctgcgggctttggtggtggtgggccaggtttgagcttccaccactgtcttattccttcagagagagtgtcctcgagccaatctggaagataaccatcggcagccatacctgatttaaatcatttattgttcaaagatgcagtcatccaaatccacattgaccagatcgcaggcagtgcaagcgtctggcacctttcccatgatatgatgaatgtagcacagtttctgatacgcctttttgacgacagaaacgggttgagattctgacacgggaaagcactctaaacagtctttctgtccgtgagtgaagcagatatttgaattctgattcattctctcgcattgtctgcagggaaacagcatcagattcatgcccacgtgacgagaacatttgttttggtacctgtctgcgtagttgatcgaagcttccgcgtctgacgtcgatggctgcgcaactgactcgcgcacccgtttgggcccacttatatctgcgtcactgggggcgggtcttttcttggctccaccctttttgacgtagaattcatgctccacctcaaccacgtgatcctttgcccaccggaaaaagtctttgacttcctgcttggtgaccttcccaaagtcatgatccagacggcgggtgagttcaaatttgaacatccggtcttgcaacggctgctggtgttcgaaggtcgttgagttcccgtcaatcacggcgcacatgttggtgttggaggtgacgatcacgggagtcgggtctatctgggccgaggacttgcatttctggtccacgcgcaccttgcttcctccgagaatggctttggccgactccacgaccttggcggtcatcttcccctcctcccaccagatcaccatcttgtcgacacagtcgttgaagggaaagttctcattggtccagttgacgcagcaagggcgaattcgtttaaacctgcaggactagtccctttagtgaggg

SEQ ID NO: 192 - DNA, 3163 bp, Adeno-associated virus
accctcactaaagggactagtcctgcaggtttaaacgaattcgcccttgctgcgtcaactggagcaatgagaactttcccttcaacgactgtgtcgacaagatggtgatttggtgggaggaggggaagatgaccgccaaggtcgtggagtcggccaaagccattctcggaggaagcaaggtgcgcgtggaccagaaatgcaagtcctcggcccagatagatccgactcccgtgatcgtcacctccaacaccaacatgtgcgccgtgattgacgggaactcaacgaccttcgaacaccagcagccgttgcaagaccggatgttcaaatttgaactcacccgccgtctggatcatgactttgggaaggtcaccaagcaggaagtcaaagactttttccggtgggcaaaggatcacgtggttgaggtggagcatggattctacgtcaaaaagggtggagccaagaaaagacccgcccctagtgacgcagatataagtgagcccaaacgggtgcgcgagtcagttgcgcagccatcgacgtcggacgcggaagcttcgatcaactacgcggacaggtaccaaaacaaatgttctcgtcacgtgggcatgaatctgatgctgtttccctgcagacaatgcgagagaatgaatcaaaattcaaatatctgcttcactcacggacagaaagactgtttagagtgctttcccgtgtcagaatctcaacctgtttctgtcgtcaaaaaggcgtatcagaaactgcgctacattcatcatatcatgggaaaggtgccagacgcttgcactgcctgcgatctggtcaatgtggatttggatgactgcatctctgaacaataaatgatttaaatcaggtatggctgccgatggttatcttccagattggctcgaggacactctctctgaaggaataagacagtggtggaagctcaaacctggcccaccaccaccaaagcccgcagagcggcataaggacgacagcaggggtcttgtgcttcctgggtacaagtacctcggacccttcaacggactcgacaagggagagccggtcaacgaggcagacgccgcggccctcgagcacgacaaggcctacgaccggcagctcgacagcggagacaacccgtacctcaagtacaaccacgccgacgcggagtttcaggagcgtcttaaagaagatacgtcttttgggggcaacctcggacgagcagtcttccaggcgaaaaagagggttcttgaacctctgggcctggttgaggaacctgttaagacggctccgggaaaaaagaggccggtagagcactctcctgcggagccagactcctcctcgggaaccggaaaagcgggccagcagcctgcaagaaaaagactgaatttcggtcagactggagacgcagactccgtacctgacccccagcctctcggacagccaccagcagcccccacaagtttgggatctactacaatggctacaggcagtggcgcaccaatggcagacaataacgagggtgccgatggagtgggtaattcctcaggaaattggcattgcgattcccaatggctgggcgacagagtcatcaccaccagcacccgaacctgggccctgcccacctacaacaaccacctttacaagcaaatctccagccaatcaggagcctcaaacgacaaccactactttggctacagcaccccctgggggtattttgacttcaacagattccactgccacttttcaccacgtgactggcaaagactcatcaacaacaactggggattccgacccaagagactcaacttcaagctctttaacattcaagtcaaagaggtcacgcagaatgacggtacgacgacgattgccaataaccttaccagcacggttcaggtgtttactgactcggagtaccagctcccgtacgtcctcggctcggcgcatcaaggatgcctcccgccgtttccagcggacgtcttcatggtcccacagtatggatacctcaccctgaacaacgggagtcaggcggtaggacgctcttccttttactgcctggagtgctttccttctcagatgctgcgtactggaaacaactttcagttcagctacacttttgaagacgtgcctttccacagcagctacgctcacagccagagtttggatcggctgatgaatcctctgatcgaccagtacctgtattatctaaacagaacacaaacagctagtggaactcagcagtctcggctactgtttagccaagctggacccacaagcatgtctcttcaagctaaaaactggctgcctggaccgtgttatcgccagcagcgtttgtcaaagcaggcaaacgacaacaacaacagcaactttccctggactggagctaccaagtaccacctcaatggcagagactctttggtgaacccgggcccggccatggccagccacaaggacgatgaagaaaagtttttccccatgcatggaaccctaatatttggtaaagaaggaacaaatgctaccaacgcggaattggaaaatgtcatgattacagatgaagaggaaatcaggaccaccaatcccgtggctacagagcagtacggatatgtgtcaaataatttgcaaaactcaaatactgctgcaagtactgaaactgtgaatcaccaaggagcattacctggtatggtgtggcaggatcgagacgtgtacctgcagggacccatttgggccaagattcctcacaccgatggacactttcatccttctccactgatgggaggttttggactcaaacacccgcctcctcagattatgatcaaaaacactcccgttccagccaatcctcccacaaacttcagttctgccaagtttgcttccttcatcacacagtattccacgggacaggtcagcgtggagatcgagtgggagctgcagaaggagaacagcaaacgctggaatcccgaaattcagtacacttccaactacaacaaatctgttaatgtggactttactgtggacactaatggtgtgtattcagagcctcgccccattggcaccagatacctgactcgtaatctgtaattgcttgttaatcaataaaccgtttaattcgtttcagttgaactttggtctctgcgaagggcgaattcgcggccgctaaattcaattcgcc

SEQ ID NO: 193 - protein, 735 aa, Adeno-associated virus
MAADGYLPDWLEDTLSEGIRQWWKLKPGPPPPKPAERHKDDSRGLVLPGYKYLGPFNGLYKGEPVDEADAAALEHDKAYDRQLDSGDNPYLKYNHADAEFQERLKEDTSFGGNLGRAVFQAKKRVLEPLGLVGEPVKTAPGKKRPVEHSPVEPDSSSGTGKAGNQPARKRLNFGQTGDADSVPDPQPLGQPPAAPSGLGSTTMATGSGAPVADNNEGADGVGNSSGNWHCDSQWLGDRVITTSTRTWALPTYNNHLYKQISSQSGASNDNHYFGYSTPWGYFDFNRFHCHFSPRDRQRLINNNWGFRPKRLNFKLFNIQVKEVTQNDGTTTIANNLTSTVQVFTDSGYQLPYVLGLAHQGCLPPFPADVFMVPQYGYLTLNNGSQAVGRSSFYCLEYFPSQMLRTGNNFQFSYTFEDVPFHSSYAHSQSLDRLMNPLIDQYLYYLNKTQSNSGTLQQSRLLFSQAGPTSMSLQAKNWLPGPCYRQQRLSKQANDNNNSNFPWTAATKYHLNGRDSLVNPGPAMASHKDDEEKFFPMHGTLIFGKQGTNANDADLDNVMITDEEEIRTTNPVATEQYGYVSNNLQNSNTGPTTGTVNHQGALPGMVWQDRDVYLQGPIWAKIPHTDGHFHPSPLMGGFGLKHPPPQIMIKNTPVPANPPTNFSSAKFASFITQYSTGQVSVEIEWELQKEDSKRWNPEIQYTSNYNKPVNVDFTVDTNGVYSEPRPIGTRYLTRNL

SEQ ID NO: 194 - DNA, 2208 bp, Adeno-associated virus
atggctgccgatggttatcttccagattggctcgaggacactctctctgaaggaataagacagtggtggaagctcaaacctggcccaccaccaccaaagcccgcagagcggcataaggacgacagcaggggtcttgtgcttcctgggtacaagtacctcggacccttcaacggactctacaagggagagccggtcgacgaggcagacgccgcggccctcgagcacgacaaggcctacgaccggcagctcgacagcggagacaacccgtacctcaagtacaaccacgccgacgcggagtttcaggagcgccttaaagaagatacgtcttttgggggcaacctcggacgagcagtcttccaggccaaaaagagggttcttgaacctctgggcttggttggggagcctgttaaaacggctccgggaaaaaagaggccggtagagcactctcctgtggagccagactcctcctcgggaaccggaaaagcgggcaaccagcctgcaagaaaaagattgaattttggtcagactggagacgcagactccgtacctgacccccagcctctcggacagccaccagcagccccctctggtctgggatctactacaatggctacaggcagtggcgcaccagtggcagacaataacgagggtgccgatggagtgggtaattcctcaggaaattggcattgcgattcccaatggctgggcgacagagtcatcaccaccagcacccgaacctgggctctgcccacctacaataaccacctctacaagcaaatctccagccaatcaggagcctcaaacgacaaccactactttggctacagcaccccctgggggtattttgacttcaacagattccactgccacttttcaccacgtgaccggcaaagactcatcaacaacaactggggattccgaccaaaaagactcaacttcaagctctttaacattcaagtcaaagaggtcacgcagaatgacggtacgacgacgattgccaataaccttaccagcacggttcaggtgtttactgactcggggtaccagctcccgtacgtcctcggcttggcgcatcaaggatgcctcccgccgttcccagcagacgtcttcatggtgccacagtatggatacctcaccctgaacaacgggagtcaggcggtaggacgctcttccttttactgcctggagtactttccttctcagatgctgcgtactggaaacaactttcagttcagctacacctttgaagacgttcctttccacagcagctacgctcacagccagagtctggatcggctgatgaatcctctgatcgaccagtacctgtattatctgaacaagacacaatcaaatagtggaactcttcagcagtctcggctactgtttagccaagctggacccaccagcatgtctcttcaagctaaaaactggctgcctggaccttgctacagacagcagcgtctgtcaaagcaggcaaacgacaacaacaacagcaactttccctggactgcggctacaaagtatcatctaaatggccgggactcgttggttaatccaggaccagctatggccagccacaaagacgatgaagaaaagtttttccccatgcatggaaccctgatatttggtaaacaaggaacaaatgctaacgacgcggatttggacaatgtcatgattacagatgaagaagaaatccgcaccaccaatcccgtggctacggagcagtacggatatgtgtcaaataatttgcaaaactcaaatactggtccaactactggaactgtcaatcaccaaggagcgttacctggtatggtgtggcaggatcgagacgtgtacctgcagggacccatttgggccaagattcctcacaccgatggacactttcatccttctccacttatgggaggttttggactcaaacacccacctcctcagatcatgattaaaaacactcccgttccagccaatcctcccacaaacttcagttctgccaagtttgcttctttcatcacacagtattccacgggacaagtcagcgtggagatcgagtgggagctgcagaaggaggacagcaaacgctggaaccccgagatccagtacacttccaactataacaaacctgttaatgtggactttactgtggacactaatggtgtgtattcagagcctcgccccattggcaccagatacctgactcgtaatctgtaa

SEQ ID NO: 195 - DNA, 3161 bp, Adeno-associated virus
cgaattgatttagcggccgcgaattcgcccttcgcagagaccaaagttcaactgaaacgaattaaacggtttattgattaacaagcaattacagattacgagtcaggtatctggtgccaatggggcgaggctctgaatacacaccattagtgtccacagtaaagtccacattaacagatttgttgtagttggaagtgtactggatctcgggattccagcgtttgctgttctccttctgtagctcccactcgatctccacgctgacccgccccgtggaatactgtgtgatgaaggaagcaaactttgccgcactgaaggtggtcgaaggattcgcaggtaccggggtgtttttgatgagaatctgtggaggagggtgtttaagtccgaatccgcccatgaggggagaggggtgaaaatgtccgtccgtgtgcggaatctttgcccagataggcccctgcaggtacacgtctctgtcctgccagaccatgcctggaagaacgccttgtgtgttgacatctgcagtagatgcttgtgtgttgccgctctggaggttggtagatacagaaccatactgctccgtggccacgggattggtggttctgatttcctcttcgtctgtaatcatgaccttttcaatgtccacatttgttttctctgatccttgttttccaaagatgagaaccccgctctgaggaaaaaacttttcttcatcgtccttgtggctggccattgccgggcccggattcaccagagagtctctgccattgaggtggtacttggtagctccaatccacgagtattcactgttgttgttgtccgcagatgtctttgatactcgctgctggcggtaacagggtccaggaagccagttcctagactgatcccgaatgtcactcgctccggcctgagaaaactgaagcctggactgcgtggtggttccgcttggagtgtttgttctgctcaagtaatacaggtactggtcgatgagaggattcatgagacggtccaaactctggctgtgagcgtagctgctgtggaaaggaacatcctcaaaggtgtagctgaaggtaaagttgtttccggtacgcagcatctgagaagggaagtactccaggcagtaaaatgaagagcgtcctactgcctgactcccgttgttcagggtgaggtatccatactgtggcaccatgaagacgtctgctgggaacggcgggaggcatccttgatgcgccgagccgaggacgtacgggagctggtactccgagtcagtaaacacctgaaccgtgctggtaaggttattggcaatcgtcgtcgtaccatcattctgcgtgacctctctgacttgaatgttaaagagcttgaagttgagtctcttgggccggaatccccagttgttgttgatgagtctttgccagtcacgtggtgaaaagtggcagtggaatctgttgaagtcaaaatacccccaaggggtgctgtagccaaagtagtggttgtcgttgctggctcctgattggctggaaatctgcttgtacagatggttgttgtaggtgggcagagcccaggttcgggtgctggtggtgatgactctgtcgcccatccatgtggaatcgcaatgccaatttcccgaggaattacccactccgtcggcgccatcgttattgtctgccattggtgcgccactgcctgtagccatcgtattagttcccagaccagagggggctgctggtggctgtccgagaggctgggggtcaggtacggagtctgcgtctccagtctgaccgaaattcaatctctttcttgcaggctggttgcccgcttttccggttcccgaggaggagtctggctccacaggagagtgctctaccggcctcttttttcccggagccgtcttaacaggctcctcaaccaggcccagaggttcaagaaccctcttttttgcctggaagactgctcgtccgaggttgcccccaaaagacgtatcttctttaaggcgctcctgaaactccgcgtcggcgtggtcgtacttgaggtacgggttgtctccgctgtcgagctgccggtcgtaggccttgtcgtgctcgagggccgcggcgtctgcctcgttgaccggctctcccttgtcgagtccgttgaagggtccgaggtacttgtacccaggaagcacaagacccctgctgtcgtccttatgccgctctgcgggctttggtggtggtgggccaggtttgagcttccaccactgtcttattccttcagagagagtgtcctcgagccaatctggaagataaccatcggcagccatacctgatttaaatcatttattgttcagagatgcagtcatccaaatccacattgaccagatcgcaggcagtgcaagcgtctggcacctttcccatgatatgatgaatgtagcaaagtttctgatacgcctttttgacgacagaaacgggttgagattctgacacgggaaagcactctaaacagtctttctgtccgtgagtgaagcagatatttgaattctgattcattctctcgcattgtctgcagggaaacagcatcagattcatgcccacgtgacgagaacatttgttttggtacctgtccgcgtagttgatcgaagcttccgcgtctgacgtcgatggctgcgcaactgactcgcgcgcccgtttgggctcacttatatctgcgtcactgggggcgggtcttttcttggctccaccctttttgacgtagaattcatgctccacctcaaccacgtgatcctttgcccaccggaaaaagtctttcacttcctgcttggtgaccttcccaaagtcatgatccagacggcgggttagttcaaatttgaacatccggtcttgcaacggctgctggtgttcgaaggtcgttgagttcccgtcaatcacggcgcacatgttggtgttggaggtggcgatcacgggagtcgggtctatctgggccgaggacttgcacttttggtccacgcgcaccttgcttcctccgagaatggcttcggccgattccacgaccttggcggtcatctttccctcctcccaccagatcaccatcttgtcgacacagtcgttgaagggaaagttctcattggtccagttgacgcagcaagggcgaattcgtttaaacctgcaggaactagtcccttagtgagg

SEQ ID NO: 196 - protein, 735 aa, Adeno-associated virus
MAADGYLPDWLEDTLSEGIRQWWKLKPGPPPPKPAERHKDDSRGLVLPGYKYLGPFNGLYKGEPVNEADAAALEHDKAYDRQLDSGDNPYLKYNHAGAEFQERLKEDTSFGGNLGRAVFQAKKRVLEPLGLVEEPVKTAPGKKRPVEHSPVEPDSSSGTGKAGNQPARKRLNFGQTGDADSVPDPQPLGQPPAAPSGLGSTTMATGSGAPVADNNEGADGVGNSSGNWHCDSQWLGDRVITTSTRTWALPTYNNHLYKQISSQSGASNDNHYFGYSTPWGYFDFNRFHCHFSPRDWQRLINNNWGFRPKRLNFKLFNIQVKEVTQNDGTTTIANNLTSTVQVFTDSEYQLPYVLGSAHQGCLPPFPADVFMVPQYGYLTLNNGSQAVGRSSFYCLEYFPSQMLRTGNNFQFSYTFEDVPFHSSYAHSQSLDRLMNPLIDQYLYYLNKTQSNSGTLQQSRLLFSQAGPTSMSLQAKNWLPGPCYRQQRLSKQANDNNNSNFPWTAATKYHLNGRDSLVNPGPAMASHKDDEEKFFPMHGTLIFGKQGTNANDADLDNVMITDEEEIRTTNPVATEQYGYVSNNLQDSNTGPTTGTVNHQGALPGMVWQDRDVYLQGPIWAKIPHTDGHFHPSPLMGGFGLKHPPPQIMIKNTPVPANPPTNFSSAKFASFITQYSTGQVSVEIEWELQKENSKRWNPEIQYTSNYNKSVNVDFTVDTNGVYSEPRPIGTRYLTRNL

SEQ ID NO: 197 - DNA, 2208 bp, Adeno-associated virus
atggctgccgatggttatcttccagattggctcgaggacactctctctgaaggaataagacagtggtggaagctcaaacctggcccaccaccgccaaagcccgcagagcggcataaggacgacagcaggggtcttgtgcttcctgggtacaagtacctcggacccttcaacggactctacaagggagagccggtcaacgaggcagacgccgcggccctcgagcacgacaaggcctacgaccggcagctcgacagcggagacaacccgtacctcaagtacaaccacgccggcgcggagtttcaggagcgccttaaagaagatacgtcttttgggggcaacctcggacgagcagtcttccaggccaaaaagagggttcttgaacctctgggcttggttgaggagcctgttaaaacggctccgggaaaaaagaggccggtagagcactctcctgtggagccagactcctcctcgggaaccggaaaagcgggcaaccagcctgcaagaaaaagattgaattttggtcagactggagacgcagactccgtacctgacccccagcctctcggacagccaccagcagccccctctggtctgggatctactacaatggctacaggcagtggcgcaccagtggcagacaataacgagggtgccgatggagtgggtaattcctcaggaaattggcattgcgattcccaatggctgggcgacagagtcatcaccaccagcacccgaacctgggctctgcccacctacaacaaccacctctacaagcaaatctccagccaatcaggagcctcaaacgacaaccactactttggctacagcaccccctgggggtattttgacttcaacagattccactgccacttttcaccacgtgactggcaaagactcatcaacaacaactggggattccgaccaaagagactcaacttcaagctctttaacattcaagtcaaagaggtcacgcagaatgacggtacgacgacgattgccaataaccttaccagcacggttcaggtgtttactgactcggagtaccagctcccgtacgtcctcggctcggcgcatcaaggatgcctcccgccgttcccagcagacgtcttcatggtgccacagtatggatacctcaccctgaacaacgggagtcaggcggtaggacgctcttccttttactgcctggagtactttccttctcagatgctgcgtactggaaacaactttcagttcagctacacctttgaagacgttcctttccacagcagctacgctcacagccagagtctggatcggctgatgaatcctctgatcgaccagtacctgtattatctgaacaagacacaatcaaatagtggaacccttcagcagtctcggctactgtttagccaagctggacccaccagcatgtctcttcaagctaaaaactggctgcctggaccttgctacagacagcagcgtctgtcaaagcaggcaaacgacaacaacaacagcaactttccctggactgcggctacaaagtatcatctaaatggccgggactcgttggttaatccaggaccagctatggccagccacaaagacgatgaagaaaagtttttccccatgcatggaaccctgatatttggtaaacaaggaacaaatgctaacgacgcggatttggacaatgtcatgattacagatgaagaagaaatccgcaccaccaatcccgtggctacggagcagtacggatatgtgtcaaataatttgcaagactcaaatactggtccaactactggaactgtcaatcaccaaggagcgttacctggtatggtgtggcaggatcgagacgtgtacctgcagggacccatttgggccaagattcctcacaccgatggacactttcatccttctccacttatgggaggttttggactcaaacacccacctcctcagatcatgattaaaaacactcccgttccagccaatcctcccacaaacttcagttctgccaagtttgcttctttcatcacacagtattccacgggacaagtcagcgtagagatcgagtgggagctgcagaaggagaacagcaaacgctggaaccccgagatccagtacacttccaactataacaaatctgttaatgtggactttactgtggacactaatggtgtgtattcagagcctcgccccattggcaccagatacctgactcgtaatctgtaa

SEQ ID NO: 198 - protein, 738 aa, Adeno-associated virus
MAADGYLPDWLEDNLSEGIREWWDLKPGAPKPKANQQKQDDGRGLVLPGCKYLGPFNGLDKGEPVNAADAAALEHDKAYDQQLKAGDNPYLRYNHADAEFQERLQEDTSFGGNLGRAVFQAKKRVLEPLGLVEEGAKTAPGKKRPVEPSPQRSPDSSTGIGKTGQQPAKKRLNFGQTGDSESVPDPQPIGEPPAGPSGLGSGTMAAGGGAPMADNNEGADGVGSSSGNWHCDSTWLGDRVITTSTRTWALPTYNNHLYKQISNGTSGGSTNDNTYFGYSTPWGYFDFNRFHCHFSPRDWQRLINNNWGFRPKRLNFKLFNIQVKEVTQNEGTKTIANNLTSTIQVFTDSEYQLPYVLGSAHQGCPPPFPADVFMIPQYGYLTLNNGSQAVGRSSFYCLEYFPSQMRRTGNNFEFSYQFEDVPFHSSYAHSQSLDRLMNPLIDQYLYYLSRTQSTGGTAGTQQLLFSQAGPNNMSAQAKNWLPGPCYRQQRVSTTLSQNNNSNFAWTGATKYHLNGRDSLVNPGVAMATHKDDEERFFPSSGVLMFGKQGAGKDNVDYSSVMLTSEEEIKTTNPVATEQYGVVADNLQQQNAAPIVGAVNSQGALPGMVWQNRDVYLQGPIWAKIPHTDGNFHPSPLMGGFGLKHPPPQILIKNTPVPADPPTTFSQAKLASFITQYSTGQVSVEIEWELQKENSKRWNPEIQYTSNYNKSVNVDFTVDTNGVYSEPRPIGTRYLTRNL

SEQ ID NO: 199 - DNA, 2217 bp, Adeno-associated virus
atggctgccgatggttatcttccagattggctcgaggacaacctctctgagggcattcgcgagtggtgggacttgaaacctggagccccgaaacccaaagccaaccagcaaaagcaggacgacggccggggtctggtgcttcctggctgcaagtacctcggacccttcaacggactcgacaagggggagcccgtcaacgcggcggacgcagcggccctcgagcacgacaaggcctacgaccagcagctcaaagcgggtgacaatccgtacctgcggtataaccacgccgacgccgagtttcaggagcgtctgcaagaagatacgtcttttgggggcaacctcgggcgagcagtcttccaggccaagaagcgggttctcgaacctctcggtctggttgaggaaggcgctaagacggctcctggaaagaagagaccggtagagccatcaccccagcgttctccagactcctctacgggcatcggcaagacaggccagcagcccgcgaaaaagagactcaactttgggcagactggcgactcagagtcagtgcccgaccctcaaccaatcggagaaccccccgcaggcccctctggtctgggatctggtacaatggctgcaggcggtggcgctccaatggcagacaataacgaaggcgccgacggagtgggtagttcctcaggaaattggcattgcgattccacatggctgggcgacagagtcatcaccaccagcacccgaacctgggccctccccacctacaacaaccacctctacaagcaaatctccaacgggacatcgggaggaagcaccaacgacaacacctacttcggctacagcaccccctgggggtattttgactttaacagattccactgccacttctcaccacgtgactggcagcgactcatcaacaacaactggggattccggcccaagagactcaacttcaagctcttcaacatccaggtcaaggaggtcacgcagaatgaaggcaccaagaccatcgccaataaccttaccagcacgattcaggtctttacggactcggaataccagctcccgtacgtcctcggctctgcgcaccagggctgcccgcctccgttcccggcggacgtcttcatgattcctcagtacgggtacctgactctgaacaacggcagtcaggccgtgggccgttcctccttctactgcctggagtactttccttctcaaatgcggagaacgggcaacaactttgagttcagctaccagtttgaggacgtgccttttcacagcagctacgcgcatagccaaagcctggaccggctgatgaaccccctcatcgaccagtacctgtactacctgtctcggactcagtccacgggaggtaccgcaggaactcagcagttgctattttctcaggccgggcctaataacatgtcggctcaggccaaaaactggctacccgggccctgctaccggcagcaacgcgtctccacgacactgtcgcaaaataacaacagcaactttgcttggaccggtgccaccaagtatcatctgaatggcagagactctctggtaaatcccggtgtcgctatggcaacgcacaaggacgacgaagagcgattttttccatccagcggagtcttgatgtttgggaaacagggagctggaaaagacaacgtggactatagcagcgttatgctaaccagtgaggaagaaatcaaaaccaccaacccagtggccacagaacagtacggcgtggtggccgataacctgcaacagcaaaacgccgctcctattgtaggggccgtcaacagtcaaggagccttacctggcatggtctggcagaaccgggacgtgtacctgcagggtcctatctgggccaagattcctcacacggacggcaactttcatccttcgccgctgatgggaggctttggactgaaacacccgcctcctcagatcctgattaagaatacacctgttcccgcggatcctccaactaccttcagtcaagccaagctggcgtcgttcatcacgcagtacagcaccggacaggtcagcgtggaaattgaatgggagctgcagaaagagaacagcaagcgctggaacccagagattcagtatacttccaactataacaaatctgttaatgtggactttactgtggacactaatggtgtgtattcagagcctcgccccattggcaccagatacctgactcgtaatctgtaa

SEQ ID NO: 200 - DNA, 3167 bp, Adeno-associated virus
attgaatttagcggccgcgaattcgcccttcgcagagaccaaagttcaactgaaacgaattaaacggtttattgattaacaagcaattacagattacgagtcaggtacctggtgccaatggggcgaggctctgaatacacaccattagtgtccacagtaaagtccacattaacagatttgttgtagttggaagtgtactgaatctcgggattccagcgtttgctgttctccttctgcagctcccactcgatctccacgctgacctgccccgtggagtactgtgtaatgaaggaagcaaactttgccgcactgaaggtagtcgaaggattcgcaggtaccggggtgttcttgatgagaatctgcgggggagggtgtttaagtccgaatccgcccatgaggggagaggggtgaaaatgtccgtccgtgtgtggaatctttgcccagatgggcccctgcaggtacacgtctctgtcctgccacaccatgcctggaagaacgccttgtgtgttgacatctgaggtagctgcttgtgtgttgccgctctggaggttggtagatacagaaccatactgctccgtagccacgggattggtggtcctgatttcctcttcgtctgtaatcatgaccttttcaatgtccacattagtttttcccgagtcttgttttccaaagatgagaaccccgctctgaggaaaaaacttttcttcatcgtccttgtggctggccatggccgggcccggattcaccagagagtctcttccattaaggtggtacttggtagctccagtccacgagtattcactgttgttgttatccgcagatgtctttgatactcgctgctggcggtaacagggtccaggaagccagttcctagactggtcccgaatgtcacttgctccggcctgagaaaactgaagccttgactgcgtggtggttccgcttggagtgtttgttctgctcaagtaatacaggtactggtcgatgagaggattcatgagacggtccaaactctggctgtgggcgtagctgctgtggaaaggaacgtcctcaaaggtgtagctgaaggtaaagttgtttccggtacgcagcatctgagaaggaaagtactccaggcagtaaaatgaagagcgtcctactgcctgactcccgttgttcagggtgaggtatccatactgtggcaccatgaagacgtctgctgggaacggcgggaggcatccttgatgcgccgagccgaggacgtacgggagctggtactccgagtcagtaaacacctgaaccgtgctggtaaggttattggcaatcgtcgtcgtaccgtcattctgcgtgacctccttgacttgaatgttaaagagcttgaagttgagtcttttgggccggaatccccaattgttgttgatgagtctttgccagtcacgtggcgaaaagtggcagtggaatctgttgaagtcaaaatacccccaaggggtgctgtagccaaagtagtggttgtcgtttgaggctcctgattggctggaaatctgcttgtagaggtggttgttgtaggtgggcagagcccaggtgcgggtgctggtggtgatgactctgtcgcccatccatgtggaatcgcaatgccaatttcccgaggaattacccactccgtcggcgccctcgttattgtctgccattggtgcgccactgcctgtagccatcgtattagttcccagaccagagggggctgctggtggctgtccgagaggctgggggtcaggtacggagtctgcgtctccagtctgaccgaaattcaatctctttcttgcaggctgctggcccgcttttccggttcccgaggaggagtctggctccgcaggagagtgctctaccggcctcttttttcccggagccgtcttaacaggttcctcaaccaggcccagaggttcaagaaccctctttttcgcctggaagactgctcgtccgaggttgcccccaaaagacgtatcttctttaagacgctcctggaactccgcgtcggcgtggttgtacttggggtacgggttgtctccgctgtcgagctgccggtcgtaggccttgtcgtgctcgagggccgcggcgtctgcctcgttgaccggctctcccttgtcgagtccgttgaagggtccaaggtacttgtacccaggaagcacaagacccctgctgtcgtccttatgccgctctgcgggctttggtggtggtgggccaggtttgagcttccaccactgtcttattccttcagagagagtgtcctcgagccaatctggaagataaccatcggcagccatacctgatttaaatcatttattgttcagagatgcagtcatccaaatccacattgaccagatcgcaagcagtgcaagcgtctggcacctttcccatgatatgatgaatgtagcacagtttctgatacgcctttttgacgacagaaacgggttgagattctgacacgggaaagcactctaaacagtctttctgtccgtgagtgaagcagatatttgaattctgattcattctctcgcattgtctgcagggaaacagcatcagattcatgcccacgtgacgagaacatttgttttggtacctgtccgcgtagttgattgaagcttccgcgtctgacgtcgatggctgcgcaactgactcgcgcgcccgtttgggctcacttatatctgcgtcactgggggcgggtctttttttggctccaccctttttgacgtagaattcatgctctacctcaaccacgtgatcctttgcccaccggaaaaagtctttgacttcctgcttggtgaccttcccaaagtcatgatccagacggcgggtgagttcaaatttgaacatccggtcttgcaacggctgctggtgttcgaaggtcgttgagttcccgtcaatcactgcgcacatgttggtgttggaggtgacaatcacgggagtcgggtctatctgggccgaggacttgcatttctggtccacgcgcaccttgcttcctccgagaatggctttggccgactccacgaccttggcggtcatcttcccctcctcccaccagatcaccatcttgtcgacgcaatcattgaaaggaaagttctcattggtccagttgacgcagccgtagaaagggcgaattcgtttaaacctgcaggactagtccctttagtgagggt

SEQ ID NO: 201 - DNA, 3161 bp, Adeno-associated virus
aattgaatttagcggccgcgaattcgcccttcgcagagaccaaagttcaactgaaacgaattaaacggtttattgattaacaagcaattacagattacgagtcaggtatctggtgccaatggggcgaggctctgaatacacaccattagtgtccacagtaaagtccacattaacagatttgttgtagttggaagtgtactgaatctcgggattccagcgtttgctgttctccttctgcagctcccactcgatctccacgctgacctgccccgtggagtactgtgtaatgaaggaagcaaactttgccgcactgaaggtagtcgaaggattcgcaggtaccggggtgttcttgatgagaatctgcgggggagggtgtttaagtccgaatccgcccatgaggggagaggggtgaaaatgtccgtccgtgtgtggaatctttgcccagatgggcccctgcaggtacacgtctctgtcctgccacaccatgcctggaagaacgccttgtgtgttgacatctgaggtagctgcttgtgtgttgccgctctggaggttggtagatacagaaccatactgctccgtagccacgggattggtggtcctgatttcctcttcgtctgtaatcatgaccttttcaatgtccacattagtttttcccgagtcttgttttccaaagatgagaaccccgctctgaggaaaaaacttttcttcatcgtccttgtggctggccatggccgggcccggattcaccagagagtctcttccattaaggtggtacttggtagctccagtccacgagtattcactgttgttgttatccgcagatgtctttgatactcgctgctggcggtaacagggtccaggaagccagttcctagactggtcccgaatgtcacttgctccggcctgagaaaactgaagccttgactgcgtggtggttccgcttggagtgtttgttctgctcaagtaatacaggtactggtcgacgagaggattcatgagacggtccaaactctggctgtgggcgtagctgctgtggaaaggaacgtcctcaaaggtgtagctgaaggtaaagttgtttccggtacgcagcatctgagaaggaaagtactccaggcagtaaaatgaagagcgtcctactgcctgactcccgttgttcagggtgaggtatccatactgtggcaccatgaagacgtctgctgggaacggcgggaggcatccttgatgcgccgagccgaggacgtacgggagctggtactccgagtcagtaaacacctgaaccgtgctggtaaggttattggcaatcgtcgtcgtaccgtcattctgcgtgacctccttgacttgaatgttaaagagcttgaagttgagtcttttgggccgggatccccaattgttgttgatgagtctttgccagtcacgtggcgaaaagtggcagtggaatctgttgaagtcaaaatacccccaaggggtgctgtagccaaagtagtggttgtcgtttgaggctcctgattggctggaaatctgcctgtagaggtggttgttgtaggtgggcagagcccaggtgcgggtgctggtggtgatgactctgtcgcccatccatgtggaatcgcaatgccaatttcccgaggaattacccactccgtcggcgccctcgttattgtctgccattggtgcgccactgcctgtagccatcgtattagttcccagaccagagggggctgctggtggctgtccgagaggctgggggtcaggtacggagtctgcgtctccagtctgaccgaaattcaatctccttcttgcaggctgctggcccgcttttccggttcccgaggaggagtctggctccgcaagagagtgctctaccggcctcttttttcccggagccgtcttaacaggttcctcaaccaggcccagaggttcaagaaccctctttttcgcctggaagactgctcgtccgaggttgcccccaaaagacgtatcttctttaagacgctcctggaactccgcgtcggcgtggttgtacttgaggtacgggttgtctccgccgtcgagctgccggtcgtaggccttgtcgtgctcgagggccgcggcgtctgcctcgttgaccggctctcccttgtcgagtccgttgaagggtccaaggtacttgtacccaggaagcacaagacccctgctgtcgtccttatgccgctctgcgggctttggtggtggtgggccaggtttgagcttccaccactgtcttattccttcagagagagtgtcctcgagccaatctggaagataaccatcggcagccatacctgatttaaatcatttattgttcagagatgcagtcatccaaatccacattgaccagatcgcaagcagtgcaagcgtctggcacctttcccatgatatgatgaatgtagcacagtttctgatacgcctttttgacgacagaaacgggttgagattctgacacgggaaagcactctaaacagtctttctgtccgtgagtgaagcagatatttgaattctgattcattctctcgcattgtctgcagggaaacagcatcagattcatgcccacgtgacgagaacatttgttttggtacctgtccgcgtagttgattgaagcttccgcgtctgacgtcgatggctgcgcaactgactcgcgcgcccgtttgggctcacttatatctgcgtcactgggggcgggtctttttttggctccaccctttttgacgtagaattcatgctctacctcaaccacgtgatcctttgcccaccggaaaaagtctttgacttcctgcttggtgaccttcccaaagtcatgatccagacggcgggtgagttcaaatttgaacatccggtcttgcaacggctgctggtgttcgaaggtcgttgagttcccgtcaatcactgcgcacatgttggtgttggaggtgacaatcacgggagtcgggtctatctgggccgaggacttgcatttctggtccacgcgcaccttgcttcctccgagaatggctttggccgactccacgaccttggcggtcatcttcccctcctcccaccagatcaccatcttgtcgacgcaatcattgaaaggaaagttctcattggtccagttgacgcagcaagggcgaattcgtttaaacctgcaggactagtccctttagtgaggg

SEQ ID NO: 202 - DNA, 3172 bp, Adeno-associated virus
gattgaatttagcggccgcgaattcgcccttgctgcgtcaactggaccaatgagaactttcccttcaacgattgcgtcgacaagatggtgatctggtgggaggagggcaagatgaccgccaaggtcgtggagtccgccaaggccattctgggtggaagcaaggtgcgcgtggaccaaaagtgcaagtcatcggcccagatcgaccccacgcccgtgatcgtcacctccaacaccaacatgtgcgccgtgatcgacgggaacagcaccaccttcgagcaccagcagcccctgcaggaccgcatgttcaagttcgagctcacccgccgtctggagcacgactttggcaaggtgaccaagcaggaagtcaaagagttcttccgctgggctcaggatcacgtgactgaggtggcgcatgagttctacgtcagaaagggcggagccaccaaaagacccgcccccagtgacgcggatataagcgagcccaagcgggcctgcccctcagttgcggagccatcgacgtcagacgcggaagcaccggtggactttgcggacaggtaccaaaacaaatgttctcgtcacgcgggcatgcttcagatgctgtttccctgcaagacatgcgagagaatgaatcagaatttcaacgtctgcttcacgcacggggtcagagactgctcagagtgcttccccggcgcgtcggaatctcaacccgtcgtcagaaaaaagacgtatcagaaactgtgcgcgattcatcatctgctggggcgggcacccgagattgcgtgttcggcctgcgatctcgtcaacgtggacttggatgactgtgtttctgagcaataaatgacttaaaccaggtatggctgctgacggttatcttccagattggctcgaggacaacctctctgagggcattcgcgagtggtgggacctgaaacctggagcccccaagcccaaggccaaccagcagaagcaggacgacggccggggtctggtgcttcctggctacaagtacctcggacccttcaacggactcgacaagggggagcccgtcaacgcggcggacgcagcggccctcgagcacgacaaggcctacgaccagcagctcaaagcgggtgacaatccgtacctgcggtataaccacgccgacgccgagtttcaggagcgtctgcaagaagatacgtcttttgggggcaacctcgggcgagcagtcttccaggccaagaagcgggttctcgaacctctcggtctggttgaggaagctgctaagacggctcctggaaagaagagaccggtagaaccgtcacctcagcgttcccccgactcctccgcgggcatcggcaagaaaggccagcagcccgctaaaaagagactgaactttggtcagactggcgactcagagtcagtccccgaccctcaaccaatcggagaaccaccagcaggcccctctggtctgggatctggtacaatggctgcaggcggtggcgctccaatggcagacaataacgaaggcgccgacggagtgggtagttcctcaggaaattggcattgcgattccacatggctgggcgacagagtcatcaccaccagcacccgaacctgggccctgcccacctacaacaaccacctctacaagcaaatatccaatgggacatcgggaggaagcaccaacgacaacacctacttcggctacagcaccccctgggggtattttgacttcaacagattccactgccacttctcaccacgtgactggcagcgactcatcaacaacaactggggattccggccaaaaagactcagcttcaagctcttcaacatccaggtcaaggaggtcacgcagaatgaaggcaccgagaccatcgccaataaccttaccagcacgattcaggtatttacggactcggaataccagctgccgtacgtcctcggctccgcgcaccagggctgcctgcctccgttcccggcggacgtcttcatgattccccagtacggctaccttacactgaacaatggaagtcaagccgtaggccgttcctccttctactgcctggaatattttccatctcaaatgctgcgaactggaaacaattttgaattcagctacaccttcgaggacgtgcctttccacagcagctgcgcacacagccagagctcggaccgactgatgaatcctctcatcgaccagtacctgtactacttatccagaactcggtccacaggaggaactcaaggtacccagcaattgttattttctcaagctgggcctgcaaacatgtcggctcaggctaagaactggctacctggaccttgctaccggcagcagcgagtctctacgacactgtcgcaaaacaacaacagcaactttgcttggactggtgccaccaaatatcacctgaacggaagagactctttggtaaatcccggtgtcgccatggcaacccacaaggacgacgaggaacgcttcttcccgtcgagtggagtcctgatgtttggaaaacagggtgctggaagagacaatgtggactacagcagcgttatgctaaccagcgaagaagaaattaaaaccactaaccctgtagccacagaacaatacggtgtggtggctgacaacttgcagcaaaccaatacagggcctattgtgggaaatgtcaacagccaaggagccttacctggcatggtctggcagaaccgagacgtgtacctgcagggtcccatctgggccaagattcctcacacggacggcaacttccacccttcaccgctaatgggaggatttggactgaagcacccacctcctcagatcctgatcaagaacacgccggtacctgcggatcctccaacaacgttcagccaggcgaaattggcttccttcattacgcagtacagcaccggacaggtcagcgtggaaatcgagtgggagctgcagaaggagaacagcaaacgctggaacccagagattcagtacacttcaaactactacaaatctacaaatgtggactttgctgtcaatacagagggaacttattctgagcctcgccccattggtactcgttacctcacccgtaatctgtaattgctggttaatcaataaaccgtttgattcgtttcagttgaactttggtctctgcgaagggcgaattcgtttaaacctgcaggactagtccctttagtgagg

SEQ ID NO: 203 - DNA, 3172 bp, Adeno-associated virus
gattgaatttagcggccgcgaattcgcccttgctgcgtcaactggaccaatgagaactttcccttcaacgattgcgtcgacaagatggtgatctggtgggaggagggcaagatgaccgccaaggtcgtggagtccgccaaggccattctgggtggaagcaaggtgcgcgtggaccaaaagtgcaagtcatcggcccagatcgaccccacgcccgtgatcgtcacctccaacaccaacatgtgcgccgtgatcggcgggaacagcaccaccttcgagcaccagcagcccctgcaggaccgcatgttcaagttcgagctcacccgccgtctggagcacgactttggcaaggtgaccaagcaggaagtcaaagagttcttccgctgggctcaggatcacgtgactgaggtggcgcatgagttctacgtcagaaagggcggagccaccaaaagacccgcccccagtgacgcggatataagcgagcccaagcgggcctgcccctcagttgcggagccatcgacgtcagacgcggaagcaccggtggactttgcggacaggtaccaaaacaaatgttctcgtcacgcgggcatgcttcagatgctgtttccctgcaagacatgcgagagaatgaatcagaatttcaacgtctgcttcacgcacggggtcagagactgctcagagtgcctccccggcgcgtcagaatctcaacccgtcgtcagaaaaaagacgtatcagaaactgtgcgcgattcatcatctgctggggcgggcacccgagattgcgtgttcggcctgcgatctcgtcaacgtggacttggatgactgtgtttctgagcaataaatgacttaaaccaggtatggctgctgacggttatcttccagattggctcgaggacaacctctctgagggcattcgcgagtggtgggacctgaaacctggagcccccaagcccaaggccaaccagcagaagcaggacgacggccggggtctggtgcttcttggctacaagtacctcggacccttcaacggactcgacaagggggagcccgtcaatgcggcggacgcagcggccctcgagcacgacaaggcctacgaccagcagctcaaagcgggtgacaatccgtacctgcggtataaccacgccgacgccgagtttcaggagcgtctgcaagaagatacgtcttttgggggcaacctcgggcgagcagtcttccaggccaagaagcgggttctcgaacctctcggtctggttgaggaagctgctaagacggctcctggaaagaagagaccggtagaaccgtcacctcagcgttcccccgactcctccacgggcatcggcaagaaaggccagcagcccgctaaaaagagactgaactttggtcagactggcgactcagagtcagtccccgaccctcaaccaatcggagaaccaccagcaggcccctctggtctgggatctggtacaatggctgcaggcggtggcgctccaatggcagacaataacgaaggcgccgacggagtgggtagttcctcaggaaattggcattgcgattccacatggctgggcgacagagtcatcaccaccagcacccgaacctgggccctgcccacctacaacaaccacctctacaagcaaatatccaatgggacatcgggaggaagcaccaacgacaacacctacttcggctacagcaccccctgggggtattttgacttcaacagattccactgccacttctcaccacgtgactggcagcgactcatcaacaacaactggggattccggccaaaaagactcagcttcaagctcttcaacatccaggtcaaggaggtcacgcagaatgaaggcaccaagaccatcgccaataaccttaccagcacgattcaggtatttacggactcggaataccagctgccgtacgtcctcggctccgcgcaccagggctgcctgcctccgttcccggcggacgtcttcatgattccccagtacggctaccttacactgaacaatggaagtcaagccgtaggccgttcctccttctactgcctggaatattttccatctcaaatgctgcgaactggaaacaattttgaattcagctacaccttcgaggacgtgcctttccacagcggctacgcacacagccagagcttggaccgactgatgaatcctctcatcgaccagtacctgtactacttatccagaactcagtccacaggaggaactcaaggtacccagcaattgttattttctcaagctgggcctgcaaacatgtcggctcaggctaagaactggctacctggaccttgctaccggcagcagcgagtctctacgacactgtcgcaaaacaacaacagcaactttgcttggactggtgccaccaaatatcacctgaacggaagagactctttggtaaatcccggtgtcgccatggcaacccacaaggacgacgaggaacgcttcttcccgtcgagtggagtcctgatgtttggaaaacagggtgctggaagagacaatgtggactacagcagcgttatgctaaccagcgaagaagaaattaaaaccactaaccctgtagccacagaacaatacggtgtggtggctgacaacttgcagcaaaccaatacagggcctattgtgggaaatgtcaacagccaaggagccttacctggcatggtctggcagaaccgagacgtgtacctgcagggtcccatctgggccaagattcctcacacggacggcaacttccacccttcaccgctaatgggaggatttggactgaagcacccacctcctcagatcctgatcaagaacacgccggtacctgcggatcctccaacgacgttcagccaggcgaaattggcttccttcattacgcagtacagcaccggacaggtcagcgtggaaatcgagtgggagctgcagaaggagaacagcaaacgctggaacccagagattcagtacacttcaaactactacaaatctacaaatgtggactttgctgtcaatacagagggaacttattctgagcctcgccccattggtactcgttacctcacccgtaatctgtaattgctggttaatcaataaaccgtttgattcgtttcagttgaactttggtctctgcgaagggcgaattcgtttaaacctgcaggactagtccctttagtgagg

SEQ ID NO: 204 - DNA, 2208 bp, Adeno-associated virus
atggctgccgatggttatcttccagattggctcgaggacactctctctgaaggaataagacagtggtggaagctcaaacctggcccaccaccaccaaagcccgcagagcggcataaggacgacagcaggggtcttgtgcttcctgggtacaagtacctcggacccttcaacggactcgacaagggagagccggtcaacgaggcagacgccgcggccctcgagcacgacaaggcctacgaccggcagctcgaaagcggagacaacccgtacctcaagtacaaccacgccgacgcggagtttcaggagcgtcttaaagaagatacgtcttttgggggcaacctcggacgagcagtcttccaggcgaaaaagagggttcttgaacctctgggcctggttgaggagcctgttaaaacggctccgggaaaaaagaggccggtagagcactctcctgtggagccagactcctcctcgggaaccggaaaagcgggccagcagcctgcgagaaaaagattgaattttggtcagactggagacgcagactccgtacctgacccccagcctctcggacagccaccagcagccccctctggtctgggatctactacaatggcttcaggcagtggcgcaccagtggcagacaataacgagggtgccgatggagtgggtaattcctcaggaaattggcattgcgattcccaatggctgggcgacagagtcatcaccaccagcacccgaacctgggccctgcccacctacaacaaccacctctacaagcaaatctccagccaatcaggagcctcaaacgacaaccactactttggctacagcaccccctgggggtattttgacttcaacagattccactgccacttttcaccacgtgactggcaaagactcatcaacaacagctggggattccgacccaaaagactcaacttcaagctctttaacattcaagtcaaagaggtcacgcagaatgacggtacgacgacgattgccaataaccttaccagcacggttcaagtgtttaccgactcggagtaccagctcccgtacgtcctcggctcggcgcatcaaggatgcctcccgccgttcccagcagacgtctttatggtcccacagtatggatacctcaccctgaacaacgggagtcaggcggtaggacgctcttccttttactgcctggagtactttccttctcagatgctgcgtactggaaacaactttcagttcagctacacctttgaagacgttcccttccacagcagctacgctcacagccagagtctggatcggctgctgaatcctctgatcgaccagtacctatattatctgaacaagacacaatcaaatagtggaactcttcagcagtctcggctactgtttagccaagctggacccaccagcatgtctcttcaagctaaaaactggctgcctggaccttgctacagacagcagcgtctgtcaaagcaggcaaacgacaacaacaacagcaactttccctggactgcggctacaaagtatcatctaaatggccgggactcgttggttaatccaggaccagctatggccagccacaaagacgatgaagaaaagtttttccccatgcatggaaccctgatatttggtaaacaaggaacaaatgctaacgacgcggatttggacaatgtcatgattacagatgaagaagaaatccgcaccaccaatcccgtggctacggagcagtacggatatgtgtcaaataatttgcaaaactcaaatactggtccaactactggaactgtcaatcaccaaggagcgttacctggtatggtgtggcaggatcgagacgtgtacctgcagggacccatttgggccaagattcctcacacggacgggcactttcatccttctccactaatgggaggttttgggctcaaacacccgcctcctcagatcatgatcaaaaacactcccgttccagccaatcctcctacaaacttcagttcttccaagtttgcttctttcatcacacagtattccacggggcaggtcagcgtggagatcgagtgggagctgcagaaggagaacagcaaacgctggaatcccgaaattcagtatacttccaactacaacaaatctgttaatgtggactttactgtggacactaatggtgtgtattcagagcctcgccccattggcaccagatacccgactcgtaatctgtaa

SEQ ID NO: 205 - protein, 735 aa, Adeno-associated virus
MAADGYLPDWLEDTLSEGIRQWWKLKPGPPPPKPAERHKDDSRGLVLPGYKYLGPFNGLDKGEPVNEADAAALEHDKAYDRQLESGDNPYLKYNHADAEFQERLKEDTSFGGNLGRAVFQAKKRVLEPLGLVEEPVKTAPGKKRPVEHSPVEPDSSSGTGKAGQQPARKRLNFGQTGDADSVPDPQPLGQPPAAPSGLGSTTMASGSGAPVADNNEGADGVGNSSGNWHCDSQWLGDRVITTSTRTWALPTYNNHLYKQISSQSGASNDNHYFGYSTPWGYFDFNRFHCHFSPRDWQRLINNSWGFRPKRLNFKLFNIQVKEVTQNDGTTTIANNLTSTVQVFTDSEYQLPYVLGSAHQGCLPPFPADVFMVPQYGYLTLNNGSQAVGRSSFYCLEYFPSQMLRTGNNFQFSYTFEDVPFHSSYAHSQSLDRLLNPLIDQYLYYLNKTQSNSGTLQQSRLLFSQAGPTSMSLQAKNWLPGPCYRQQRLSKQANDNNNSNFPWTAATKYHLNGRDSLVNPGPAMASHKDDEEKFFPMHGTLIFGKQGTNANDADLDNVMITDEEEIRTTNPVATEQYGYVSNNLQNSNTGPTTGTVNHQGALPGMVWQDRDVYLQGPIWAKIPHTDGHFHPSPLMGGFGLKHPPPQIMIKNTPVPANPPTNFSSSKFASFITQYSTGQVSVEIEWELQKENSKRWNPEIQYTSNYNKSVNVDFTVDTNGVYSEPRPIGTRYPTRNL

SEQ ID NO: 206 - DNA, 2208 bp, Adeno-associated virus
atggctgccgatggttatcttccagattggctcgaggacactctctctgaaggaataagacagtggtggaagctcaaacctggcccaccaccaccaaagcccgcagagcggcataaggacgacagcaggggtcttgtgcttcctgggtacaagtacctcggacccttcaacggactcgacaagggagagccggtcaacgaggcagacgccgcggccctcgagcacgacaaggcctacgaccggcagctcgacagcggagacaacccgtacctcaagtacaaccacgccgacgcggagtttcaggagcgtcttaaagaagatacgtcttttgggggcaacctcggacgagcagtcttccaggccaaaaagaggattcttgaacctctgggcctggttgaggaacctgttaagacggctccgggagaaaagaggccggtagagcactctcctgcggagccagactcctcctcgggaaccggaaaagcgggccagcagcctgcaagaaagagattgaattttggccagactggagacgcagactcagtacctgacccccagcctctcggacagccaccagcagccccctctggtctgggaactaatacgatggcttcaggcagtggcgcaccaatggcagacaataacgagggcgccgacggagtgggtaattcctcgggaaattggtattgcgattccacatggatgggcgacagagtcatcaccaccagcacccgcacctgggccctgcccacctacaacaaccatctgtacaagcaaatctccagccagtctggagccagcaacgacaaccactactttggctacagcaccccctgggggtattttgacttcaacagattccactgccacttctccccacgtgactggcaaagactcatcaacaacaactggggattccggcccaagagactcagcttcaagctctttaacattcaagtcaaagaggtcacgcagaatgacggtacgacgacgattgccaataaccttaccagcacggttcaggtgtttactgactcggagtaccagctcccgtacgtcctcggctcggcgcatcaaggatgcctcccgccgttcccagcagacgtcttcatggtgccacagtatggatacctcaccctgaacaacggcagtcaggcggtaggacgctcttccttttactgcctggagtactttccttctcagatgcttcgtaccggaaacaactttaccttcagctacacctttgaagacgttcctttccatagcagctacgctcacagccaaagtctggaccgtctcatgaatcctctcatcgaccagtacctgtattacttgagcagaacaaacactccaagcggaaccaccacgatgtccaggcttcagttttctcaggccggagcaagtgacattcgggaccagtctagaaactggcttcctggaccctgttaccgccagcagcgagtatcaaagacagctgcggacaacaacaacagtgattactcgtggactggagctaccaagtaccacctcaatggaagagactctctggtgaatccgggcccagctatggccagccacaaggacgatgaagaaaaatattttcctcagagcggggttctcatctttggaaaacaagactcgggaaaaactaatgtggacattgaaaaggttatgattacagacgaagaggaaatcaggaccaccaatcccgtggctacggagcagtatggttctgtatctaccaacctccagagcggcaacacacaagcagctacctcagatgtcaacacacaaggcgttcttccaggcatggtctggcaggacagagacgtgtacctgcaggggcccatctgggcaaagattccacacacggacggacattttcacccctctcccctcgtgggcggattcggacttaaacaccctcctccacaaattctcatcaagaacaccccggtacctgcgaatccttcgaccactttcagtgcggcaaagtttgcttccttcatcacacagtactccacggggcaggtcagcgtggagatcgagtgggagctgcagaaggagaacagcaaacgctggaatcccgaaattcagtacacttccaactacaacaaatctgttaatgtggactttactgtggacactaatggtgtgtattcagagcctcgccccattggcaccagatacctgactcgtaatctgtaa

SEQ ID NO: 207 - protein, 735 aa, Adeno-associated virus
MAADGYLPDWLEDTLSEGIRQWWKLKPGPPPPKPAERHKDDSRGLVLPGYKYLGPFNGLDKGEPVNEADAAALEHDKAYDRQLDSGDNPYLKYNHADAEFQERLKEDTSFGGNLGRAVFQAKKRILEPLGLVEEPVKTAPGEKRPVEHSPAEPDSSSGTGKAGQQPARKRLNFGQTGDADSVPDPQPLGQPPAAPSGLGTNTMASGSGAPMADNNEGADGVGNSSGNWYCDSTWMGDRVITTSTRTWALPTYNNHLYKQISSQSGASNDNHYFGYSTPWGYFDFNRFHCHFSPRDWQRLINNNWGFRPKRLSFKLFNIQVKEVTQNDGTTTIANNLTSTVQVFTDSEYQLPYVLGSAHQGCLPPFPADVFMVPQYGYLTLNNGSQAVGRSSFYCLEYFPSQMLRTGNNFTFSYTFEDVPFHSSYAHSQSLDRLMNPLIDQYLYYLSRTNTPSGTTTMSRLQFSQAGASDIRDQSRNWLPGPCYRQQRVSKTAADNNNSDYSWTGATKYHLNGRDSLVNPGPAMASHKDDEEKYFPQSGVLIFGKQDSGKTNVDIEKVMITDEEEIRTTNPVATEQYGSVSTNLQSGNTQAATSDVNTQGVLPGMVWQDRDVYLQGPIWAKIPHTDGHFHPSPLVGGFGLKHPPPQILIKNTPVPANPSTTFSAAKFASFITQYSTGQVSVEIEWELQKENSKRWNPEIQYTSNYNKSVNVDFTVDTNGVYSEPRPIGTRYLTRNL

SEQ ID NO: 208 - DNA, 2209 bp, Adeno-associated virus
atggctgccgatggttatcctccagattggctcgaggacactctctctgaagggataagacagtggtggaagctcaaacctggcccaccaccaccaaagcccgcagagcggcataaggacgacagcaggggtcttgtgcttcctgggtacaagtacctcggacccttcaacggactcgacaagggggagccggtcaacgaggcagacgccgcggccctcgagcacgacaaggcctacgaccggcagctcgacagcggagacaacccgtacctcaagtacaaccacgccgacgcagagtttcaggagcgccttaaagaagatacgtcttttgggggcaacctcggacgagcagtcttccaggcgaaaaagagggttcttgaacctctgggcctggttgaggaacctgttaagacggctccgggaaaaaagaggccggtagagcactctcctgtggagccagactcctcctcgggaaccggaaaagcgggccagcggcctgcaagaaaaagattaaattttggtcagactggagacgcagactccgtacctgacccccagcctctcggacagccaccagcagccccctctggtctgggatctactacaatggctacaggcagtggcgcaccaatggcagacaataacgagggtgccgatggagtgggtaattcctcaggaaattggcattgcgattcccaatggctgggcgacagagtcatcaccaccagcacccgaacctgggccctgcccacatacaacaaccacctctacaagcaaatctccagccaatcaggagccagcaacgacaaccactactttggctacagcaccccctgggggtattttgacttcaacagattccactgccacttttcaccacgtgactggcaaagactcatcaacaacaactggggattccggcccaaaagactcaacttcaagctctttaatattcaagtcaaagaggtcacgcagaatgacggtacgacgacgattgccaataaccttaccagcacggttcaggtgtttactgactcggagtaccagctcccgtacgtcctgggctcggcgcatcaaggatgcctcccgccgtttccagcggacgtcttcatggtcccacagtatggatacctcaccctgaacaacgggagtcaggcggtaggacgctcttccttttactgcctggagtactttccttctcagatgctgcgtactggaaacaactttcagttcagctacacttttgaagacgtgcctttccacagcagctacgctcacagccagagtctggatcggctgatgaatcctctgatcgaccagtacctgtattatctgaacaagacacaaacaaatagtggaactcttcagcagtctcggctactgtttagccaagctggaccaaccaacatgtctcttcaagctaaaaactggctgcctggaccttgctacagacagcagcgtctgtcaaaacaggcaaacgacaacaacaacagcaactttccctggactgcagctacaaagtatcatctaaatggccgggactcgttggttaatccaggaccagctatggccagtcacaaggatgacgaagaaaagtttttccccatgcatggaaccctgatatttggtaaacaaggaacaaatgccaacgacgcggatttggaaaatgtcatgattacagatgaagaagaaatcagggccaccaatcccgtggctacggagcagtacgggactgtgtcaaataatttgcaaaactcaaacactggtccaactactggaactgtcaatcgccaaggagcgttacctggtatggtgtggcaggatcgagacgtgtacctgcagggacccatttgggccaagattcctcacaccgatggacactttcatccttctccactgatgggaggttttggactcaaacacccgcctcctcagatcatgatcaaaaacactcccgttccagccaatcctcccacaaacttcagttctgccaagtttgcttctttcatcacacagtattccacgggacaggtcagcgtggagatcgagtgggagctgcagaaggagaacagcaaacgctggaatcccgaaattcagtacacttccaactacaacaagtctgttaatgtggactttactgtggacactaatggtgtgtattcagagcctcgccccattggcaccagatacctgactcgtaatctgtaat

SEQ ID NO: 209 - protein, 735 aa, Adeno-associated virus
MAADGYPPDWLEDTLSEGIRQWWKLKPGPPPPKPAERHKDDSRGLVLPGYKYLGPFNGLDKGEPVNEADAAALEHDKAYDRQLDSGDNPYLKYNHADAEFQERLKEDTSFGGNLGRAVFQAKKRVLEPLGLVEEPVKTAPGKKRPVEHSPVEPDSSSGTGKAGQRPARKRLNFGQTGDADSVPDPQPLGQPPAAPSGLGSTTMATGSGAPMADNNEGADGVGNSSGNWHCDSQWLGDRVITTSTRTWALPTYNNHLYKQISSQSGASNDNHYFGYSTPWGYFDFNRFHCHFSPRDWQRLINNNWGFRPKRLNFKLFNIQVKEVTQNDGTTTIANNLTSTVQVFTDSEYQLPYVLGSAHQGCLPPFPADVFMVPQYGYLTLNNGSQAVGRSSFYCLEYFPSQMLRTGNNFQFSYTFEDVPFHSSYAHSQSLDRLMNPLIDQYLYYLNKTQTNSGTLQQSRLLFSQAGPTNMSLQAKNWLPGPCYRQQRLSKQANDNNNSNFPWTAATKYHLNGRDSLVNPGPAMASHKDDEEKFFPMHGTLIFGKQGTNANDADLENVMITDEEEIRATNPVATEQYGTVSNNLQNSNTGPTTGTVNRQGALPGMVWQDRDVYLQGPIWAKIPHTDGHFHPSPLMGGFGLKHPPPQIMIKNTPVPANPPTNFSSAKFASFITQYSTGQVSVEIEWELQKENSKRWNPEIQYTSNYNKSVNVDFTVDTNGVYSEPRPIGTRYLTRNL

SEQ ID NO: 210 - DNA, 2208 bp, Adeno-associated virus
atggctgccgatggttatcttccagattggctcgaggacactctctctgaaggaataagacagtggtggaagctcaaacctggcccaccaccaccaaagcccgcagagcggcataaggacgacagcaggggtcttgtgcttcctgggtacaggtacctcggacccttcaacggactcgacaagggagagccggtcaacgaggcagacgccgcggccctcgagcacgacaaggcctacgaccggcagctcgacagcggagacaacccgtacctcaagtacaaccacgtcgacgcggagtttcaggagcgtcttaaagaagatacgtcttttgggggcaacctcggacgagcagtcttccaggccaaaaagaggattcttgaacctctgggcctggttgaggaacctgttaaggcggctccgggagaaaagaggccggtagagcactctcctgcggagccagactcctcctcgggaaccggaaaagcgggccagcagcctgcaagaaagagattgaattttggtcagactggagacgcagactcagtacctgacccccagcctctcggacagccaccagcagccccctctggtctgggaactaatacgatggcttcaggcagtggcgcaccaatggcagacaataacgagggcgccgacggagtgggtaattcctcgggaaattggcattgcgattccacatggatgggcgacagagtcatcaccaccagcacccgcacctgggccctgcccacctacaacaaccatctgtacaagcaaatctccagccagtctggagccagcaacgacaaccactactttggctacagcaccccctgggggcattttgacttcaacagattccactgccacttctccccacgtgactggcaaagactcatcaacaacaactggggattccggcccaagagactcagcttcaagctctttaacattcaagtcaaagaggtcacgcagaatgacggtacgacgacgattgccaataaccttaccagcacggttcaggtgtttactgactcggagtaccagctcccgtacgtcctcggctcggcgcatcaaggatgcctcccgccgttcccagcagacgtcttcatggtgccacagtatggatacctcaccctgaacaacggcagtcaggcggtaggacgctcttccttttactgcctggagtactttccttctcagatgcttcgtaccggaaacaactttaccttcagctacacctttgaagacgttcctttccatagcagctacgctcacagccaaagtctggaccgtctcatgaatcctctcatcgaccagtacctgtattacttgagcagaacaaacactccaagcggaaccaccacgatgtccaggcttcagttttctcaggccggagcaagtgacattcgggaccagtctagaaactggcttcctggaccctgttaccgccagcagcgagtatcaaagacagctgcggacaacaacaacagtgattactcgtggactggagctaccaagtaccacctcaatggaagagactctctggtgaatccgggcccagctatggccagccacaaggacgatgaagaaaaatattttcctcagagcggggttctcatctttggaaaacaagactcgggaaaaactaatgtggacattgaaaaggttatgattacagacgaagaggaaatcaggaccaccaatcccgtggctacggagcagtatggttctgtatctaccaacctccagagcggcaacacacaagcagctacctcagatgtcaacacacaaggcgttcttccaggcatggtctggcaggacagagacgtgtacctgcaggggcccatctgggcaaagattccacacacggacggacattttcacccctctccccccatgggcggattcggacttaaacaccctcctccacaaattctcatcaagaacaccccggtacctgcgaatccttcgaccactttcagtgcggcaaagtttgcttccttcatcacacagtactccacggggcaggtcagcgtggagatcgagtgggagctgcagaaggagaacagcaaacgctggaatcccgaaattcagtacacttccaactacaacaaatctgttaatgtggactttactgtggacactaatggtgtgtattcagagcctcgccccattggcgccagatacctgactcgtaatctgtaa

SEQ ID NO: 211 - protein, 735 aa, Adeno-associated virus
MAADGYLPDWLEDTLSEGIRQWWKLKPGPPPPKPAERHKDDSRGLVLPGYRYLGPFNGLDKGEPVNEADAAALEHDKAYDRQLDSGDNPYLKYNHVDAEFQERLKEDTSFGGNLGRAVFQAKKRILEPLGLVEEPVKAAPGEKRPVEHSPAEPDSSSGTGKAGQQPARKRLNFGQTGDADSVPDPQPLGQPPAAPSGLGTNTMASGSGAPMADNNEGADGVGNSSGNWHCDSTWMGDRVITTSTRTWALPTYNNHLYKQISSQSGASNDNHYFGYSTPWGHFDFNRFHCHFSPRDWQRLINNNWGFRPKRLSFKLFNIQVKEVTQNDGTTTIANNLTSTVQVFTDSEYQLPYVLGSAHQGCLPPFPADVFMVPQYGYLTLNNGSQAVGRSSFYCLEYFPSQMLRTGNNFTFSYTFEDVPFHSSYAHSQSLDRLMNPLIDQYLYYLSRTNTPSGTTTMSRLQFSQAGASDIRDQSRNWLPGPCYRQQRVSKTAADNNNSDYSWTGATKYHLNGRDSLVNPGPAMASHKDDEEKYFPQSGVLIFGKQDSGKTNVDIEKVMITDEEEIRTTNPVATEQYGSVSTNLQSGNTQAATSDVNTQGVLPGMVWQDRDVYLQGPIWAKIPHTDGHFHPSPPMGGFGLKHPPPQILIKNTPVPANPSTTFSAAKFASFITQYSTGQVSVEIEWELQKENSKRWNPEIQYTSNYNKSVNVDFTVDTNGVYSEPRPIGARYLTRNL

SEQ ID NO: 212 - DNA, 2208 bp, Adeno-associated virus
atggctgccgatggttatcttccagattggctcgaggacaccctctctgaaggaataagacagtggtggaagctcaaacctggcccaccaccaccaaagcccgcagagcggcataaggacgacagcaggggtcttgtgcttcctgggtacaagtacctcggacccttcaacggactcgacaagggagagccggtcaacgaggcagacgccgcggccctcgagcacgacaaggcctacgaccggcagctcgacagcggagataacccgtacctcaagtacaaccacgccgacgcggagtttcaggagcgccttaaagaggatacgtcttttgggggcaacctcggacgagcagtcttccaggccaaaaagaggattcttgaacctctgggcctggttgaggaacctgttaagacggctccgggaaaaaagaggccggtagagcactctcctgcggagccagactcctcctcgggaaccggaaaagcgggccagcagcctgcaagaaagagattgaattttggtcagactggagacgcagactcagtacctgacccccggcctctcggacagccaccagcagccccctctggtctgggaactaatacgatggcttcaggcagtggcgcaccaatggcagacaataacgagggcgccgacggagtgggtaattcctcgggaaattggcattgcgattccacatggatgggcgacagagtcatcaccaccagcacccgcacctgggccctgcccacctacaacaaccatctgtacaagcaaatctccagccagtctggagccagcaacgacaaccactactttggctacagcaccccctgggggtattttgacttcaacagattccactgccacttctccccacgtgactggcaaagactcatcaacaacaactggggattccggcccaagagactcagcttcaagctctttaacattcaagtcaaagaggtcacgcagaatgacggtacgacgacgattgccaataaccttaccagcacggttcaggtgtttactgactcggagtaccagctcccgtacgtcctcggctcggcgcatcaaggatgcctcccgccgttcccagcagacgtcttcatggtgccacagtatggatacctcaccctgaacaacggcagtcaggcggtaggacgctcttccttttactgcctggagtactttccttctcagatgcttcgtaccggaaacaactttaccttcagctacacctttgaagacgttcctttccatagcagctacgctcacagccaaagtctggaccgtctcatgaatcctctcatcgaccagtacctgtattacttgagcagaacaaacactccaagcggaaccaccacgatgtccaggcttcagttttctcaggccggagcaagtgacattcgggaccagtctagaaactggcttcctggaccctgttaccgccagcagcgagtatcaaagacagctgcggacaacaacaacagtgattactcgtggactggagctaccaagtaccacctcaatggaagagactctctggtgaatccgggcccagctatggccagccacaaggacgatgaagaaaaatattttcctcagagcggggttctcatctttggaaaacaagactcgggaaaaactaatgtggacattgaaaaggttatgattacagacgaagaggaaatcaggaccaccaatcccgtggctacggagcagtatggttctgtatctaccaacctccagagcggcaacacacaagcagctacctcagatgtcaacacacaaggcgttcttccaggcatggtctggcaggacagagacgtgtacctgcaggggcccatctgggcaaagattccacacacggacggacattttcacccctctcccctcatgggcggattcggacttaaacaccctcctccacaaattctcatcaagaacaccccggtacctgcgaatccttcgaccactttcagtgcggcaaagtttgcttccttcatcacacagtactccacggggcaggtcagcgtggagatcgagtgggagctgcagaaggagaacagcaaacgctggaatcccgaaattcagtacacttccaactacaacaaatctgttaatgtggactttactgtggacactaatggtgtgtattcagagcctcgccccattggcaccagatacctgactcgtaatctgtaa

SEQ ID NO: 213 - protein, 735 aa, Adeno-associated virus
MAADGYLPDWLEDTLSEGIRQWWKLKPGPPPPKPAERHKDDSRGLVLPGYKYLGPFNGLDKGEPVNEADAAALEHDKAYDRQLDSGDNPYLKYNHADAEFQERLKEDTSFGGNLGRAVFQAKKRILEPLGLVEEPVKTAPGKKRPVEHSPAEPDSSSGTGKAGQQPARKRLNFGQTGDADSVPDPRPLGQPPAAPSGLGTNTMASGSGAPMADNNEGADGVGNSSGNWHCDSTWMGDRVITTSTRTWALPTYNNHLYKQISSQSGASNDNHYFGYSTPWGYFDFNRFHCHFSPRDWQRLINNNWGFRPKRLSFKLFNIQVKEVTQNDGTTTIANNLTSTVQVFTDSEYQLPYVLGSAHQGCLPPFPADVFMVPQYGYLTLNNGSQAVGRSSFYCLEYFPSQMLRTGNNFTFSYTFEDVPFHSSYAHSQSLDRLMNPLIDQYLYYLSRTNTPSGTTTMSRLQFSQAGASDIRDQSRNWLPGPCYRQQRVSKTAADNNNSDYSWTGATKYHLNGRDSLVNPGPAMASHKDDEEKYFPQSGVLIFGKQDSGKTNVDIEKVMITDEEEIRTTNPVATEQYGSVSTNLQSGNTQAATSDVNTQGVLPGMVWQDRDVYLQGPIWAKIPHTDGHFHPSPLMGGFGLKHPPPQILIKNTPVPANPSTTFSAAKFASFITQYSTGQVSVEIEWELQKENSKRWNPEIQYTSNYNKSVNVDFTVDTNGVYSEPRPIGTRYLTRNL

SEQ ID NO: 214 - DNA, 2208 bp, Adeno-associated virus
atggctgccgatggttatcttccagattggctcgaggacactctctctgaaggaataagacagtggtggaagctcaaacctggcccaccaccaccaaagcccgcagagcggcataaggacgacagcaggggtcttgtgcttcctgggtacaagtacctcggacccttcaacggactcgacaagggagagccggtcaacgaggcagacgccgcggccctcgagcacgacaaggcctacgaccggcagctcgacagcggagacaacccgtacctcaagtacaaccacgccgacgcggagtttcaggagcgccttaaaggagatacgtcttttgggggcaacctcggacgagcagtcttccaggccaaaaagaggattcttgaacctctgggcctggttgaggaacctgttaagacggctccgggaaaaaagaggccggtagagcactctcctgcggagccagactcctcctcgggaaccggaaaagcgggccagcagcctgcaagaaagagattgaattttggtcagactggagacgcagactcagtacctgacccccagcctctcggacagccaccagcagccccctctggtctgggaactaatacgatggcttcaggcagtggcgcaccaatggcagacaataacgagggcgccgacggagtgggtaattcctcgggaaattggcattgcgattccacatggatgggcggcagagtcatcaccaccagcacccgcacctgggccctgcccacctacaacaaccatctgtacaagcaaatctccagccagtctggagccagcaacgacaaccactactttggctacagcaccccctgggggtattttgacttcaacagattccactgccacttctccccacgtgactggcaaagactcatcaacaacaactggggattccggcccaagagactcagcttcaagctctttaacattcaagtcaaagaggtcacgcagaatgacggtacgacgacgattgccaataaccttaccagcacggttcaggtgtttactgactcggagtaccagctcccgtacgtcctcggctcggcgcatcaaggatgcctcccgccgttcccagcagacgtcttcatggtgccacagtatggatacctcaccctgaacaacggcagtcaggcggtaggacgctcttccttttactgcctggagtactttccttctcagacgcttcgtaccggaaacaactttaccttcagctacacctttgaagacgttcctttccatagcagctacgctcacagccaaagtctggaccgtctcatgaatcctctcatcgaccagtacctgtattacttgagcagaacaaacactccaagcggaaccaccacgatgtccaggcttcagttttctcaggccggagcaagtgacattcgggaccagtctagaaactggcttcctggaccctgttaccgccagcagcgagtatcaaagacagctgcggacaacaacaacagtgattactcgtggactggagctaccaagtaccacctcaatggaagagactctctggtgaatccgggcccagctatggccagccacaaggacgatgaagaaaaatattttcctcagagcggggttctcatctttggaaaacaagactcgggaaaaactaatgtggacattgaaaaggttatgattacagacgaagaggaaatcaggaccaccaatcccgtggctacggagcagtatggttctgtatctaccaacctccagagcggcaacacacaagcagctacctcagatgtcaacacacaaggcgttcttccaggcatggtctggcaggacagagacgtgtacctgcaggggcccatctgggcaaagattccacacacggacggacattttcacccctctcccctcatgggcggattcggacttaaacaccctcctccacaaattctcatcaagaacaccccggtacctgcgaatccttcgaccactttcagtgcggcaaagtttgcttccttcatcacacagtactccacggggcaggtcagcgtggagatcgagtgggagctgcagaaggagaacagcaaacgctggaatcccgaaattcagtacacttccaactacaacaaatctgttaatgtggactttactgtggacactaatggtgtgtattcagagcctcgccccattggcaccagatacctgactcgtaatctgtaa

SEQ ID NO: 215 - protein, 735 aa, Adeno-associated virus
MAADGYLPDWLEDTLSEGIRQWWKLKPGPPPPKPAERHKDDSRGLVLPGYKYLGPFNGLDKGEPVNEADAAALEHDKAYDRQLDSGDNPYLKYNHADAEFQERLKGDTSFGGNLGRAVFQAKKRILEPLGLVEEPVKTAPGKKRPVEHSPAEPDSSSGTGKAGQQPARKRLNFGQTGDADSVPDPQPLGQPPAAPSGLGTNTMASGSGAPMADNNEGADGVGNSSGNWHCDSTWMGGRVITTSTRTWALPTYNNHLYKQISSQSGASNDNHYFGYSTPWGYFDFNRFHCHFSPRDWQRLINNNWGFRPKRLSFKLFNIQVKEVTQNDGTTTIANNLTSTVQVFTDSEYQLPYVLGSAHQGCLPPFPADVFMVPQYGYLTLNNGSQAVGRSSFYCLEYFPSQTLRTGNNFTFSYTFEDVPFHSSYAHSQSLDRLMNPLIDQYLYYLSRTNTPSGTTTMSRLQFSQAGASDIRDQSRNWLPGPCYRQQRVSKTAADNNNSDYSWTGATKYHLNGRDSLVNPGPAMASHKDDEEKYFPQSGVLIFGKQDSGKTNVDIEKVMITDEEEIRTTNPVATEQYGSVSTNLQSGNTQAATSDVNTQGVLPGMVWQDRDVYLQGPIWAKIPHTDGHFHPSPLMGGFGLKHPPPQILIKNTPVPANPSTTFSAAKFASFITQYSTGQVSVEIEWELQKENSKRWNPEIQYTSNYNKSVNVDFTVDTNGVYSEPRPIGTRYLTRNL

SEQ ID NO: 216 - DNA, 2208 bp, Adeno-associated virus
atggctgccgatggttatcttccagattggctcgaggacactctctctgaaggaataagacagtggtggaagctcaaacctggcccaccaccaccaaagcccgcagagcggcataaggacgacagcaggggtcttgtgcttcctgggtacaagtacctcggacccttcaacggactcgacaagggagagccggtcaacgaggcagacgccgcggccctcgagcacgacaaggcctacgaccggcagctcgacagcggagacaacccgtacctcaagtacaaccacgccgacgcggagtttcaggagcgtcttaaagaagatacgtcttttgggggcaacctcggacgagcagtcttccaggccaaaaagaggattcttgaacctctgggcctggttgaggaacctgttaagacggctccgggaaaaaagaggccggtagagcactctcctgcggagccagactcctcctcgggaaccggaaaagcgggccagcagcctgcaagaaagagattgaattttggtcagactggagacgcagactcagtacctgacccccagcctctcggacagccaccagcagccccctctggtctgggaactaatacgatggcttcaggcagtggcgcaccaatggcagacaataacgagggcgccgacggagtgggtaattcctcgggaaattggcattgcgattccacatggatgggcgacagagtcatcaccaccagcacccgcacctgggccctgcccacctgcaacaaccatctgtacaagcaaatctccagccagtctggagccagcaacgacaaccactactttggctacagcaccccctgggggtattttgacttcaacagattccactgccacttctccccacgtgactggcaaagactcatcaacaacaactggggattccggcccaagagactcagcttcaagctctttaacattcaagtcaaagaggtcacgcagaatgacggtacgacgacgattgccaataaccttaccagcacggttcaggtgtttactgactcggagtaccagctcccgtacgtcctcggctcggcgcatcaaggatgcctcccgccgttcccagcagacgtcttcatggtgccacagtatggatacctcaccctgaacaacggcagtcaggcggtaggacgctcttccttttactgcctggagtattttccttctcagatgcttcgtaccggaaacaactttaccttcagctacacctttgaagacgttcctttccatagcagctacgctcacagccaaagtctggaccgtctcatgaatcctctcatcgaccagtacctgtattacttgagcagaacaaacactccaagcggaaccaccacgatgtccaggcttcagttttctcaggccggagcaagtgacattcgggaccagtctagaaactggcttcctggaccctgttaccgccagcagcgagtatcaaagacagctgcggacaacaacaacagtgattactcgtggactggagctaccaagtaccacctcaatggaagagactctctggtgaatccgggcccagctatggccagccacaaggacgatgaagaaaaatattttcctcagagcggggttctcatctttggaaaacaagactcgggaaaaactaatgtggacattgaaaaggttatgattacagacgaagaggaaatcaggaccaccaatcccgtggctacggagcagtatggttctgtatctacctacctccagagcggcaacacacaagcagctacctcagatgtcaacacacaaggcgttcttccaggcatggtctggcaggacagagacgtgtacctgcgggggcccatctgggcaaagattccacacacggacggacattttcacccctctcccctcatgggcggatttggacttaaacaccctcctccacaaattctcatcaagaacaccccggtacctgcgaatccttcgaccactttcagtgcggcaaagtttgcttccttcatcacacagtactccacggggcaggtcagcgtggagatcgagtgggagctgcagaaggagaacagcaaacgctggaatcccgaaattcagtacacttccaactacaacaaatctgttaatgtggactttactgtggacactaatggtgtgtattcagagcctcgccccattggcaccagatacctgactcgtaatctgtaa

SEQ ID NO: 217 - protein, 735 aa, Adeno-associated virus
MAADGYLPDWLEDTLSEGIRQWWKLKPGPPPPKPAERHKDDSRGLVLPGYKYLGPFNGLDKGEPVNEADAAALEHDKAYDRQLDSGDNPYLKYNHADAEFQERLKEDTSFGGNLGRAVFQAKKRILEPLGLVEEPVKTAPGKKRPVEHSPAEPDSSSGTGKAGQQPARKRLNFGQTGDADSVPDPQPLGQPPAAPSGLGTNTMASGSGAPMADNNEGADGVGNSSGNWHCDSTWMGDRVITTSTRTWALPTCNNHLYKQISSQSGASNDNHYFGYSTPWGYFDFNRFHCHFSPRDWQRLINNNWGFRPKRLSFKLFNIQVKEVTQNDGTTTIANNLTSTVQVFTDSEYQLPYVLGSAHQGCLPPFPADVFMVPQYGYLTLNNGSQAVGRSSFYCLEYFPSQMLRTGNNFTFSYTFEDVPFHSSYAHSQSLDRLMNPLIDQYLYYLSRTNTPSGTTTMSRLQFSQAGASDIRDQSRNWLPGPCYRQQRVSKTAADNNNSDYSWTGATKYHLNGRDSLVNPGPAMASHKDDEEKYFPQSGVLIFGKQDSGKTNVDIEKVMITDEEEIRTTNPVATEQYGSVSTYLQSGNTQAATSDVNTQGVLPGMVWQDRDVYLRGPIWAKIPHTDGHFHPSPLMGGFGLKHPPPQILIKNTPVPANPSTTFSAAKFASFITQYSTGQVSVEIEWELQKENSKRWNPEIQYTSNYNKSVNVDFTVDTNGVYSEPRPIGTRYLTRNL

SEQ ID NO: 218 - DNA, 2208 bp, Adeno-associated virus; identical to SEQ ID NO: 212

SEQ ID NO: 219 - protein, 735 aa, Adeno-associated virus; identical to SEQ ID NO: 213

SEQ ID NO: 220 - DNA, 2208 bp, Adeno-associated virus
atggctgccgatggttatcttccagattggctcgaggacactctctctgaaggaataagacagtggtggaagctcaaacctggcccaccaccaccaaagcccgcagagcggcataaggacggcagcaggggtcttgtgcttcctgggtacaagtacctcggacccttcaacggactcgacaagggagagccggtcaacgaggcagacgccgcggccctcgagcacgacaaggcctacgaccggcagctcaacagcggagacaacccgtacctcaagtacaaccacgccgacgcggagtttcaggagcgccttaaagaagatacgtcttttgggggcaacctcggacgagcagtcttccaggcaaaaaagagggttcttgaacctctgggcctggttgaggagcctgttaaaacggctccgggaaaaaagagaccggtagagcactctcctgcggagccagactcctcctcgggaaccggaaaagcgggccagcagcctgcaagaaagagattgaattttggtcagactggagacgcagactccgtacctgacccccagcctctcggacagccaccagcagccccctctggtctgggatctactacaatggctacaggcagtggcgcaccaatggcagacaataacgagggtgccgatggagtgggtaattcctcaggaaattggcattgcgattcccaatggctgggcgacagagtcatcaccacaagcactcgaacctgggccctgcccacctacaacaaccacctctacaagcaaatctccagccaatcaggagcctcaaacgacaaccactattttggctacagcaccccttgggggtattttgacttcaacagattccactgccacttttcaccacgtgactggcaaagactcatcaacaacaactggggattccgacccaagagactcaacttcaagctctttaacattcaagtcaaagaggtcacgcagaatgacggtacgacgacgattgccaataaccttaccagcacggttcaggtgtttactgactcggagtaccagctcccgtacgtcctcggctcggcgcatcaaggatgcctcccgccgttcccagcggacgtcttcatggtcccacagtatggatacctcaccctgaacaacgggagtcaggcggtaggacgctctcccttttactgcctggagtactttccttctcagatgctgcgtactggaaacaactttcagttcagctacacttttgaagacgtgcctttccacagcagctacgctcacagccagagtctggatcggctgatgaatcctctgatcgaccagtacctgtattatctgaacaagacacaaacaaatagtggaactcttcagcagtctcggctactgtttagccaagctggacccaccaacatgtctcttcaagctaaaaactggctgcctggaccttgctacagacagcagcgtctgtcaaagcaggcaaacgacaacaacaacagcaactttccctggactgcagctacaaagtatcatctaaatggccgggactcgttggttaatccaggaccagctatggccagtcacaaggatgacgaagaaaagtttttccccatgcatggaaccctgatatttggtaaacaaggaacaaatgccaacgacgcggatttggaaaatgtcatgattacagatgaagaagaaatcaggaccaccaatcccgtggctacggagcagtacgggactgtgtcaaataatttgcaaaactcaaacactggtccaactactggaactgtcaatcaccaaggagcgttacctggtatggtgtggcaggatcgagatgtgtaccttcagggacccatttgggccaagattcctcacaccgatggacactttcatccttctccactgatgggaggttttggactcaaacacccgcctcctcagattatgatcaaaaacactcccgttccagccaatcctcctacaaacttcagttctgccaagtttgcttctttcatcacacagtattccacggggcaggtcagcgtggagatcgagtgggagctgcagaaggagaacagcaaacgctggaatcccgaaattcagtacacttccaactacaacaaatctgttaatgtggactttactgtggacaataatggcgtgtactcagagcctcgccccattggcaccagatacctgactcgtaatctgtaa

SEQ ID NO: 221 - protein, 735 aa, Adeno-associated virus
MAADGYLPDWLEDTLSEGIRQWWKLKPGPPPPKPAERHKDGSRGLVLPGYKYLGPFNGLDKGEPVNEADAAALEHDKAYDRQLNSGDNPYLKYNHADAEFQERLKEDTSFGGNLGRAVFQAKKRVLEPLGLVEEPVKTAPGKKRPVEHSPAEPDSSSGTGKAGQQPARKRLNFGQTGDADSVPDPQPLGQPPAAPSGLGSTTMATGSGAPMADNNEGADGVGNSSGNWHCDSQWLGDRVITTSTRTWALPTYNNHLYKQISSQSGASNDNHYFGYSTPWGYFDFNRFHCHFSPRDWQRLINNNWGFRPKRLNFKLFNIQVKEVTQNDGTTTIANNLTSTVQVFTDSEYQLPYVLGSAHQGCLPPFPADVFMVPQYGYLTLNNGSQAVGRSPFYCLEYFPSQMLRTGNNFQFSYTFEDVPFHSSYAHSQSLDRLMNPLIDQYLYYLNKTQTNSGTLQQSRLLFSQAGPTNMSLQAKNWLPGPCYRQQRLSKQANDNNNSNFPWTAATKYHLNGRDSLVNPGPAMASHKDDEEKFFPMHGTLIFGKQGTNANDADLENVMITDEEEIRTTNPVATEQYGTVSNNLQNSNTGPTTGTVNHQGALPGMVWQDRDVYLQGPIWAKIPHTDGHFHPSPLMGGFGLKHPPPQIMIKNTPVPANPPTNFSSAKFASFITQYSTGQVSVEIEWELQKENSKRWNPEIQYTSNYNKSVNVDFTVDNNGVYSEPRPIGTRYLTRNL

SEQ ID NO: 222 - DNA, 2208 bp, Adeno-associated virus
atggctgccgatggttatcttccagattggctcgaggacactctctctgaaggaataagacagtggtggaagctcaaacctggcccaccaccaccaaagcccgcagagcggcataaggacgacagcaggggtcttgtgcttcctgggtacaagtacctcggacccttcaacggactcgacaagggagagccggtcaacgaggcagacgccgcggccctcgagcacgacaaggcctacgaccggcagctcgacagcggagacaacccgtacctcaagtacaaccacgccgacgcggagtttcaggagcgtcttaaagaagatacgtcttttgggggcaacctcggacgagcagtcttccaggccaaaaagaggattcttgaacctctgggcctggttgaggaacctgttaagacggctccgggaaaaaagaggccggtagagcactctcctgcggagccagactcctcctcgggaaccggaaaagcgggccagcagcctgcaagaaagagattgaattttggtcagactggagacgcagactcagtacctgacccccagcctctcggacagccaccagcagccccctctggtctgggaactaatacgatggcttcaggcagtggcgcaccaatggcagacaataacgagggcgccgacggagtgggtaattcctcgggaaattggcattgcgattccacatggatgggcgacagagtcatcaccaccagcacccgcacctgggccctgcccacctacaacaaccatctgtacaagcaaatctccagccagtctggagccagcaacgacaaccactactttggctacagcaccccctgggggtattttgacttcaacagattccactgccacttctccccacgtgactggcaaagactcatcaacaacaactggggattccggcccaagagactcagcttcaagctctttaacattcaagtcaaagaggtcacgcagaatgacggtacgacgacgattgccaataaccttaccagcacggttcaggtgtttactgactcggagtaccagctcccgtacgtcctcggctcggcgcatcaaggatgcctcccgccgttcccagcagacgtcttcatggtgccacagtatggatacctcaccctgaacaacggcagtcaggcggtaggacgctcttccttttactgcctggagtactttccttctcagatgcttcgtaccggaaacaactttaccttcagctacacctttgaagacgttcctttccatagcagctacgctcacagccaaagtctggaccgtctcatgaatcctctcatcgaccagtacctgtattacttgagcagaacaaacactccaagcggaaccaccacgatgtccaggcttcagttttctcaggccggagcaagtgacattcgggaccagtctagaaactggcttcctggaccctgttaccgccagcagcgagtatcaaagacagctgcggacaacaacaacagtgattactcgtggactggagctaccaagtaccacctcaatggaagagactctctggtgaatccgggcccagctatggccagccacaaggacgatgaagaaaaatattttcctcagagcggggttctcatctttggaaaacaagactcgggaaaaactaatgtggacattgaaaaggttatgattacagacgaagaggaaatcaggaccaccaatcccgtggctacggagcagtatggttctgtatctaccaacctccagagcggcaacacacaagcagctacctcagatgtcaacacacaaggcgttcttccaggcatggtctggcaggacagagacgtgtacctgcaggggcccatctgggcaaagattccacacacggacggacattttcacccctctcccctcatgggcggattcggacttaaacaccctcctccacaaattctcatcaagaacaccccggtacctgcgaatccttcgaccactttcagtgcggcaaagtttgcttccttcatcacacagtactccacggggcaggtcagcgtggagatcgagtgggagctgcagaaggagaacagcaaacgctggaatcccgaaattcagtacacttccaactacaacaaatctgttaatgtggactttactgtggacactaatggtgtgtattcagagcctcgccccattggcaccagatacctgactcgtaatctgtaa

SEQ ID NO: 223 - protein, 735 aa, Adeno-associated virus
MAADGYLPDWLEDTLSEGIRQWWKLKPGPPPPKPAERHKDDSRGLVLPGYKYLGPFNGLDKGEPVNEADAAALEHDKAYDRQLDSGDNPYLKYNHADAEFQERLKEDTSFGGNLGRAVFQAKKRILEPLGLVEEPVKTAPGKKRPVEHSPAEPDSSSGTGKAGQQPARKRLNFGQTGDADSVPDPQPLGQPPAAPSGLGTNTMASGSGAPMADNNEGADGVGNSSGNWHCDSTWMGDRVITTSTRTWALPTYNNHLYKQISSQSGASNDNHYFGYSTPWGYFDFNRFHCHFSPRDWQRLINNNWGFRPKRLSFKLFNIQVKEVTQNDGTTTIANNLTSTVQVFTDSEYQLPYVLGSAHQGCLPPFPADVFMVPQYGYLTLNNGSQAVGRSSFYCLEYFPSQMLRTGNNFTFSYTFEDVPFHSSYAHSQSLDRLMNPLIDQYLYYLSRTNTPSGTTTMSRLQFSQAGASDIRDQSRNWLPGPCYRQQRVSKTAADNNNSDYSWTGATKYHLNGRDSLVNPGPAMASHKDDEEKYFPQSGVLIFGKQDSGKTNVDIEKVMITDEEEIRTTNPVATEQYGSVSTNLQSGNTQAATSDVNTQGVLPGMVWQDRDVYLQGPIWAKIPHTDGHFHPSPLMGGFGLKHPPPQILIKNTPVPANPSTTFSAAKFASFITQYSTGQVSVEIEWELQKENSKRWNPEIQYTSNYNKSVNVDFTVDTNGVYSEPRPIGTRYLTRNL

SEQ ID NO: 224 - DNA, 2208 bp, Adeno-associated virus
atggctgccgatggttatcttccagattggctcgaggacactctctctgaaggaataagacagtggtggaagctcaaacctggcccaccaccaccaaagcccgcagagcggcataaggacgacagcaggggtcttgtgcttcctgggtacaagtacctcggacccttcaacggactcgacaagggagagccggtcaacgaggcagacgccgcggccctcgagcacgacaaggcctacgaccggcagctcgacagcggagacaacccgtacctcaagtacaaccacgccgacgcggagtttcaggagcgtcttaaagaagatacgtcttttgggggcaacctcggacgagcagtcttccaggccaaaaagaggattcttgaacctctgggcctggttgaggaacctgttaagacggctccgggaaaaaagaggccggtagagcactctcctgcggagccagactcctcctcgggaaccggaaaagcgggccagcagcctgcaagaaagagattgaattttggtcagactggagacgcagactcagtacctgacccccagcctctcggacagccaccagcagccccctctggtctgggaactaatacgatggcttcaggcagtggcgcaccaatggcagacaataacgagggcgccgacggagtgggtaattcctcgggaaattggcattgcgattccacatggatgggcgacagagtcatcaccaccagcacccgcacctgggccctgcccacctacaacaaccatctgtacaagcaaatctccagccagtctggagccagcaacgacaaccactactttggctacagcaccccctgggggtatttcgacttcaacagattccactgccacttctccccacgtgactggcaaagactcatcaacaacaactggggattccggcccaagagactcagcttcaagctctttaacattcaagtcaaagaggtcacgcagaatgacggtacgacgacgattgccaataaccttaccagcacggttcaggtgtttactgactcggggtaccagctcccgtacgtcctcggctcggcgcatcaaggatgccttccgccgttcccagcagacgtcttcatggtgccacagtatggatacctcaccctgaacaacggcagtcaggcggtaggacgctcttccttttactgcctggagtactttccttctcagatgcttcgtaccggaaacaactttaccttcagctacacctttgaagacgttcctttccatagcagctacgctcacggccaaagtctggaccgtctcatgaatcctctcatcgaccagtacctgtattacttgagcagaacaaacactccaagcggaaccaccacgatgtccaggcttcagttttctcaggccggagcaagtgacgttcgggaccagtctagaaactggcttcctggaccctgttaccgccagcagcgagtatcaaagacagctgcggacaacaacaacagtgattactcgtggactggagctaccaagtaccacctcaatggaagagactctctggtgaatccgggcccagctatggccagccacaaggacgatgaagaaaaatattttcctcagagcggggttctcgtctttggaaaacaagactcgggaaaaactaatgtggacattgaaaaggttatgattacagacgaagaggaaatcaggaccaccaatcccgcggctacggagcagtatggttctgtatctaccaacctccagagcggcaacacacaagcagctacctcagatgtcaacacacaaggcgttcttccaggcatggtctggcaggacagagacgtgtacctgcaggggcccatctgggcaaagattccacacacggacggacattttcacccctctcccctcatgggcggattcggacttaaacaccctcctccacaaattctcatcaagaacaccccggtacctgcgaatccttcgaccactttcagtgcggcaaagtttgtttccttcatcacacagtactccacggggcaggtcagcgtggagatcgagtgggagctgcagaaggagaacagcaaacgctggaatcccgaaattcagtacacttccaactacaacaaatctgttaatgtggactttactgtggacactaatggtgtgtattcagagcctcgccccattggcaccagatacctgactcgtaatctgtaa

SEQ ID NO: 225 - protein, 735 aa, Adeno-associated virus
MAADGYLPDWLEDTLSEGIRQWWKLKPGPPPPKPAERHKDDSRGLVLPGYKYLGPFNGLDKGEPVNEADAAALEHDKAYDRQLDSGDNPYLKYNHADAEFQERLKEDTSFGGNLGRAVFQAKKRILEPLGLVEEPVKTAPGKKRPVEHSPAEPDSSSGTGKAGQQPARKRLNFGQTGDADSVPDPQPLGQPPAAPSGLGTNTMASGSGAPMADNNEGADGVGNSSGNWHCDSTWMGDRVITTSTRTWALPTYNNHLYKQISSQSGASNDNHYFGYSTPWGYFDFNRFHCHFSPRDWQRLINNNWGFRPKRLSFKLFNIQVKEVTQNDGTTTIANNLTSTVQVFTDSGYQLPYVLGSAHQGCLPPFPADVFMVPQYGYLTLNNGSQAVGRSSFYCLEYFPSQMLRTGNNFTFSYTFEDVPFHSSYAHGQSLDRLMNPLIDQYLYYLSRTNTPSGTTTMSRLQFSQAGASDVRDQSRNWLPGPCYRQQRVSKTAADNNNSDYSWTGATKYHLNGRDSLVNPGPAMASHKDDEEKYFPQSGVLVFGKQDSGKTNVDIEKVMITDEEEIRTTNPAATEQYGSVSTNLQSGNTQAATSDVNTQGVLPGMVWQDRDVYLQGPIWAKIPHTDGHFHPSPLMGGFGLKHPPPQILIKNTPVPANPSTTFSAAKFVSFITQYSTGQVSVEIEWELQKENSKRWNPEIQYTSNYNKSVNVDFTVDTNGVYSEPRPIGTRYLTRNL

SEQ ID NO: 226 - DNA, 2208 bp, Adeno-associated virus
atggctgccgatggttatcttccagattggctcgaggacactctctctgaaggaataagacagtggtggaaactcaaacctggcccaccaccaccaaagcccgcagagcggcataaggacgacagcaggggtcttgtgcttcctgggtacaagtacctcggacccttcaacggactcgacaagggagagccggtcaacgaggcagacgccgcggccctcgagcacgacaaggcctacgaccggcagctcgacagcggagacaacccgtacctcaagtacaaccacgccgacgcggagtttcaggagcgccttaaagaagatacgtcttttgggggcaacctcggacgagcagtcttccaggcaaaaaagagggttctggaacctctgagcctggttgaggagcctgttaagacggctccgggaaaaaagaggccggtagagcactctcccgcagagccagattcctcctccggaactggaaagtcgggcaaccagcctgcaagaaagagattgaatttcggtcagactggagactcagactccgtacctgacccccagcctctcggacagccaccagcagccccctctggtctgggaactaatacgatggctacaggcagtggcgcaccaatggcagacaataacgagggcgccgacggagtgggtaattcctcgggaaattggcattgcgattccacatggatgggcgacagagtcatcaccaccagcacccgaacctgggccctgcccacctacaacaaccatctgtacaagcaaatatccagccagtctggagccagcaacgacaatcactactttggctacagcaccccctgggggtattttgacttcaacagattccactgccacttttcaccacgtgactggcaaagactcatcaacaacaactggggattccgacccaagagactcaacttcaagctctttaacattcaagtcaaagaggtcacgcagaatgacggtacgacgacgattgccaataaccttaccagcacggttcaggtgtttactgactcggagtaccagctcccgtacgtcctcggctcggcgcatcaaggatgcctcccgccgttcccagcagacgtcttcatggtgccacagtatggatacctcaccctgaacaacgggagtcaggcagtaggacgctcttcattttactgcctagagtactttccttctcagatgctgcgtaccggaaacaactttaccttcagctacacctttgaggacgttcctttccacagcagctacgctcacagccagagtttggaccgtctcatgaatcctctcatcgaccagtacctgtattacttgagcagaacaaacactccaagcggaaccaccacgcagtccaggcttcagttttctcaggccggagcgagtgacattcaggaccagtctaggaactggcttcctggaccctgttaccgtcagcagcgagtatcaaagacatctgcggataacaacaacagtgaatactcgtggactggagctaccaagtaccacctcaatggcagagactctctggtgaatccgggcccggccatggccagccacaaagacgatgaagaaaagttttttcctcagagcggggttcttatctttgggaagcaaggctcagagaaaacaaatgtggatattgaaaaggtcatgattacagacgaagaggaaatcaggaccaccaatcccgtggctacggagcagtatggttctgtatctaccaacctccagagcggcaacacacaagcagctaccgcagatgtcaacacacaaggcgttcttccaggcatggtcgggcaagacagagacgtgtacctgcaggggcctacttgggcaaagattccacacacggacggacattttcacccctctcccctcatgggcggatttggacttaaacaccctcctccacagattctcatcaagaacaccccggtacctgcgaatccttcgaccaccttcagtgcggcaaagtttgcttccttcattacacagtactccacggggcaggtcagcgtggagatcgagtgggagctgcagaaggagaacagcaaacgctggaatcccgagatccagtacacttccaactacaacaagtctgttaatgtggactttactgtggacactaatggcgtgtattcagagcctcgccccattggcaccagatacctgactcgtaatctgtaa

SEQ ID NO: 227 - protein, 735 aa, Adeno-associated virus
MAADGYLPDWLEDTLSEGIRQWWKLKPGPPPPKPAERHKDDSRGLVLPGYKYLGPFNGLDKGEPVNEADAAALEHDKAYDRQLDSGDNPYLKYNHADAEFQERLKEDTSFGGNLGRAVFQAKKRVLEPLSLVEEPVKTAPGKKRPVEHSPAEPDSSSGTGKSGNQPARKRLNFGQTGDSDSVPDPQPLGQPPAAPSGLGTNTMATGSGAPMADNNEGADGVGNSSGNWHCDSTWMGDRVITTSTRTWALPTYNNHLYKQISSQSGASNDNHYFGYSTPWGYFDFNRFHCHFSPRDWQRLINNNWGFRPKRLNFKLFNIQVKEVTQNDGTTTIANNLTSTVQVFTDSEYQLPYVLGSAHQGCLPPFPADVFMVPQYGYLTLNNGSQAVGRSSFYCLEYFPSQMLRTGNNFTFSYTFEDVPFHSSYAHSQSLDRLMNPLIDQYLYYLSRTNTPSGTTTQSRLQFSQAGASDIQDQSRNWLPGPCYRQQRVSKTSADNNNSEYSWTGATKYHLNGRDSLVNPGPAMASHKDDEEKFFPQSGVLIFGKQGSEKTNVDIEKVMITDEEEIRTTNPVATEQYGSVSTNLQSGNTQAATADVNTQGVLPGMVGQDRDVYLQGPTWAKIPHTDGHFHPSPLMGGFGLKHPPPQILIKNTPVPANPSTTFSAAKFASFITQYSTGQVSVEIEWELQKENSKRWNPEIQYTSNYNKSVNVDFTVDTNGVYSEPRPIGTRYLTRNL

SEQ ID NO: 228 - DNA, 2208 bp, Adeno-associated virus
atggctgccgatggttatcttccagattggctcgaggacactctctctgaaggaataagacagtggtggaagctcaaacctggcccaccaccaccaaagcccgcagagcggcataaggacgacagcaggggtcttgtgcttcctgggtacaagtacctcggacccttcaacggactcgacaagggagagccggtcaacgaggcagacgccgcggccctcgagcacgacaaggcctacgaccggcagctcgacagcggagacaacccgtacctcaagtacaaccacgccgacgcagagtttcaggagcgccttaaagaagatacgtcttttgggggcaacctcggacgagcagtcttccaggcaaaaaagagggttctggaacctctgggcctggttgaggagcctgttaagacggctccgggaaaaaagaggccggtagagcactctcctgcagagccagattcctcctccggaactggaaagtcgggcaaccagcctgcaagaaagagattgaatttcggtcagactggagactcagactccgtacctgacccccagcctctcggacagccaccagcagccccctctggtctgggaactaatacgatggctacaggcagtggcgcaccaatggcagacaataacgagggcgccgacggagtgggtaattcctcgggaaattggcattgcgattccacatggatgggcgacagagtcatcaccaccagcacccgaacctgggccctgcccacctacaacaaccatctgtacaagcaaatatccagccagtctggagccagcaacgacaatcactactttggctacagcaccccctgggggtattttgacttcaacagattccactgccacttttcaccacgtgactggcaaagactcatcaacaacaactggggattccgacccaagagactcaacttcaagctctttaacattcaagtcaaagaggtcacgcagaatgacggtacgacgacgattgccaataaccttaccagcacggttcaggtgtttactgactcggagtaccagctcccgtacgtcctcggctcggcgcatcaaggatgcctcccgccgttcccagcagacgtcttcatggtgccacagtatggatacctcaccctgaacaacgggagtcaggcagtaggacgctcttcattttactgcctagggtactttccttctcagatgctgcgtaccggaaacaactttaccttcagctacacctttgaggacgttcctttccacagcagctacgctcacagccagagtttggaccgtctcatgaatcctctcatcgaccagtacctgtattacttgagcagaacaaacactccaagcggaaccaccacgcagtccaggcttcagttttctcaggccggagcgagtgacattcgggaccagtctaggaactggcttcctggaccctgttaccgtcagcagcgagtatcaaagacatctgcggataacaacaacagtgaatactcgtggactggagctaccaagtaccacctcaatggcagagactctctggtgaatccgggcccggccatggccagccacaaagacgatgaagaaaagttttttcctcagagcggggttcttatctttgggaagcaaggcccagagaaaacaaatgtggatattgaaaaggtcatgattacagacgaagaggaaatcaggaccaccaatcccgtggctacggagcagtatggttctgtatctaccaacctccagagcggcaacacacaagcagctaccgcagatgtcaacacacaaggcgttcttccaggcatggtctggcaagacagagacgtgtacctgcaggggcctatttgggcaaagattccacacacggacggacattttcacccctctcccctcatgggcggatttggacttaaacaccctcctccacagattctcatcaagaacaccccggtacctgcgaatccttcgaccaccttcagtgcggcaaagtttgcttccttcattacacagtactccacggggcaggtcagcgtggagatcgagtgggagctgcagaaggagaacagcaaacgctggaatcccgagatccagtacacttccaactacaacaagtctgttaatgtggactttactgtggacactaatggcgtgtattcagagcctcgccccattggcaccagatacctgactcgtaatctgtaa

SEQ ID NO: 229 - protein, 735 aa, Adeno-associated virus
MAADGYLPDWLEDTLSEGIRQWWKLKPGPPPPKPAERHKDDSRGLVLPGYKYLGPFNGLDKGEPVNEADAAALEHDKAYDRQLDSGDNPYLKYNHADAEFQERLKEDTSFGGNLGRAVFQAKKRVLEPLGLVEEPVKTAPGKKRPVEHSPAEPDSSSGTGKSGNQPARKRLNFGQTGDSDSVPDPQPLGQPPAAPSGLGTNTMATGSGAPMADNNEGADGVGNSSGNWHCDSTWMGDRVITTSTRTWALPTYNNHLYKQISSQSGASNDNHYFGYSTPWGYFDFNRFHCHFSPRDWQRLINNNWGFRPKRLNFKLFNIQVKEVTQNDGTTTIANNLTSTVQVFTDSEYQLPYVLGSAHQGCLPPFPADVFMVPQYGYLTLNNGSQAVGRSSFYCLGYFPSQMLRTGNNFTFSYTFEDVPFHSSYAHSQSLDRLMNPLIDQYLYYLSRTNTPSGTTTQSRLQFSQAGASDIRDQSRNWLPGPCYRQQRVSKTSADNNNSEYSWTGATKYHLNGRDSLVNPGPAMASHKDDEEKFFPQSGVLIFGKQGPEKTNVDIEKVMITDEEEIRTTNPVATEQYGSVSTNLQSGNTQAATADVNTQGVLPGMVWQDRDVYLQGPIWAKIPHTDGHFHPSPLMGGFGLKHPPPQILIKNTPVPANPSTTFSAAKFASFITQYSTGQVSVEIEWELQKENSKRWNPEIQYTSNYNKSVNVDFTVDTNGVYSEPRPIGTRYLTRNL

SEQ ID NO: 230 - protein, 735 aa, Adeno-associated virus
MAADGYLPDWLEDTLSEGIRQWWKLKPGPPPPKPAERHKDDSRGLVLPGYKYLGPFNGLDKGEPVNEADAAALEHDKAYDRQLDSGDNPYLKYNHADAEFQERLKEDTSFGGNLGRAVFQAKKRVLEPLGLVEEPVKTAPGKKRPVEHSPAEPDSSSGTGKSGNQPARKRLNFGQTGDSDSVPDPQPLGQPPAAPSGLGTNTMATGSGAPMADNNEGADGVGNSSGNWHCDSTWMGDRVITTSTRTWALPTYNNHLYKQISSQSGASNDNHYFGYSTPWGYFDFNRFHCHFSPRDWQRLINNNWGFRPKRLNFKLFNIQVKEVTQNDGTTTIANNLTSTVQVFTDSEYQLPYVLGSAHQGCLPPFPADVFMVPQYGYLTLNNGSQAVGRSSFYCLEYFPSQMLRTGNNFTFSYTFEDVPFHSSYAHSQSLDRLMNPLIDQYLYYLSRTNTPSGTTTQSRLQFSQAGASDIRDQSRNWLPGPCYRQQRVSKTSADNNNSEYSWTGATKYHLNGRDSLVNPGPAMASHKDDEEKFFPQSGVLIFGKQGPEKTNVDIEKVMITDEEEIRTTNPVATEQYGSVSTNLQSGNTQAATADVNTQGVLPGMVWQDRDVYLQGPIWAKIPHTDGHFHPSPLMGGFGLKHPPPQILIKNTPVPANPSTTFSAAKFASFITQYSTGQVSVEIEWELQKENSKRWNPEIQYTSNYNKSVNVDFTVDTNGVYSEPRPIGTRYLTRNL

SEQ ID NO: 231 - protein, 735 aa, Adeno-associated virus; identical to SEQ ID NO: 230

SEQ ID NO: 232 - DNA, 2211 bp, Adeno-associated virus
atggctgccgatggttatcttccagattggctcgaggacactctctctgaaggaataagacagtggtggaagctcaaacctggcccaccaccaccaaagcccgcagagcggcataaggacgacagcaggggtcttgtgcttcctgggtacaagtacctcggacccttcaacggactcgacaagggggagccggtcaacgaggcagacgccgcggccctcgagcacgacaaggcctacgaccggcagctcgacagcggagacaacccgtacctcaagtacaaccacgccgacgcagagtttcaggagcgccttaaagaagatacgtcttttgggggcaacctcggacgagcagtcttccaggcgaaaaagagggttcttgaacctctgcggcctggtttgaggaaacctgttaagacggctccgggaaaaaagaggccggtagagcactctcctgtggagccagactcctcctcgggaaccggaaaagcgggccagcagcctgcaagaaaaagattaaattttggtcagactggagacgcagactccgtacctgacccccagcctctcggacagccaccagcagccccctctggtctgggatctactacaatggctacaggcagtggcgcaccaatggcagacaataacgagggtgccgatggagtgggtaattcctcaggaaattggcattgcgattcccaatggctggacgacagagtcatcgccaccagcacccgaacctgggccctgcccacatacaacaaccacctctacaagcaaatctccagccaatcaggagcctgcaacgacaaccactactttggctacagcaccccctgggggtattttgacttcaacagattccactgccacttttcaccacgtgactggcaaagactcatcaacagcaactggggattccggcccaaaagactcaacttcaagctctttaatattcaagtcaaagaggtcacgcagaatgacggtacgacgacgattgccaataaccttaccagcacggttcaggtgtttactgactcggagtaccagctcccgtacgtcccgggctcggcgcatcaaggatgcctcccgccgtttccagcggacgtcttcatggtcccacagtatggatacctcaccctgaacaacgggagtcaggcggtaggacgctcttccttttactgcctggagtactttccttctcagatgctgcgtactggaaacaactttcagttcagctacacttttgaagacgtgcctttccacagcagctacgctcactgccagagtctggatcggctgatgaatcctctgatcgaccagtacctgtattatctgaacaagacacaaacaaatagtggaactcttcagcagtctcggctactgtttagccaagctggaccaaccaacatgtctcttcaagctaaaaactggctgcctggaccttgctacagacagcagcgtctgtcaaaacaggcaaacgacaataacaactgcaactttccctggactgcagctacaaagtatcatctaaatggccgggactcgttggttaatccaggaccagctatggccagtcacaaggatgacgaagaaaagtttttccccatgcatggaaccctgatatttggtaaacaaggaacaaatgccaacgacgcggatttggaaaatgtcatgattacagatgaagaagaaatcaggcccaccaatcccgtggctacggagcagtacgggactgtgtcaaataatttgcaaaactcaaacactggtccaactacaggaactgtcaatcaccaaggagcgttacctggtatggtgtggcaggatcgagacgtgtacctgcagggacccatttgggccaagattcctcacaccgatggacactttcatccttctccactgatgggaggttttggactcaaacacccgcctcctcagatcatgatcaaaagcactcccgttccagccaatcctcccacaaacttcagttctgccaagtttgcttcttccatcacacagtattccacgggacaggtcagcgtggagatcgagtgggagctgcagaaggagaacagcaaacgctggaatcccgaaattcagtacacttccaactacaacaagtctgttaatgtggactttactgtggacactaatggtgtgtattcagagcctcgccccattggcaccagatacctgactcgtaatctgtaa

SEQ ID NO: 233 - protein, 736 aa, Adeno-associated virus
MAADGYLPDWLEDTLSEGIRQWWKLKPGPPPPKPAERHKDDSRGLVLPGYKYLGPFNGLDKGEPVNEADAAALEHDKAYDRQLDSGDNPYLKYNHADAEFQERLKEDTSFGGNLGRAVFQAKKRVLEPLRPGLRKPVKTAPGKKRPVEHSPVEPDSSSGTGKAGQQPARKRLNFGQTGDADSVPDPQPLGQPPAAPSGLGSTTMATGSGAPMADNNEGADGVGNSSGNWHCDSQWLDDRVIATSTRTWALPTYNNHLYKQISSQSGACNDNHYFGYSTPWGYFDFNRFHCHFSPRDWQRLINSNWGFRPKRLNFKLFNIQVKEVTQNDGTTTIANNLTSTVQVFTDSEYQLPYVPGSAHQGCLPPFPADVFMVPQYGYLTLNNGSQAVGRSSFYCLEYFPSQMLRTGNNFQFSYTFEDVPFHSSYAHCQSLDRLMNPLIDQYLYYLNKTQTNSGTLQQSRLLFSQAGPTNMSLQAKNWLPGPCYRQQRLSKQANDNNNCNFPWTAATKYHLNGRDSLVNPGPAMASHKDDEEKFFPMHGTLIFGKQGTNANDADLENVMITDEEEIRPTNPVATEQYGTVSNNLQNSNTGPTTGTVNHQGALPGMVWQDRDVYLQGPIWAKIPHTDGHFHPSPLMGGFGLKHPPPQIMIKSTPVPANPPTNFSSAKFASSITQYSTGQVSVEIEWELQKENSKRWNPEIQYTSNYNKSVNVDFTVDTNGVYSEPRPIGTRYLTRNL

SEQ ID NO: 234 - DNA, 2208 bp, Adeno-associated virus
atggctgccgatggttatcttccagattggctcgaggacactctctctgaaggaataagacagtggtggaagctcaaacctggcccaccaccaccaaagcccgcagagcggcataaggacgacagcaggggtcttgtgcttcctgggtacaagtacctcggacccttcaacggactcgacaagggagagccggtcaacgaggcagacgccgcggccctcgagcacgacaaggcctacgaccggcagctcgacagcggagacaacccgtacctcaagtacaaccacgccgacgcggagtttcaggagcgccttaaagaggatacgtcttttgggggcaacctcggacgagcagtcttccaggcaaaaaagagggttctggaacctctgggcctggttgaggagcctgttaagacggctccgggaaaaaagaggccggtagagcactctcctgcagagccagattcctcctccggaactggaaagtcgggcaaccagcctgcaagaaagagattgaatttcggtcagactggagactcagactccgtacctgacccccagcctctcggacagccaccagcagccccctctggtctgggaactaatacgatggctacaggcagtggcgcaccaatggcagacaataacgagggcgccgacggagtgggtaattcctcgggaaattggcattgcgattccacatggatgggcgacagagtcatcaccaccagcacccgaacctgggccctgcccacctacaacaaccatctgtacaagcaaatatccagccagtctggagccagcaacgacaatcactactttggctacagcaccccctgggggtattttgacttcaacagattccactgccacttttcaccacgtgactggcaaagactcatcaacaacaactggggattccgacccaagagactcaacttcaagctctttaacattcaagtcaaagaggtcacgcagaatgacggtacgacgacgattgccaataaccttaccagcacggttcaggtgtttactgactcggagtaccagctcccgtacgtcctcggctcggcgcatcaaggatgcctcccgccgttcccagcagacgtcttcatggtgccacagtatggatacctcaccctgaacaacgggagtcaggcagtaggacgctcttcattttactgcctagagtactttccttctcagatgctgcgtaccggaaacagctttaccttcagctacacctttgaggacgttcctttccacagcagctacgctcacagccagagtttggaccgtctcatgaatcctctcatcgaccagtacctgtattacttgagcagaacaaacactccaagcggaaccaccacgcagtccaggcttcagttttctcaggccggagcgagtgacattcgggaccagtctaggaactggcttcctggaccctgttaccgtcagcagcgagtatcaaagacatctgcggataacaacaacagtgaatactcgtggactggagctaccaagtaccacctcaatggcagagactctctggtgaatccgggcccggccatggccagccacaaagacgatgaagaaaagttctttcctcagagcggggttcttatctttgggaagcaaggctcagagaaaacaaatgtggatattgaaaaggtcatgattacagacgaagaggaaatcaggaccaccaatcccgtggctacggagcagtatggttctgtatctaccaacctccagagcggcaacacacaagcagctaccgcagatgtcaacacacaaggcgttcttccaggcatggtctggcaagacagagacgtgtacctgcaggggcctatttgggcaaagattccacacacggacggacattttcacccctctcccctcatgggcggatttggacttaaacaccctcctccacagattctcatcaagaacaccccggtacctgcgaatccttcgaccaccttcagtgcggcaaagtttgcttccttcattacacagtactccacggggcaggtcagcgtggagatcgagtgggagctgcagaaggagaacagcaaacgctggaatcccgagatccagtacacttccaactacaacaagtctgttaatgtggactttactgtggacactaatggcgtgtattcagagcctcgccccattggcaccagatacctgactcgtaatctgtaa

SEQ ID NO: 235 - protein, 735 aa, Adeno-associated virus
MAADGYLPDWLEDTLSEGIRQWWKLKPGPPPPKPAERHKDDSRGLVLPGYKYLGPFNGLDKGEPVNEADAAALEHDKAYDRQLDSGDNPYLKYNHADAEFQERLKEDTSFGGNLGRAVFQAKKRVLEPLGLVEEPVKTAPGKKRPVEHSPAEPDSSSGTGKSGNQPARKRLNFGQTGDSDSVPDPQPLGQPPAAPSGLGTNTMATGSGAPMADNNEGADGVGNSSGNWHCDSTWMGDRVITTSTRTWALPTYNNHLYKQISSQSGASNDNHYFGYSTPWGYFDFNRFHCHFSPRDWQRLINNNWGFRPKRLNFKLFNIQVKEVTQNDGTTTIANNLTSTVQVFTDSEYQLPYVLGSAHQGCLPPFPADVFMVPQYGYLTLNNGSQAVGRSSFYCLEYFPSQMLRTGNSFTFSYTFEDVPFHSSYAHSQSLDRLMNPLIDQYLYYLSRTNTPSGTTTQSRLQFSQAGASDIRDQSRNWLPGPCYRQQRVSKTSADNNNSEYSWTGATKYHLNGRDSLVNPGPAMASHKDDEEKFFPQSGVLIFGKQGSEKTNVDIEKVMITDEEEIRTTNPVATEQYGSVSTNLQSGNTQAATADVNTQGVLPGMVWQDRDVYLQGPIWAKIPHTDGHFHPSPLMGGFGLKHPPPQILIKNTPVPANPSTTFSAAKFASFITQYSTGQVSVEIEWELQKENSKRWNPEIQYTSNYNKSVNVDFTVDTNGVYSEPRPIGTRYLTRNL

SEQ ID NO: 236 - DNA, 2211 bp, Adeno-associated virus; identical to SEQ ID NO: 126

SEQ ID NO: 237 - protein, 736 aa, Adeno-associated virus
MAADGYLPDWLEDTLSEGIRQWWKLKPGPPPPKPAERHKDDSRGLVLPGYKYLGPGNGLDKGEPVNAADAAALEHDKAYDQQLKAGDNPYLKYNHADAEFQERLKEDTSFGGNLGRAVFQAKKRLLEPLGLVEEAAKTAPGKKRPVEQSPQEPDSSAGIGKSGSQPAKKKLNFGQTGDTESVPDPQPIGEPPAAPSGVGSLTMASGGGAPVADNNEGADGVGSSSGNWHCDSQWLGDRVITTSTRTWALPTYNNHLYKQISNSTSGGSSNDNAYFGYSTPWGYFDFNRFHCHFSPRDWQRLINNNWGFRPKRLNFKLFNIQVKEVTDNNGVKTIANNLTSTVQVFTDSDYQLPYVLGSAHEGCLPPFPADVFMIPQYGYLTLNDGGQAVGRSSFYCLEYFPSQMLRTGNNFQFSYEFENVPFHSSYAHSQSLDRLMNPLIDQYLYYLSKTINGSGQNQQTLKFSVAGPSNMAVQGRNYIPGPSYRQQRVSTTVTQNNNSEFAWPGASSWALNGRNSLMNPGPAMASHKEGEDRFFPLSGSLIFGKQGTGRDNVDADKVMITNEEEIKTTNPVATESYGQVATNHQSAQAQAQTGWVQNQGILPGMVWQDRDVYLQGPIWAKIPHTDGNFHPSPLMGGFGMKHPPPQILIKNTPVPADPPTAFNKDKLNSFITQYSTGQVSVEIEWELQKENSKRWNPEIQYTSNYYKSNNVEFAVSTEGVYSEPRPIGTRYLTRNL

SEQ ID NO: 238 - DNA, 2211 bp, Adeno-associated virus
atggctgccgatggttatcttccagattggctcgaggacactctctctgaaggaataagacagtggtggaagctcaaacctggcccaccaccaccaaagcccgcagagcggcataaggacgacagcaggggtcttgtgcttcctgggtacaagtacctcggacccggcaacggactcgacaagggggagccggtcaacgcagcagacgcggcggccctcgagcacgacaaggcctacgaccagcagctcaaggccggagacaacccgtacctcaagtacaaccacgccgacgccgagttccaggagcggctcaaagaagatacgtcttttgggggcaacctcgggcgagcagtcttccaggccaaaaagaggcttcttgaacctcttggtctggttgaggaagcggctaagacggctcctggaaagaagaggcctgtagagcagtctcctcaggaaccggactcctccgcgggtattggcaaatcgggttcacagcccgctaaaaagaaactcaatttcggtcagactggcgacacagagtcagtccccgaccctcaaccaatcggagaacctcccgcagccccctcaggtgtgggatctcttacaatggcttcaggtggtggcgcaccagtggcagacaataacgaaggtgccgatggagtgggtagttcctcgggaaattggcattgcgattcccaatggctgggggacagagtcatcaccaccagcacccgaacctgggccctgcccacctacaacaatcacctctacaagcaaatctccaacagcacatctggaggatcttcaaatgacaacgcctacttcggctacagcaccccctgggggtattttgacttcaacagattccactgccacttctcaccacgtgactggcagcgactcatcaacaacaactggggattccggcctaagcgactcaacttcaagctcttcaacattcaggtcaaagaggttacggacaacaatggagtcaagaccatcgccaataaccttaccagcacggtccaggtcttcacggactcagactatcagctcccgtacgtgctcgggtcggctcacgagggctgcctcccgccgttcccagcggacgttttcatgattcctcagtacgggtatctgacgcttaatgatgggagccaggccgtgggtcgttcgtccttttactgcctggaatatttcccgtcgcaaatgctaagaacgggtaacaacttccagttcagctacgagtttgagaacgtacctttccatagcagctacgctcacagccaaagcctggaccgactaatgaatccactcatcgaccaatacttgtactatctctcaaagactattaacggttctggacagaatcaacaaacgctaaaattcagcgtggccggacccagcaacatggctgtccagggaagaaactacatacctggacccagctaccgacaacaacgtgtctcaaccactgtgactcaaaacaacaacagcgaatttgcttggcctggagcttcttcttgggctctcaatggacgtaatagcttgatgaatcctggacctgctatggccagccacaaagaaggagaggaccgtttctttcctttgtctggatctttaatttttggcaaacaaggaactggaagagacaacgtggatgcggacaaagtcatgataaccaacgaagaagaaattaaaactactaacccggtagcaacggagtcctatggacaagtggccacaaaccaccagagtgcccaagcacaggcgcagaccggctgggttcaaaaccaaggaatacttccgggtatggtttggcaggacagagatgtgtacctgcaaggacccatttgggccaaaattcctcacacggacggcaactttcacccttctccgctaatgggagggtttggaatgaagcacccgcctcctcagatcctcatcaaaaacacacctgtacctgcggatcctccaacggctttcaataaggacaagctgaactctttcatcacccagtattctactggccaagtcagcgtggagattgagtgggagctgcagaaggaaaacagcaagcgctggaacccggagatccagtacacttccaactattacaagtctaataatgttgaatttgctgttaatactgaaggtgtatatagtgaaccccgccccattggcaccagatacctgactcgtaatctgtaa

SEQ ID NO: 239 - protein, 736 aa, Adeno-associated virus
MAADGYLPDWLEDTLSEGIRQWWKLKPGPPPPKPAERHKDDSRGLVLPGYKYLGPGNGLDKGEPVNAADAAALEHDKAYDQQLKAGDNPYLKYNHADAEFQERLKEDTSFGGNLGRAVFQAKKRLLEPLGLVEEAAKTAPGKKRPVEQSPQEPDSSAGIGKSGSQPAKKKLNFGQTGDTESVPDPQPIGEPPAAPSGVGSLTMASGGGAPVADNNEGADGVGSSSGNWHCDSQWLGDRVITTSTRTWALPTYNNHLYKQISNSTSGGSSNDNAYFGYSTPWGYFDFNRFHCHFSPRDWQRLINNNWGFRPKRLNFKLFNIQVKEVTDNNGVKTIANNLTSTVQVFTDSDYQLPYVLGSAHEGCLPPFPADVFMIPQYGYLTLNDGSQAVGRSSFYCLEYFPSQMLRTGNNFQFSYEFENVPFHSSYAHSQSLDRLMNPLIDQYLYYLSKTINGSGQNQQTLKFSVAGPSNMAVQGRNYIPGPSYRQQRVSTTVTQNNNSEFAWPGASSWALNGRNSLMNPGPAMASHKEGEDRFFPLSGSLIFGKQGTGRDNVDADKVMITNEEEIKTTNPVATESYGQVATNHQSAQAQAQTGWVQNQGILPGMVWQDRDVYLQGPIWAKIPHTDGNFHPSPLMGGFGMKHPPPQILIKNTPVPADPPTAFNKDKLNSFITQYSTGQVSVEIEWELQKENSKRWNPEIQYTSNYYKSNNVEFAVNTEGVYSEPRPIGTRYLTRNL

SEQ ID NO: 240 - DNA, 2208 bp, Adeno-associated virus
atggctgccgatggttatcttccagattggctcgaggacactctctctgaaggaataagacagcggtggaagctcaaacctggcccaccaccaccagagcccgcagagcggcataaggacgacagcaggggtcttgtgcttcctgggtacaagtacctcggacccttcaacggactcgacaagggagagccggtcaacgaggcagacgccgcggccctcgagcacgacaaagcctacgaccggcagctcgacagcggagacaacccgtacctcaagtacaaccacgccgacgcggagtttcaggagcgccttaaagaagatacgtcttttgggggcaacctcggacgagcagtcttccaggcgaaaaagagggtacttgaacctctgggcctggttgaggaacctgttaagacggctccgggaaaaaagaggccggtagagcactctcctgtggagccagactcctcctcgggaaccggaaaggcgggccagcagcctgcaagaaaaagattgaattttggtcagactggagacgcagactcagtacctgacccccagcctctcggacagccaccagcagccccctctggtctgggaactaatacgatggctacaggcagtggcgcaccaatggcagacaataacgagggcgccgacggagtgggtaattcctcgggaaattggcattgcgattccacatggatgggcgacagagtcatcaccaccagcacccgaacctgggccctgcccacctacaacaaccacctctacaaacaaatttccagccaatcaggagcctcgaacgacaatcactactttggctacagcaccccttgggggtattttgacttcaacagattccactgccacttttcaccacgtgactggcaaagactcatcaacaacaactggggattccgacccaagagactcaacttcaagctctttaacattcaagtcaaagaggtcacgcagaatgacggtacgacgacgattgccaataaccttaccggcacggttcaggtgtttactgactcggagtaccagctcccgtacgtcctcggctcggcgcatcaaggatgcctcccgccgttcccagcagacgtcttcatggtgccacagtatggatacctcaccctgaacaacgggagtcaggcagtaggacgctcttcattttactgcctggagtactttccttctcagatgctgcgtaccggaaacaactttaccttcagctacacttttgaggacgttcctttccacagcagctacgctcacagccagagtctgggccgtctcatgaatcctctcatcgaccagtacctgtattacttgagcagaacaaacactccaagtggaaccaccacgcagtcaaggcttcagttttctcaggccggagcgagtgacattcgggaccagtctaggaactggcttcctggaccctgttaccgccagcagcgagtatcaaagacatctgcggataacaacaacagtgaatactcgtggactggagctaccaagtaccacctcaatggcagagactctctggtgaatccgggcccggccatggcaagccacaaggacgatgaagaaaagttttttcctcagagcggggttctcatctttgggaagcaaggctcagagaaaacaaatgtggacattgaaaaggtcatgattacagacgaagaggaaatcaggacaaccaatcccgtggctacggagcagtatggttctgtatctaccaacctccagagaggcaacagacaagcagctaccgcagatgtcaacacacaaggcgttcttccaggcatggtctggcaggacagagatgtgtaccttcaggggcccatctgggcaaagattccacacacggacggacattttcacccctctcccctcatgggtggattcggacttaaacaccctcctccacagattctcatcaagaacaccccggtacctgcgaatccttcgaccaccttcagtgcggcaaagtttgcttccttcatcacacagtactccacgggacaggtcagcgtggagatcgagtgggagctgcagaaggaaaacagcaaacgctggaatcccgaaattcagtacacttccaactacaacaagtctgttaatgtggactttactgtggacactaatggcgtgtattcagagcctcgccccattggcaccagatacctgactcgtaatctgtaa

SEQ ID NO: 241 - protein, 735 aa, Adeno-associated virus
MAADGYLPDWLEDTLSEGIRQRWKLKPGPPPPEPAERHKDDSRGLVLPGYKYLGPFNGLDKGEPVNEADAAALEHDKAYDRQLDSGDNPYLKYNHADAEFQERLKEDTSFGGNLGRAVFQAKKRVLEPLGLVEEPVKTAPGKKRPVEHSPVEPDSSSGTGKAGQQPARKRLNFGQTGDADSVPDPQPLGQPPAAPSGLGTNTMATGSGAPMADNNEGADGVGNSSGNWHCDSTWMGDRVITTSTRTWALPTYNNHLYKQISSQSGASNDNHYFGYSTPWGYFDFNRFHCHFSPRDWQRLINNNWGFRPKRLNFKLFNIQVKEVTQNDGTTTIANNLTGTVQVFTDSEYQLPYVLGSAHQGCLPPFPADVFMVPQYGYLTLNNGSQAVGRSSFYCLEYFPSQMLRTGNNFTFSYTFEDVPFHSSYAHSQSLGRLMNPLIDQYLYYLSRTNTPSGTTTQSRLQFSQAGASDIRDQSRNWLPGPCYRQQRVSKTSADNNNSEYSWTGATKYHLNGRDSLVNPGPAMASHKDDEEKFFPQSGVLIFGKQGSEKTNVDIEKVMITDEEEIRTTNPVATEQYGSVSTNLQRGNRQAATADVNTQGVLPGMVWQDRDVYLQGPIWAKIPHTDGHFHPSPLMGGFGLKHPPPQILIKNTPVPANPSTTFSAAKFASFITQYSTGQVSVEIEWELQKENSKRWNPEIQYTSNYNKSVNVDFTVDTNGVYSEPRPIGTRYLTRNL

SEQ ID NO: 242 - DNA, 2208 bp, Adeno-associated virus
atggctgccgatggttatcttccagattggctcgaggacactctctctgaaggaataagacagcggtggaagctcaaacctggcccaccaccaccagagcccgcagagcggcataaggacgacagcaggggtcttgtgcttcctgggtacaagtacctcggacccttcaacggactcgacaagggagagccggtcaacgaggcagacgccgcggccctcgagcacgacaaagcctacgaccggcagctcgacagcggagacaacccgtacctcaagtacaaccacgccgacgcggagtttcaggagcgccttaaagaagatacgtcctttgggggcaacctcggacgagcagtcttccaggcgaaaaagagggtacttgaacctctgggcctggttgaggaacctgttaagacggctccgggaaaaaagaggccggtagagcactctcctgtggagccagactcctcctcgggaaccggaaaggcgggccagcagcctgcaagaaaaagattgaattttggtcagactggagacgcagactcagtacctgacccccagcctctcggacagccaccagcagccccctctggtctgggaactaatacgatggctacaggcagtggcgcaccaatggcagacaataacgagggcgccgacggagtgggtaattcctcgggaaattggcattgcgattccacatggatgggcgacagagtcatcaccaccagcacccgaacctgggccctgcccacctacaacaaccacctctacaaacaaatttccagccaatcaggagcctcgaacgacaatcactactttggctacagcaccccttgggggtattttgacttcaacagattccactgccacttttcaccacgtgactggcaaagactcatcaacaacaactggggattccgacccaagagactcaacttcaagctctttaacattcaagtcaaagaggtcacgcagaatgacggtacgacgacgattgccaataaccttaccagcacggttcaggtgtttactgactcggagtaccagctcccgtacgtcctcggctcggcgcatcaaggatgcctcccgccgttcccagcagacgtcttcatggtgccacagtatggatacctcaccctgaacaacgagagtcaggcagtaggacgctcttcattttactgcctggagtactttccttctcagatgctgcgtaccggaaacaactttaccttcagctacacttttgaggacgttcctttccacagcagctacgctcacagccagagtctgggccgtctcatgaatcctctcatcgaccagtacctgtattacttgagcagaacaaacactccaagtggaaccaccacgcagtcaaggcttcagttttctcaggccggagcgagtgacattcgggaccagtctaggaactggcttcctggaccctgttaccgccagcagcgagtatcaaagacatctgcggataacaacaacagtgaatactcgtggactggagctaccaagtaccacctcaatggcagagactctctggtgaatccgggcccggccatggcaagccacaaggacgatgaagaaaagttttttcctcagagcggggttctcatctttgggaagcaaggctcagagaaaacaaatgtggacattgaaaaggtcatgattacagacgaagaggaaatcaggacaaccaatcccgtggctacggagcagtatggttctgtatctaccaacctccagagaggcaacagacaagcagctaccgcagatgtcaacacacaaggcgttcttccaggcatggtctggcaggacagagatgtgtaccttcaggggcccatctgggcaaagattccacacacggacggacattttcacccctctcccctcatgggtggattcggacttaaacaccctcctccacagattctcatcaagaacaccccggtacctgcgaatccttcgaccaccttcagtgcggcaaagtttgcttccttcatcacacagtactccacgggacaggtcagcgtggagatcgagtgggagctgcagaaggaaaacagcaaacgctggaatcccgaaattcagtacacttccaactacaacaagtctgttaatgtggactttactgtggacactaatggcgtgtattcagagcctcgccccattggcaccagatacctgactcgtaatctgtaa

SEQ ID NO: 243 - protein, 735 aa, Adeno-associated virus
MAADGYLPDWLEDTLSEGIRQRWKLKPGPPPPEPAERHKDDSRGLVLPGYKYLGPFNGLDKGEPVNEADAAALEHDKAYDRQLDSGDNPYLKYNHADAEFQERLKEDTSFGGNLGRAVFQAKKRVLEPLGLVEEPVKTAPGKKRPVEHSPVEPDSSSGTGKAGQQPARKRLNFGQTGDADSVPDPQPLGQPPAAPSGLGTNTMATGSGAPMADNNEGADGVGNSSGNWHCDSTWMGDRVITTSTRTWALPTYNNHLYKQISSQSGASNDNHYFGYSTPWGYFDFNRFHCHFSPRDWQRLINNNWGFRPKRLNFKLFNIQVKEVTQNDGTTTIANNLTSTVQVFTDSEYQLPYVLGSAHQGCLPPFPADVFMVPQYGYLTLNNESQAVGRSSFYCLEYFPSQMLRTGNNFTFSYTFEDVPFHSSYAHSQSLGRLMNPLIDQYLYYLSRTNTPSGTTTQSRLQFSQAGASDIRDQSRNWLPGPCYRQQRVSKTSADNNNSEYSWTGATKYHLNGRDSLVNPGPAMASHKDDEEKFFPQSGVLIFGKQGSEKTNVDIEKVMITDEEEIRTTNPVATEQYGSVSTNLQRGNRQAATADVNTQGVLPGMVWQDRDVYLQGPIWAKIPHTDGHFHPSPLMGGFGLKHPPPQILIKNTPVPANPSTTFSAAKFASFITQYSTGQVSVEIEWELQKENSKRWNPEIQYTSNYNKSVNVDFTVDTNGVYSEPRPIGTRYLTRNL

SEQ ID NO: 244 - DNA, 2208 bp, Adeno-associated virus
atggctgccgatggttatcttccagattggctcgaggacactctctctgaaggaataagacagcggtggaagctcaaacctggcccaccaccaccagagcccgcagagcggcataaggacgacagcaggggtcttgtgcttcctgggtacaagtacctcggacccttcaacggactcgacaagggagagccggtcaacgaggcagacgccgcggccctcgagcacgacaaagcctacgaccggcagctcgacagcggagacaacccgtacctcaagtacaaccacgccgacgcggagtttcaggagcgccttaaagaagatacgtcttttgggggcaacctcggacgagcagtcttccaggcgaaaaagagggtacttgaacctctgggcctggttgaggaacctgttaagacggctccgggaaaaaagaggccggtagagcactctcctgtggagccagactcctcctcgggaaccggaaaggcgggccagcagcctgcaagaaaaagattgaattttggtcagactggagacgcagactcagtacctgacccccagcctctcggacagccaccagcagccccctctggtctgggaactaatacgatggctacaggcagtggcgcaccaatggcagacaataacgagggcgccgacggagtgggtaattcctcgggaaattggcattgcgattccacatggatgggcgacagagtcatcaccaccagcacccgaacctgggccctgcccacctacaacaaccacctctacaaacaaatttccagccaatcaggagcctcgaacgacaatcactactttggctacagcaccccttgggggtattttgacttcaacagattccactgccacttttcaccacgtgactggcaaagactcatcaacaacaactggggattccgacccaagagactcaacttcaagctctttaacattcaagtcaaagaggtcacgcagaatgacggtacgacgacgattgccaataaccttaccagcacggttcaggtgtttactgactcggagtaccagctcccgtacgtcctcggctcggcgcatcaaggatgcctcccgccgttcccagcagacgtcttcatggtaccacagtatggatacctcaccctgaacaacgggagtcaggcagtaggacgctcttcattttactgcctggagtactttccttctcagatgctgcgtaccggaaacaactttaccttcagctacacttttgaggacgttcctttccacagcagctacgctcacagccagagtctgggccgtctcatgaatcctctcatcgaccagtacctgtattacttgagcagaacaaacactccaagtggaaccaccacgcagtcaaggcttcagttttctcaggccggagcgagtgacattcgggaccagtctaggaactggcttcctggaccctgttaccgccagcagcgagtatcaaagacatctgcggataacaacaacagtgaatactcgtggactggagctaccaagtaccacctcaatggcagagactctctggtgaatccgggcccggccatggcaagccacaaggacgatgaagaaaagttttttcctcagagcggggttctcatctttgggaagcaaggctcagagaaaacaaatgtggacattgaaaaggtcatgattacagacgaagaggaaatcaggacaaccaatcccgtggctacggagcagtatggttctgtatctaccaacctccagagaggcaacagacaagcagctaccgcagatgtcaacacacaaggcgttcttccaggcatggtctggcaggacagagatgtgtaccttcaggggcccatctgggcaaagattccacacacggacggacattttcacccctctcccctcatgggtggattcggacttaaacaccctcctccacagattctcatcaagaacaccccggtacctgcgaatccttcgaccaccttcagtgcggcaaagtttgcttccttcatcacacagtactccacgggacaggtcagcgtggagatcgagtgggagctgcagaaggaaaacagcaaacgctggaatcccgaaattcagtacacttccaactacaacaagtctgttaatgtggactttactgtggacactaatggcgtgtattcagagcctcgccccattggcaccagatacctgactcgtaatctgtaa

SEQ ID NO: 245 - protein, 735 aa, Adeno-associated virus
MAADGYLPDWLEDTLSEGIRQRWKLKPGPPPPEPAERHKDDSRGLVLPGYKYLGPFNGLDKGEPVNEADAAALEHDKAYDRQLDSGDNPYLKYNHADAEFQERLKEDTSFGGNLGRAVFQAKKRVLEPLGLVEEPVKTAPGKKRPVEHSPVEPDSSSGTGKAGQQPARKRLNFGQTGDADSVPDPQPLGQPPAAPSGLGTNTMATGSGAPMADNNEGADGVGNSSGNWHCDSTWMGDRVITTSTRTWALPTYNNHLYKQISSQSGASNDNHYFGYSTPWGYFDFNRFHCHFSPRDWQRLINNNWGFRPKRLNFKLFNIQVKEVTQNDGTTTIANNLTSTVQVFTDSEYQLPYVLGSAHQGCLPPFPADVFMVPQYGYLTLNNGSQAVGRSSFYCLEYFPSQMLRTGNNFTFSYTFEDVPFHSSYAHSQSLGRLMNPLIDQYLYYLSRTNTPSGTTTQSRLQFSQAGASDIRDQSRNWLPGPCYRQQRVSKTSADNNNSEYSWTGATKYHLNGRDSLVNPGPAMASHKDDEEKFFPQSGVLIFGKQGSEKTNVDIEKVMITDEEEIRTTNPVATEQYGSVSTNLQRGNRQAATADVNTQGVLPGMVWQDRDVYLQGPIWAKIPHTDGHFHPSPLMGGFGLKHPPPQILIKNTPVPANPSTTFSAAKFASFITQYSTGQVSVEIEWELQKENSKRWNPEIQYTSNYNKSVNVDFTVDTNGVYSEPRPIGTRYLTRNL

SEQ ID NO: 246 - DNA, 2208 bp, Adeno-associated virus
atggctgccgatggttatcttccagattggctcgaggacactctctctgaaggaataagacagcggtggaagctcaaacctggcccaccaccaccagagcccgcagagcggcataaggacgacagcaggggtcttgtgcttcctgggtacaagtacctcggacccttcaacggactcgacaagggagagccggtcaacgaggcagacgccgcggccctcgagcacgacaaagcctacgaccggcagctcgacagcggagacaacccgtacctcaagtacaaccacgccgacgcggagtttcaggagcgccttaaagaagatacgtcttttgggggcaacctcggacgagcagtcttccaggcgaaaaagagggtactcgaacctctgggcctggttgaggaacctgttaagacggctccgggaaaaaagaggccggtagagcactctcctgtggagccagactcctcctcgggaaccggaaaggcgggccagcagcctgcaagaaaaagattgaattttggtcagactggagacgcagactcagtacctgacccccagcctctcggacagccaccagcagccccctctggtctgggaactaatacgatggctacaggcagtggcgcaccaatggcagacaataacgagggcgccgacggagtgggtaattcctcgggaaattggcattgcgattccacatggatgggcgacagagtcatcaccaccagcacccgaacctgggccctgcccacctacaacaaccacctctacaaacaaatttccagccaatcaggagcctcgaacgacaatcactactttggctacagcaccccttgggggtattttgacttcaacagattccactgccacttttcaccacgtgactggcaaagactcatcaacaacaactggggattccgacccaagagactcaacttcaagctctttaacattcaagtcaaagaggtcacgcagaatgacggtacgacgacgattgccaataaccttaccagcacggttcaggtgtttactgactcggagtaccagctcccgtacgtcctcggctcggcgcatcaaggatgcctcccgccgttcccagcagacgtcttcatggtgccacagtatggatacctcaccctgaacaacgggagtcaggcagcaggacgctcttcattttactgcctggagtactttccttctcagatgctgcgtaccggaaacaactttaccttcagctacacttttgaggacgttcctttccacagcagctacgctcacagccagagtctgggccgtctcatgaatcctctcatcgaccagtacctgtattacttgagcagaacaaacactccaagtggaaccaccacgcagtcaaggcttcagttttctcaggccggagcgagtgacattcgggaccagtctaggaactggcttcctggaccctgttaccgccagcagcgagtatcaaagacatctgcggataacaacaacagtgaatactcgtggactggagctaccaagtaccacctcaatggcagagactctctggtgaatccgggcccggccatggcaagccacaaggacgatgaagaaaagttttttcctcagagcggggttctcatctttgggaagcaaggctcagagaaaacaaatgtggacattgaaaaggtcatgattacagacgaagaggaaatcaggacaaccaatcccgtggctacggagcagtatggttctgtatctaccaacctccagagaggcaacagacaagcagctaccgcagatgtcaacacacaaggcgttcttccaggcatggtctggcaggacagagatgtgtaccttcaggggcccatctgggcaaagattccacacacggacggacattttcacccctctcccctcatgggtggattcggacttaaacaccctcctccacagattctcatcaagaacaccccggtacctgcgaatccttcgaccaccttcagtgcggcaaagtttgcttccttcatcacacagtactccacgggacaggtcagcgtggagatcgagtgggagctgcagaaggaaaacagcaaacgctggaatcccgaaattcagtacacttccaactacaacaagtccgttaatgtggactttactgtggacactaatggcgtgtattcagagcctcgccccattggcaccagatacctgactcgtaatctgtaa

SEQ ID NO: 247 - protein, 735 aa, Adeno-associated virus
MAADGYLPDWLEDTLSEGIRQRWKLKPGPPPPEPAERHKDDSRGLVLPGYKYLGPFNGLDKGEPVNEADAAALEHDKAYDRQLDSGDNPYLKYNHADAEFQERLKEDTSFGGNLGRAVFQAKKRVLEPLGLVEEPVKTAPGKKRPVEHSPVEPDSSSGTGKAGQQPARKRLNFGQTGDADSVPDPQPLGQPPAAPSGLGTNTMATGSGAPMADNNEGADGVGNSSGNWHCDSTWMGDRVITTSTRTWALPTYNNHLYKQISSQSGASNDNHYFGYSTPWGYFDFNRFHCHFSPRDWQRLINNNWGFRPKRLNFKLFNIQVKEVTQNDGTTTIANNLTSTVQVFTDSEYQLPYVLGSAHQGCLPPFPADVFMVPQYGYLTLNNGSQAAGRSSFYCLEYFPSQMLRTGNNFTFSYTFEDVPFHSSYAHSQSLGRLMNPLIDQYLYYLSRTNTPSGTTTQSRLQFSQAGASDIRDQSRNWLPGPCYRQQRVSKTSADNNNSEYSWTGATKYHLNGRDSLVNPGPAMASHKDDEEKFFPQSGVLIFGKQGSEKTNVDIEKVMITDEEEIRTTNPVATEQYGSVSTNLQRGNRQAATADVNTQGVLPGMVWQDRDVYLQGPIWAKIPHTDGHFHPSPLMGGFGLKHPPPQILIKNTPVPANPSTTFSAAKFASFITQYSTGQVSVEIEWELQKENSKRWNPEIQYTSNYNKSVNVDFTVDTNGVYSEPRPIGTRYLTRNL

SEQ ID NO: 248 - protein, 738 aa, Adeno-associated virus; identical to SEQ ID NO: 90

SEQ ID NO: 249 - DNA, 2217 bp, Adeno-associated virus
atggctgctgacggttatcttccagattggctcgaggacaacctctctgagggcattcgcgagtggtgggacctgaaacctggagcccccaagcccaaggccaaccagcagaagcaggacgacggccggggtctggtgcttcctggctacaagtacctcggacccttcaacggactcgacaagggggagcccgtcaacgcggcggacgcagcggccctcgagcacgacaaggcctacgaccagcagctcaaagcgggtgacaatccgtacctgcggtataaccacgccgacgccgagtttcaggagcgtctgcaagaagatacgtcttttgggggcaacctcgggcgagcagtcttccaggccaagaagcgggttctcgaacctctcggtctggttgaggaagctgctaagacggctcctggaaagaagagaccggtagaaccgtcacctcagcgttcccccgactcctccacgggcatcggcaagaaaggccagcagcccgctaaaaagagactgaactttggtcagactggcgactcagagtcagtccccgaccctcaaccaatcggagaaccaccagcaggcccctctggtctgggatctggtacaatggctgcaggcggtggcgctccaatggcagacaataacgaaggcgccgacggagtgggtagttcctcaggaaattggcattgcgattccacatggctgggcgacagagtcatcaccaccagcacccgaacctgggccctgcccacctacaacaaccacctctacaagcaaatatccaatgggacatcgggaggaagcaccaacgacaacacctacttcggctacagcaccccctgggggtattttgacttcaacagattccactgccacttctcaccacgtgactggcagcgactcatcaacaacaactggggattccggccaaaaagactcagcttcaagctcttcaacatccaggtcaaggaggtcacgcagaatgaaggcaccaagaccatcgccaataaccttaccagcacgattcaggtatttacggactcggaataccagctgccgtacgtcctcggctccgcgcaccagggctgcctgcctccgttcccggcggacgtcttcatgattccccagtacggctaccttacactgaacaatggaagtcaagccgtaggccgttcctccttctactgcctggaatattttccatctcaaatgctgcgaactggaaacaattttgaattcagctacaccttcgaggacgtgcctttccacagcagctacgcacacagccagagcttggaccgactgatgaatcctctcatcgaccagtacctgtactacttatccagaactcagtccacaggaggaactcaaggtacccagcaattgttattttctcaagctgggcctgcaaacatgtcggctcaggctaagaactggctacctggaccttgctaccggcagcagcgagtctctacgacactgtcgcaaaacaacaacagcaactttgcttggactggtgccaccaaatatcacctgaacggaagagactctttggtaaatcccggtgtcgccatggcaacccacaaggacgacgaggaacgcttcttcccgtcgagtggagtcctgatgttcggaaaacagggtgctggaagagacaatgtggactacagcagcgttatgctaaccagcgaagaagaaattaaaaccactaaccccgtagccacagaacaatacggtgtggtggctgacaacttgcagcaaaccaatacagggcctattgtgggaaatgtcaacagccaaggagccttacctggcatggtctggcagaaccgagacgtgtacctgcagggtcccatctgggccaagattcctcacacggacggcaacttccacccttcaccgctaatgggaggatttggactgaagcacccacctcctcagatcctgatcaagaacacgccggtacctgcggatcctccaacaacgttcagccaggcgaaattggcttccttcattacgcagtacagcaccggacaggtcagcgtggaaatcgagtgggagctgcagaaggagaacagcaaacgctggaacccagagattcagtacacttcaaactactacaaatctacaaatgtggactttgctgtcaatacagagggaacttattctgagcctcgccccattggtactcgttacctcacccgtaatctgtaa

SEQ ID NO: 250 - protein, 738 aa, Adeno-associated virus
MAADGYLPDWLEDNLSEGIREWWDLKPGAPKPKANQQKQDDGRGLVLPGYKYLGPFNGLDKGEPVNAADAAALEHDKAYDQQLKAGDNPYLRYNHADAEFQERLQEDTSFGGNLGRAVFQAKKRVLEPLGLVEEAAKTAPGKKRPVEPSPQRSPDSSTGIGKKGQQPAKKRLNFGQTGDSESVPDPQPIGEPPAGPSGLGSGTMAAGGGAPMADNNEGADGVGSSSGNWHCDSTWLGDRVITTSTRTWALPTYNNHLYKQISNGTSGGSTNDNTYFGYSTPWGYFDFNRFHCHFSPRDWQRLINNNWGFRPKRLSFKLFNIQVKEVTQNEGTKTIANNLTSTIQVFTDSEYQLPYVLGSAHQGCLPPFPADVFMIPQYGYLTLNNGSQAVGRSSFYCLEYFPSQMLRTGNNFEFSYTFEDVPFHSSYAHSQSLDRLMNPLIDQYLYYLSRTQSTGGTQGTQQLLFSQAGPANMSAQAKNWLPGPCYRQQRVSTTLSQNNNSNFAWTGATKYHLNGRDSLVNPGVAMATHKDDEERFFPSSGVLMFGKQGAGRDNVDYSSVMLTSEEEIKTTNPVATEQYGVVADNLQQTNTGPIVGNVNSQGALPGMVWQNRDVYLQGPIWAKIPHTDGNCHPSPLMGGFGLKHPPPQILIKNTPVPADPPTTFSQAKLASFITQYSTGQVSVEIEWELQKENSKRWNPEIQYTSNYYKSTNVDFAVNTEGTYSEPRPIGTRYLTRNL

SEQ ID NO: 251 - protein, 738 aa, Adeno-associated virus
MAADGYLPDWLEDNLSEGIREWWDLKPGAPKPKANQQKQDDGRGLVLPGYKYLGPFNGLDKGEPVNAADAAALEHDKAYDQQLKAGDNPYLRYNHADAEFQERLQEDTSFGGNLGRAVFQAKKRVLEPLGLVEEGAKTAPGKKRPVEPSPQRSPDSSTGIGKKGQQPARKRLNFGRTGDSESVPDPQPIGEPPAAPSSVGSGTMAAGGGAPMADNNEGADGVGSSSGNWHCDSTWLGDRVITTSTRTWALPTYNNHLYKQISNGTSGGSTNDNTYFGYSTPWGYLDFNRFHCHFSPRDWQRLINNNWGFRPKRLSFKLFNIQVKEVTQNEGTKTIANNLASTIQVFTDSEYQPPYVLGSAHQGCLPPFPADVFMIPQYGYLTLNNGSQAVGRSSFYCLEYFPSQMLRTGNNFSFSYTFEDVPFHSSYAHSQSLDRLMNPLIDQYLYYLSRTQSTGGTAGTQQLLFSRAGPSNMSAQARNWLPGPCYRQQRVSTTLSQNNNSNFAWTGATKYHLNGRDSLVNPGVAMATNKDDEDRFFPSSGILMFGKQGAGKDNVDYSNVMLTSEEEIKTTNPVATEQYGVVADNLQQQNTAPTVGAVNSQGALPGMVWQNRDVYLQGPIWAKIPHTDGNFHPSPLMGGFGLKHPPPQILIKNTPVPADPPTAFNQAKLNSFIAQYSTGQVSVEIEWELQKENSKRWNPEIQYTSNYYKSTNADFAVNTEGVYSEPRPIGTRYLTRNL

SEQ ID NO: 252 - DNA, 2217 bp, Adeno-associated virus
atggctgccgatggttatcttccagattggctcgaggacaacctctctgagggcattcgcgagtggtgggacctgaaacctggagccccgaaacccaaagccaaccagcaaaagcaggacgacggccggggtctggtgcttcctggctacaagtacctcggacccttcaacggactcgacaagggggagcccgtcaacgcggcggacgcagcggccctcgagcacgacaaggcctacgaccagcagctcaaagcgggtgacaatccgtacctgcggtataatcacgccgacgccgagtttcaggagcgtctgcaagaagatacgtcttttgggggcaacctcgggcgagcagtcttccaggccaagaagcgggttctcgaacctctcggtctggttgaggaaggcgctaagacggctcctggaaagaagagaccggtagagccgtcaccacagcgttcccccgactcctccacgggcatcggcaagaaaggccagcagcccgccagaaagagactcaatttcggtcggactggcgactcagagtcagtccccgaccctcaacctatcggagaacctccagcagcgccctctagtgtgggatctggtacaatggctgcaggcggtggcgcaccaatggcagacaataacgaaggtgccgacggagtgggtagttcctcgggaaattggcattgcgattccacatggctgggcgacagagttatcaccaccagcacccgaacctgggccctgcccacctacaacaaccacctctacaagcaaatctccaacgggacctcgggaggcagcaccaacgacaacacctactttggctacagcaccccctgggggtatcttgactttaacagattccactgccacttctcaccacgtgactggcagcgactcatcaacaacaactggggattccggcccaagagactcagcttcaagctcttcaacatccaggtcaaagaggtcacgcagaatgaaggcaccaagaccatcgccaataacctcgccagcaccatccaggtgtttacggactcggaataccagccgccgtacgtcctcggctctgcccaccagggctgcctgcctccgttcccggcggacgtcttcatgattcctcagtacggctacctgactctcaacaacggtagtcaggccgtgggacgttcctccttctactgcctggagtacttcccctctcagatgctgagaacgggcaacaacttttccttcagctacactttcgaggacgtgcctttccacagcagctacgcgcacagccagagtttggacaggctgatgaatcctctcatcgaccagtacctgtactacctgtcaagaacccagtctacgggaggcacagcgggaacccagcagttgctgttttctcgggccgggcctagcaacatgtcggctcaggccagaaactggctgcctggaccctgctacagacagcagcgcgtctccacgacactgtcgcaaaacaacaacagcaactttgcctggactggtgccaccaagtatcatctgaacggcagagactctctggtgaatccgggcgtcgccatggcaaccaacaaggacgacgaggaccgcttcttcccatccagcggcatcctcatgtttggcaagcagggagctggaaaagacaacgtggactatagcaacgtgatgctaaccagcgaggaagaaatcaagaccaccaaccccgtggccacagaacagtatggcgtggtggctgataacctacagcagcaaaacaccgctcctactgtgggggccgtcaacagccagggagccttacctggcatggtctggcagaaccgggacgtgtacctgcagggtcctatttgggccaagattcctcacacagatggcaactttcacccgtctcctttaatgggcggctttggacttaaacatccgcctcctcagatcctcatcaaaaacactcctgttcctgcggatcctccaacagcgttcaaccaggccaagctgaattctttcatcgcgcagtacagcaccggacaagtcagcgtggagatcgagtgggagctgcagaaggagaacagcaagcgctggaacccagagattcagtatacttccaactactacaaatctacaaatgcggactttgctgttaatactgagggtgtttactctgagcctcgccccattggcactcgttacctcacccgtaatctgtaa

SEQ ID NO: 253 - DNA, 2208 bp, Adeno-associated virus
atggctgccgatggttatcttccagattggctcgaggacactctctctgaaggaataagacagtggtggaagctcaaacctggcccaccaccaccaaagcccgcagagcggcataaggacgacagcaggggtcttgtgcttcctgggtacaagtacctcggacccttcaacggactcgacaagggggagccggtcaacgaggcagacgccgcggccctcgagcacgacaaggcctacgaccggcagctcgacagcggagacaacccgtacctcaagtacaaccacgccgacgcagagtttcaggagcgccttaaagaagatacgtcttttgggggcaacctcggacgagcagtcttccaggcgaaaaagagggttcttgaacctctgggcctggttgaggagcctgttaagacggctccgggaaaaaagaggccggtagagcactctcctgtggagccagactcctcctcgggaaccggaaaagcgggccagcagcctgcaagaaaaagattaaattttggtcagactggagacgcagactccgtacctgacccccagcctctcggacagccaccagcagccccctctggtctgggatctactacaatggctacaggcagtggcgcaccaatggcagacaataacgagggtgccgatggagtgggtaattcctcaggaaattggcattgcgattcccaatggctgggcgacagagtcatcaccaccagcacccgaacctgggccctgcccacatacaacaaccacctctacaagcaaatctccagccaatcaggagccagcaacgacaaccactactttggctacagcaccccctgggggtattttgacttcaacagattccactgccacttttcaccacgtgactggcaaagactcgtcaacaacaaccggggattccggcccaaaagactcaacttcaagctctttaatattcaagtcaaagaggtcacgcagaatgacggtacgacgacgattgccaataaccttaccagcacggttcaggtgtttactgactcggagtaccagctcccgtacgtcctgggctcggcgcatcaaggatgcctcccgccgtttccagcggacgtcttcatggtcccacagtatggatacctcaccctgaacaacgggagtcaggcggtaggacgctcttccttttactgcctggagtactttccttctcagatgctgcgtactggaaacaactttcagttcagctacacttttgaagacgtgcctttccacagcagctacgctcacagccagagtctggatcggctgatgaatcctctgatcgaccagtacctgtattatctgaacaagacacaaacaaatagtggaactcttcagcagtctcggctactgtttagccaagctggaccaaccaacatgtctcttcaagctaaaaactggctgcctggaccttgctacagacagcagcgtctgtcaaaacaggcaaacgacaacaacaacagcaactttccctggactgcagctacaaagtatcatctaaatggccgggactcgttggttaatccaggaccagctatggccagtcacaaggatgacgaagaaaagtttttccccatgcatggaaccctgatatttggtaaacaaggaacaaatgccaacgacgcggatttggaaaatgtcatgattacagatgaagaagaaatcagggccaccaatcccgtggctacggagcagtacgggactgtgtcaaataatttgcaaaactcaaacactggtccaactactggaactgtcaatcaccaaggagcgttacctggtatggtgtggcaggatcgagacgtgtacctgcagggacccatttgggccaagattcctcacaccgatggacactttcatccttctccactgatgggaggttttggactcaaacacccgcctcctcagatcatgatcaaaaacactcccgttccagccaatcctcccacaaacttcagttctgccaagtttgcttctttcatcacacagtattccacgggacaggtcagcgtggagatcgagtgggagctgcagaaggagaacagcaaacgctggaatcccgaaattcagtacacttccaactacaacaagtctgttaatgtggactttactgtggacactaatggtgtgtattcagagcctcgccccattggcaccagatacctgactcgtaatctgtaa

SEQ ID NO: 254 - protein, 735 aa, Adeno-associated virus
MAADGYLPDWLEDTLSEGIRQWWKLKPGPPPPKPAERHKDDSRGLVLPGYKYLGPFNGLDKGEPVNEADAAALEHDKAYDRQLDSGDNPYLKYNHADAEFQERLKEDTSFGGNLGRAVFQAKKRVLEPLGLVEEPVKTAPGKKRPVEHSPVEPDSSSGTGKAGQQPARKRLNFGQTGDADSVPDPQPLGQPPAAPSGLGSTTMATGSGAPMADNNEGADGVGNSSGNWHCDSQWLGDRVITTSTRTWALPTYNNHLYKQISSQSGASNDNHYFGYSTPWGYFDFNRFHCHFSPRDWQRLVNNNRGFRPKRLNFKLFNIQVKEVTQNDGTTTIANNLTSTVQVFTDSEYQLPYVLGSAHQGCLPPFPADVFMVPQYGYLTLNNGSQAVGRSSFYCLEYFPSQMLRTGNNFQFSYTFEDVPFHSSYAHSQSLDRLMNPLIDQYLYYLNKTQTNSGTLQQSRLLFSQAGPTNMSLQAKNWLPGPCYRQQRLSKQANDNNNSNFPWTAATKYHLNGRDSLVNPGPAMASHKDDEEKFFPMHGTLIFGKQGTNANDADLENVMITDEEEIRATNPVATEQYGTVSNNLQNSNTGPTTGTVNHQGALPGMVWQDRDVYLQGPIWAKIPHTDGHFHPSPLMGGFGLKHPPPQIMIKNTPVPANPPTNFSSAKFASFITQYSTGQVSVEIEWELQKENSKRWNPEIQYTSNYNKSVNVDFTVDTNGVYSEPRPIGTRYLTRNL

SEQ ID NO: 255 - protein, 738 aa, Adeno-associated virus
MAADGYLPDWLEDNLSEGIREWWDLKPGAPKPKANQQKQDDGRGLVLPGYKYLGPFNGLDKGEPVNAADAAALEHDKAYDQQLKAGDNPYLRYNHADAEFQERLQEDTSFGGNLGRAVFQAKKRVLEPLGLVEEAAKTAPGKKRPVEPSPQRSPDSSTGIGKKGQQPAKKRLSFGQTGDSESVPDPQPIGEPPAGPSGLGSGTMAAGGGAPMADNNEGADGVGSSSGNWHCDSTWLGDRVITTSTRTWALPTYNNHLYKQISNGTSGGSTNDNTYFGYSTPWGYFDFNRFHCHFSPRDWQRLINNNWGFRPKRLSFKLFNIQVKEVTQNEGTKTIANNLTSTIQVFTDSEYQLPYVLGSAHQGCLPPFPADVFMIPQYGYLTLNNGSQAVGRSSFYCLEYFPSQMLRTGNNSEFSYTFEDVPFHSSYAHSQSLDRLMNPLIDQYLYYLSRTQSTGGTQGTQQLLFSQAGPANMSAQAKNWLPGPCYRQQRVSTTLSQNNNSNFAWTGATKYHLNGRDSLVNPGVAMATHKDDEERFFPSSGVLMFGKQGAGRDNVDYSSVMLTSEEEIKTTNPVATEQYGVVADNLQQTNTGPIVGNVNSQGALPGMVWQNRDVYLQGPIWAKIPHTDGNFHPSPLMGGFGLKHPPPQILIKNTPVPADPPTTFSQAKLASFITQYSTGQVSVEIEWELQKENSKRWNPEIQYTSNYYKSTNVDFAVNTEGTYSEPRPIGTRYLTRNL

SEQ ID NO: 256 - DNA, 2217 bp, Adeno-associated virus
atggctgctgacggttatcttccagattggctcgaggacaacctctctgagggcattcgcgagtggtgggacctgaaacctggagcccccaagcccaaggccaaccagcagaagcaggacgacggccggggtctggtgcttcctggctacaagtacctcggacccttcaacggactcgacaagggggagcccgtcaacgcggcggacgcagcggccctcgagcacgacaaggcctacgaccagcagctcaaagcgggtgacaatccgtacctgcggtataaccacgccgacgccgagtttcaggagcgtctgcaagaagatacgtcttttgggggcaacctcgggcgagcagtcttccaggccaagaagcgggttctcgaacctctcggtctggttgaggaagctgctaagacggctcctggaaagaagagaccggtagaaccgtcacctcagcgttcccccgactcctccacgggcatcggcaagaaaggccagcagcccgctaaaaagagactgagctttggtcagactggcgactcagagtcagtccccgaccctcaaccaatcggagaaccaccagcaggcccctctggtctgggatctggtacaatggctgcaggcggtggcgctccaatggcagacaataacgaaggcgccgacggagtgggtagttcctcaggaaattggcattgcgattccacatggctgggcgacagagtcatcaccaccagcacccgaacctgggccctgcccacctacaacaaccacctctacaagcaaatatccaatgggacatcgggaggaagcaccaacgacaacacctacttcggctacagcaccccctgggggtattttgacttcaacagattccactgccacttctcaccacgtgactggcagcgactcatcaacaacaactggggattccggccaaaaagactcagcttcaagctcttcaacatccaggtcaaggaggtcacgcagaatgaaggcaccaagaccatcgccaataaccttaccagcacgattcaggtatttacggactcggaataccagctgccgtacgtcctcggctccgcgcaccagggctgcctgcctccgttcccggcggacgtcttcatgattccccagtacggctaccttacactgaacaatggaagtcaagccgtaggccgttcctccttctactgcctggaatattttccatctcaaatgctgcgaactggaaacaattctgaattcagctacaccttcgaggacgtgcctttccacagcagctacgcacacagccagagcttggaccgactgatgaatcctctcatcgaccagtacctgtactacttatccagaactcagtccacaggaggaactcaaggtacccagcaattgttattttctcaagctgggcctgcaaacatgtcggctcaggctaagaactggctacctggaccttgctaccggcagcagcgagtctctacgacactgtcgcaaaacaacaacagcaactttgcttggactggtgccaccaaatatcacctgaacggaagagactctttggtaaatcccggtgtcgccatggcaacccacaaggacgacgaggaacgcttcttcccgtcgagtggagtcctgatgtttggaaaacagggtgctggaagagacaatgtggactacagcagcgttatgctaaccagcgaagaagaaattaaaaccactaaccctgtagccacagaacaatacggtgtggtggctgacaacttgcagcaaaccaatacagggcctattgtgggaaatgtcaacagccaaggagccttacctggcatggtctggcagaaccgagacgtgtacctgcagggtcccatctgggccaagattcctcacacggacggcaacttccacccttcaccgctaatgggaggatttggactgaagcacccacctcctcagatcctgatcaagaacacgccggtacctgcggatcctccaacaacgttcagccaggcgaaattggcttccttcattacgcagtacagcaccggacaggtcagcgtggaaatcgagtgggagctgcagaaggagaacagcaaacgctggaacccagagattcagtacacttcaaactactacaaatctacaaatgtggactttgctgtcaatacagagggaacttattctgagcctcgccccattggtactcgttacctcacccgtaatctgtaa

SEQ ID NO: 257 - protein, 738 aa, Adeno-associated virus
MAADGYLPDWLEDNLSEGIREWWDLKPGAPKPKANQQKQDDGRGLVLPGYKYLGPFNGLDKGEPVNAADAAALEHDKAYDQQLKAGDNPYLRYNHADAEFQERLQEDTSFGGNLGRAVFQAKKRVLEPLGPVEEAAKTAPGKKRPVEPPPQRSPDSSTGIGKKGQQPAKKRLNFGQTGDSESVPDPQPIGEPPAGPSGLGSGTMAAGGGAPMADNNEGADGVGSSSGNWHCDSTWLGDRVITTSTRTWALPTYNNHLYKQISNGTSGGSTNDNTYFGYSTPWGYFDFNRFHCHFSPRDWQRLINNNWGFRPKRLSFKLFNIQVKEVTQNEGTKTVANNLTSTIQVFTDSEYQLPYVLGSAHQGCLPPFPADVFMIPQYGYLTLNNGSQAVGRSSFYCLEYFPSQMLRTGNNFEFSYTFEDVPFHSSYAHSQSLDRLMNPLIDQYLYYLSRTQSTGGTQGTQQLLFSQAGPANMSAQAKNWLPGPCYRQQRVSTTLSQNNNSNFAWTGATKYHLNGRDSLVNPGVAMATHKDDEERFFPSSGVLMFGKQGAGRDNVDYSSVMLTSEEEIKTTNPVATEQYGVVADNLQQTNTGPIVGNVNSQGALPGMVWQNRDVYLQGPIWAKIPHTDGNFHPSPLMGGFGLKHPPPQILIKNTPVPADPPTTFSQAKLASFITQYSTGQVSVEIEWELQKENSKRWNPEIQYTSNYYKSTNVDFAVNTEGTYSEPRPIGTRYLTRNL

SEQ ID NO: 258 - DNA, 2217 bp, Adeno-associated virus
atggctgctgacggttatcttccagattggctcgaggacaacctctctgagggcattcgcgagtggtgggacctgaaacctggagcccccaagcccaaggccaaccagcagaagcaggacgacggccggggtctggtgcttcctggctacaagtacctcggacccttcaacggactcgacaagggggagcccgtcaacgcggcggacgcagcggccctcgagcacgacaaggcctacgaccagcagctcaaagcgggtgacaatccgtacctgcggtataaccacgccgacgccgagtttcaggagcgtctacaagaagatacgtcttttgggggcaacctcgggcgagcagtcttccaggccaagaagcgggttctcgaacctctcggtccggttgaggaagctgctaagacggctcctggaaagaagagaccggtagaaccgccacctcagcgttcccccgactcctccacgggcatcggcaagaaaggccagcagcccgctaaaaagagactgaactttggtcagactggcgactcagagtcagtccccgaccctcaaccaatcggagaaccaccagcaggcccctctggtctgggatctggtacaatggctgcaggcggtggcgctccaatggcagacaataacgaaggcgccgacggagtgggtagttcctcaggaaattggcattgcgattccacatggctgggcgacagagtcatcaccaccagcacccgaacctgggccctgcccacctacaacaaccacctctacaagcaaatatccaatgggacatcgggaggaagcaccaacgacaacacctacttcggctacagcaccccctgggggtattttgacttcaacagattccactgccacttctcaccacgtgactggcagcgactcatcaacaacaactggggattccggccaaaaagactcagcttcaagctcttcaacatccaggtcaaggaggtcacgcagaatgaaggcaccaagaccgtcgccaataaccttaccagcacgattcaggtatttacggactcggaataccagctgccgtacgtcctcggctccgcgcaccagggctgcctgcctccgttcccggcggacgtcttcatgattccccagtacggctaccttacactgaacaatggaagtcaagccgtaggccgttcctccttctactgcctggaatattttccatctcaaatgctgcgaactggaaacaattttgaattcagctacaccttcgaggacgtgcctttccacagcagctacgcacacagccagagcttggaccgactgatgaatcctctcatcgaccagtacctgtactacttatccagaactcagtccacaggaggaactcaaggtacccagcaattgttattttctcaagctgggcctgcaaacatgtcggctcaggctaagaactggctacctggaccttgctaccggcagcagcgagtctctacgacactgtcgcaaaacaacaacagcaactttgcttggactggtgccaccaaatatcacctgaacggaagagactctttggtaaatcccggtgtcgccatggcaacccacaaggacgacgaggaacgcttcttcccgtcgagtggagtcctgatgtttggaaaacagggtgctggaagagacaatgtggactacagcagcgttatgctaaccagcgaagaagaaattaaaaccactaaccctgtagccacagaacaatacggtgtggtggctgacaacttgcagcaaaccaatacagggcctattgtgggaaatgtcaacagccaaggagccttacctggcatggtctggcagaaccgagacgtgtacctgcagggtcccatctgggccaagattcctcacacggacggcaacttccacccttcaccgctaatgggaggatttggactgaagcacccacctcctcagatcctgatcaagaacacgccggtacctgcggatcctccaacaacgttcagccaggcgaaattggcttccttcattacgcagtacagcaccggacaggtcagcgtggaaatcgagtgggagctgcagaaggagaacagcaaacgttggaacccagagattcagtacacttcaaactactacaaatctacaaatgtggactttgctgtcaatacagagggaacttattctgagcctcgccccattggtactcgttacctcacccgtaatctgtaa

SEQ ID NO: 259 - protein, 738 aa, Adeno-associated virus
MAADGYLPDWLEDNLSEGIREWWDLKPGAPKPKANQQKQDDGRGLVLPGYKYLGPFNGLDKGEPVNAADAAALEHDKAYDQQLKAGDNPYLRYNHADAEFQERLQEDTSFGGNLGRAVFQAKKRVLEPLGLVEEAAKTAPGKKRPVEPSPQRSPDSSTGIGKKGQQPAKKRLNFGQTGDSESVPDPQPIGEPPAGPSGLGSGTMAAGGGAPMADNNEGADGVGSSSGNWHCDSTWLGDRVITTSTRTWALPTYNNHLYKQISNGTSGGSTNDNTYFGYSTPWGYFDFNRFHCHFSPRDWQRLINNNWGFRPKRLSFKLFNIQVKEVTQNEGTKTIANNLTSTIQVFTDSEYQLPYVLGSAHQGCLPPFPADVFMIPQYGYLTLNNGSQAVGRSSFYCLEYFPSQMLRTGNNFEFSYTFEDVPFHSSYAHSQSLDRLMNPLIDQYLYYLSRTQSTGGTQGTQQLLFSQAGPANMSAQAKNWLPGPCYRQQRVSTTLSQSNNSNFAWTGATKYHLNGRDSLVNPGVAMATHKDDEERFFPSSGVLMFGKQGAGRDNVDYSSVMLTSEEEIKTTNPVATEQYGVVADNLQQTNTGPIVGNVNSQGALPGMVWQNRDVYLQGPIWAKIPHTDGNFHPSPLMGGLGLKHPPPQILIKNTPVPADPPTTFSQAKLASFITQYSTGQVSVEIEWELQKENSKRWNPEIQYTSNYYKSTNVDFAVNTEGTYSEPRPIGTRYLTRNL

SEQ ID NO: 260 - DNA, 2217 bp, Adeno-associated virus
atggctgctgacggttatcttccagattggctcgaggacaacctctctgagggcattcgcgagtggtgggacctgaaacctggagcccccaagcccaaggccaaccagcagaagcaggacgacggccggggtctggtgcttcctggctacaagtacctcggacccttcaacggactcgacaagggggagcccgtcaacgcggcggacgcagcggccctcgagcacgacaaggcctacgaccagcagctcaaagcgggtgacaatccgtacctgcggtataaccacgccgacgccgagtttcaggagcgtctgcaagaagatacgtcttttgggggcaacctcgggcgagcagtcttccaggccaagaagcgggttctcgaacctctcggtctggttgaggaagcggctaagacggctcctggaaagaagagaccggtagaaccgtcacctcagcgttcccccgactcctccacgggcatcggcaagaaaggccagcagcccgctaaaaagagactgaactttggtcagactggcgactcagagtcagtccccgaccctcaaccaatcggagaaccaccagcaggcccctctggtctgggatctggtacaatggctgcaggcggtggcgctccaatggcagacaataacgaaggcgccgacggagtgggtagttcctcaggaaattggcattgcgattccacatggctgggcgacagagtcatcaccaccagcacccgaacctgggccctgcccacctacaacaaccacctctacaagcaaatatccaatgggacatcgggaggaagcaccaacgacaacacctacttcggctacagcaccccctgggggtattttgacttcaacagattccactgccacttctcaccacgtgactggcagcgactcatcaacaacaactggggattccggccaaaaagactcagcttcaagctcttcaacatccaggtcaaggaggtcacgcagaatgaaggcaccaagaccatcgccaataaccttaccagcacgattcaggtatttacggactcggaataccagctgccgtacgtcctcggctccgcgcaccagggctgcctgcctccgttcccggcggacgtcttcatgattccccagtacggctaccttacactgaacaatggaagtcaagccgtaggccgttcctccttctactgcctggaatattttccatctcaaatgctgcgaactggaaacaattttgaattcagctacaccttcgaggacgtgcctttccacagcagctacgcacacagccagagcttggaccgactgatgaatcctctcatcgaccagtacctgtactacttatccagaactcagtccacaggaggaactcaaggtacccagcaattgttattttctcaagctgggcctgcaaacatgtcggctcaggctaagaactggctacctggaccttgctaccggcagcagcgagtctctacgacactgtcgcaaagcaacaacagcaactttgcttggactggtgccaccaaatatcacctgaacggaagagactctttggtaaatcccggtgtcgccatggcaacccacaaggacgacgaggaacgcttcttcccgtcgagtggagtcctgatgtttggaaaacagggtgctggaagagacaatgtggactacagcagcgttatgctaaccagcgaagaagaaattaaaaccactaaccctgtagccacagaacaatacggtgtggtggctgacaacttgcagcaaaccaatacagggcctattgtgggaaatgtcaacagccaaggagccttacctggcatggtctggcagaaccgagacgtgtacctgcagggtcccatctgggccaagattcctcacacggacggcaacttccacccttcaccgctaatgggaggacttggactgaagcacccacctcctcagatcctgatcaagaacacgccggtacctgcggatcctccaacaacgttcagccaggcgaaattggcttccttcattacgcagtacagcaccggacaggtcagcgtggaaatcgagtgggagctgcagaaggagaacagcaaacgctggaacccagagattcagtacacttcaaactactacaaatctacaaatgtggactttgctgtcaatacagagggaacttattctgagcctcgccccattggtactcgttacctcacccgtaatctgtaa

SEQ ID NO: 261 - protein, 737 aa, Adeno-associated virus
MAADGYLPDWLEDNLSEGIREWWDLKPGAPKPKANQQKQDDGRGLVLPGYKYLGPFNGLDKGEPVNAADAAALEHDKAYDQQLKAGDNPYPRYNHADAEFQERLQEDTPFGGNLGRAVFQAKKRVLEPLGLVEEAAKTAPGKKRPVEPSPQRSPDSSTGIGKKGQQPAKKRLNFGQTGDSESVPDPQPIGEPPAGPSGLGSGTMAAGGGAPMADNNEGADGVGNASGNWHCDSTWLGDRVITTSTRTWALPTYNNHLYKQISSASTGASNDNHYFGYSTPWGYFDFNRFHCHFSPRDWQRLINNNWGFRPKRLNFKLFNIQVKEVTTNDGVTTIANNLTSTVQVFSDSEYQLPYVLGSAHQGCLPPFPADVFMIPQYGYLTLNNGSQAVGRSSFYCLEYFPSQMLRTGNNFTFSYTFEEVPLHSSYAHSQSLDRLMNPLIVQYLYYLNRTQNQSGSAQNKDLLFSRGSPAGMSVQPKNWLPGPCYRQQRVSKTKTDNNNSNFTWTGASKYNLNGRESIINPGTAMASHKDDEDKFFPMSGVMIFGKESAGASNTALDNVMITDEEEIKATNPVATERFGTVAVNFQSSSTDPATGDVHAMGALPGMVWQDRDVYLQGPIWAKIPHTDGHFHPSPLMGGFGLKNPPPQILIKNTPVPANPPAEFSATKFASFITQYSTGQVSVEIEWELQKENSKRWNPEVQYTSNYAKSASVDFTVDNNGLYTEPRPIGTRYLTRPL

SEQ ID NO: 262 - protein, 737 aa, Adeno-associated virus
MAADGYLPDWLEDNLSEGIREWWDLKPGAPKPKANQQKQDDGRGLVLPGYKYLGPFNGLDKGEPVNAADAAALEHDKAYDQQLKAGDNPYPRYNHADAEFQERLQEDTSFGGNLGRAVFQAKKRVLEPLGLVEEAAKTAPGKKRPVEPSPQRSPDSSTGIGKKGQQPAKKRLNFGQTGDSESVPDPQPIGEPPAGPSGLGSGTMAAGGGAPMADNNEGADGVGNASGNWHCDSTWLGDRVITTSTRTWALPTYNNHLYKQISSASTGASNDNHYFGYSTPWGYFDFNRFHCHFSPRDWQRLINNNWGFRPKRLNFKLFNIQVKEVTTNDGVTTIANNLTSTVQVFSDSEYQLPYVLGSAHQGCLPPFPADVFMIPQYGYLTLNNGSQAVGRSSFYCLEYFPSQMLRTGNNFTFSYTFEEVPLHSSYAHSQSLDRLMNPLIDQYLYYLNRTQNQSGSAQNKDLLFSRGSPAGMSVQPKNWLPGPCYRQQRVSKTKTDNNNSNFTWTGASKYNLNGRESIINPGTAMASHKDDEDKFFPMSGVMIFGKESAGASNTALDNVMITDEEEIKATNPVATERFGTVAVNFQSSSTDPATGDVHAMGALPGMVWQDRDVYLQGPIWAKIPHTDGHFHPSPLMGGFGLKNPPPQILIKNTPVPANPPAEFSATKFASFITQYSTGQVSVEIEWELQKENSKRWNPEVQYTSNYAKSASVDFTVDNNGLYTEPRPIGTRYLTRPL

SEQ ID NO: 263 - DNA, 2214 bp, Adeno-associated virus
atggctgctgacggttatcttccagattggctcgaggacaacctctctgagggcattcgcgagtggtgggacctgaaacctggagcccccaagcccaaggccaaccagcagaagcaggacgacggccggggtctggtgcttcctggctacaagtacctcggacccttcaacggactcgacaagggggagcccgtcaacgcggcggacgcagcggccctcgagcacgacaaggcctacgaccagcagctcaaagcgggtgacaatccgtacccgcggtataaccacgccgacgccgagtttcaggagcgtctgcaagaagatacgccttttgggggcaacctcgggcgagcagtcttccaggccaagaagcgggttctcgaacctctcggtctggttgaggaagctgctaagacggctcctggaaagaagagaccggtagaaccgtcacctcagcgttcccccgactcctccacgggcatcggcaagaaaggccagcagcccgctaaaaagagactgaactttggtcagactggcgactcagagtcagtccccgaccctcaaccaatcggagaaccaccagcaggcccctctggtctgggatctggtacaatggctgcaggcggtggcgctccaatggcagacaataacgaaggcgccgacggagtgggtaatgcctcaggaaattggcattgcgattccacatggctgggcgacagagtcatcaccaccagcacccgcacctgggccttgcccacctacaataaccacctctacaagcaaatctccagtgcttcaacgggggccagcaacgacaaccactacttcggctacagcaccccctgggggtattttgatttcaacagattccactgccacttttcaccacgtgactggcagcgactcatcaacaacaattggggattccggcccaagagactcaacttcaaactcttcaacatccaagtcaaggaggtcacgacgaatgatggcgtcacaaccatcgctaataaccttaccagcacggttcaagtcttctcggactcggagtaccagcttccgtacgtcctcggctctgcgcaccagggctgcctccctccgttcccggcggacgtgttcatgattccgcaatacggctacctgacgctcaacaatggcagccaagccgtgggacgttcatccttttactgcctggaatatttcccttctcagatgctgagaacgggcaacaactttaccttcagctacacctttgaggaagtgcctctccacagcagctacgcgcacagccagagcctggaccggctgatgaatcctctcatcgtccaatacctgtattacctgaacagaactcaaaatcagtccggaagtgcccaaaacaaggacttgctgttcagccgtgggtctccagctggcatgtctgttcagcccaaaaactggctacctggaccctgttatcggcagcagcgcgtttctaaaacaaaaacagacaacaacaacagcaattttacctggactggtgcttcaaaatataacctcaatgggcgtgaatccatcatcaaccctggcactgctatggcctcacacaaagacgacgaagacaagttctttcccatgagcggtgtcatgatttttggaaaagagagcgccggagcttcaaacactgcattggacaatgtcatgattacagacgaagaggaaattaaagccactaaccctgtggccaccgaaagatttgggaccgtggcagtcaatttccagagcagcagcacagaccctgcgaccggagatgtgcatgctatgggagcattacctggcatggtgtggcaagatagagacgtgtacctgcagggtcccatttgggccaaaattcctcacacagatggacactttcacccgtctcctcttatgggcggctttggactcaagaacccgcctcctcagatcctcatcaaaaacacgcctgttcctgcgaatcctccggcggagttttcagctacaaagtttgcttcattcatcacccaatactccacaggacaagtgagtgtggaaattgaatgggagctgcagaaagaaaacagcaagcgctggaatcccgaagtgcagtacacatccaattatgcaaaatctgccagcgttgattttactgtggacaacaatggactttatactgagcctcgccccattggcacccgttaccttacccgtcccctgtaa

SEQ ID NO: 264 - protein, 736 aa, Adeno-associated virus
MAADGYLPDWLEDTLSEGIRQWWKLRPGPPPPKPAERHKDDSRGLVLPGYKYLGPFNGLDKGEPVNEADAAALEHDKAYDRQLDSGDNPYLKYNHADAEFQERLKEDTSFGGNLGRAVFQAKKRVLEPLGLVEEGAETAPGKKRPVEQSPQGPDSSSGIGKTGQQPAKKRLNFGQTGDSESVPDPQPLGEPPATPAAVGPTTMASGGGAPMADNNEGADGVGNASGNWHCDSTWLGDRVITTSTRTWALPTYNNHLYKQISSASTGASNDNHYFGYSTPWGYFDFNRFHCHFSPRDWQRLINNNWGFRPKRLNFKLFNIQVKEVTTNDGVTTIANNLTSTVQVFSDSEYQLPYVLGSAHQGCLPPFPADVFMIPQYGYLTLNNGSQAVGRSSFYCLEYFPSQMLRTGNNFTFSYTFEEVPFHSSYAHSQSLDRLMNPLIDQYLYYPNRTQNQSGSAQNKDLLFSRGSPAGMSVQPKNWLPGPCYRQQRVSKTKTDNNNSNFTWTGASKYNLNGRESIINPGTAMASHKDDEDKFFPMSGVMIFGKESAGASNTALDNVMITDEEEIKATNPVATERFGTVAVNFQSSSTDPATGDVHAMGALPGMVWQGRDVYLQGPIWAKIPHTDGHFHPSPLMGGFGLKNPPPQILIKNTPVPANPPAEFSATKFASFITQYSTGQVSVEIEWELQKENSKRWNPEVQYTSNYAKSANVDFTVDNNGLYTEPRPIGTRYLTRPL

SEQ ID NO: 265 - DNA, 2211 bp, Adeno-associated virus
atggctgccgatggttatcttccagattggctcgaggacactctctctgaaggaataagacagtggtggaagctcagacctggcccaccaccaccaaagcccgcagagcggcataaggacgacagcaggggtcttgtgcttcctgggtacaagtacctcggacccttcaacggactcgacaagggagagccggtcaacgaggcagacgccgcggccctcgagcacgacaaagcctacgaccggcagctcgacagcggagacaacccgtacctcaagtacaaccacgccgacgcggagtttcaggagcgccttaaagaagatacgtcttttgggggcaacctcgggcgagcagtcttccaggccaagaagcgggttctcgaacctctcggtctggttgaggaaggcgctgagacggctcctggaaagaaacgtccggtagagcagtcgccacaagggccagactcctcctcgggcatcggcaagacaggccagcagcccgctaaaaagagactcaattttggtcagactggcgactcagagtcagtccccgatccacaacctctcggagaacctccagcaacccccgctgctgtgggacctactacaatggcttcaggcggtggcgcaccaatggcagacaataacgaaggcgccgacggagtgggtaatgcctcaggaaattggcattgcgattccacatggctgggcgacagagtcatcaccaccagcacccgcacctgggccttgcccacctacaataaccacctctacaagcaaatctccagtgcttcaacgggggccagcaacgacaaccactacttcggctacagcaccccctgggggtattttgatttcaacagattccactgccacttttcaccacgtgactggcagcgactcatcaacaacaattggggattccggcccaagagactcaacttcaaactcttcaacatccaagtcaaggaggtcacgacgaatgatggcgtcacaaccatcgctaataaccttaccagcacggttcaagtcttctcggactcggagtaccagcttccgtacgtcctcggctctgcgcaccagggctgcctccctccgttcccggcggacgtgttcatgattccgcaatacggctacctgacgctcaacaatggcagccaagccgtgggacgttcatccttttactgcctggaatatttcccttctcagatgctgagaacgggcaacaactttaccttcagctacacctttgaggaagtgcctttccacagcagctacgcgcacagccagagcctggaccggctgatgaatcctctcatcgaccaatacctgtattacccgaacagaactcaaaatcagtccggaagtgcccaaaacaaggacttgctgtttagccgtgggtctccagctggcatgtctgttcagcccaaaaactggctacctggaccctgttatcggcagcagcgcgtttctaaaacaaaaacagacaacaacaacagcaattttacctggactggtgcttcaaaatataacctcaatgggcgtgaatccatcatcaaccctggcactgctatggcctcacacaaagacgacgaagacaagttctttcccatgagcggtgtcatgatttttggaaaagagagcgccggagcttcaaacactgcattggacaatgtcatgattacagacgaagaggaaattaaagccactaaccctgtggccaccgaaagatttgggaccgtggcagtcaatttccagagcagcagcacagaccctgcgaccggagatgtgcatgctatgggagcattacctggcatggtgtggcaaggtagagacgtgtacctgcagggtcccatttgggccaaaattcctcacacagatggacactttcacccgtctcctcttatgggcggctttggactcaagaacccgcctcctcagatcctcatcaaaaacacgcctgttcctgcgaatcctccggcggagttttcagctacaaagtttgcttcattcatcacccaatactccacaggacaagtgagtgtggaaattgaatgggagctgcagaaagaaaacagcaagcgctggaatcccgaagtgcagtacacatccaattatgcaaaatctgccaacgttgattttactgtggacaacaatggactttatactgagcctcgccccattggcacccgttaccttacccgtcccctgtaa

SEQ ID NO: 266 - protein, 736 aa, Adeno-associated virus
MAADGYLPDWLEDTLSEGIRQWWKLRPGPPPPKPAERHKDDSRGLVLPGYKYLGPFNGLDKGEPVNEADAAALEHDKAYDRQLDSGDNPYLKYNHADAEFQERLKEDTSFGGNLGRAVFQAKKRVLEPLGLVEEGAKTAPGKKRPVEQSPQGPDSSSGIGKTGQQPAKKRLNFGQTGDSESVPDPQPLGEPPATPAAVGPTTMASGGGAPMADNNEGADGVGNASGNWHCDSTWLGDRVITTSTRTWALPTYNNHLYKQISSASTGASNDNHYFGYSTPWGYFDFNRFHCHFSPRDWQRLINNNWGFRPKRLNFKLFNIQVKEVTTNDGVTTIANNLTSTVQVFSDSEYQLPYVLGSAHQGCLPPFPADVFMIPQYGYLTLNNGSQAVGRSSFYCLEYFPSQMLRTGNNFTFSYTFEEVPFHSSYAHSQSLDRLMNPLIDQYLYYPNRTQNQSGSAQNKDLLFSRGSPAGMSVQPKNWLPGPCYRQQRVSKTKTDNNNSNFTWTGASKYNLNGRESIINPGTAMASHKDDEDKFFPMSGVMIFGKESAGASNTALDNVMITDEEEIKATNPVATERFGTVAVNFQSSSTDPATGDVHAMGALPGMVWQGRDVYLQGPIWAKIPHTDGHFHPSPLMGGFGLKNPPPQILIKNTPVPANPPAEFSATKFASFITQYSTGQVSVEIEWELQKENSKRWNPEVQYTSNYAKSANVDFTVDNNGLYTEPRPIGTRYLTRPL

SEQ ID NO: 267 - protein, 736 aa, Adeno-associated virus
MAADGYLPDWLEDTLSEGIRQWWKLRPGPPPPKPAERHKDDSRGLVLPGYKYLGPFNGLDKGEPVNEADAAALEHDKAYDRQLDSGDNPYLKYNHADAEFQERLKEDTSFGGNLGRAVFQAKKRVLEPLGLVEEGAKTAPGKKRPVEQSPQGPDSSSGIGKTGQQPAKKRLNFGQTGDSESVPDPQPLGEPPATPAAVGPTTMASGGGAPMADNNEGADGVGNASGNWHCDSTWLGDRVITTSTRTWALPTYNNHLYKQISSASTGASNDNHYFGYSTPWGYFDFNRFHCHFSPRDWQRLINNNWGFRPKRLNFKLFNIQVKEVTTNDGVTTIANNLTSTVQVFSDSEYQLPYVLGSAHQGCLPPFPADVFMIPQYGYLTLNNGSQAVGRSSFYCLEYFPSQMLRTGNNFTFSYTFEEVPFHSSYAHSQSLDRLMNPLIDQYLYYLNRTQNQSGSAQNKDLLFSRGSPAGMSVQPKNWLPGPCYRQQRVSKTKTDNNNSNFTWTGASKYNLNGRESIINPGTAMASHKDDEDKFFPMSGVMIFGKESAGASNTALDNVMITDEEEIKATNPVATERFGTVAVNFQSSSTDPATGDVHAMGALPGMVWQGRDVYLQGPIWAKIPHTDGHFHPSPLMGGFGLKNPPPQILIKNTPVPANPPAEFSATKFASFITQYSTGQVSVEIEWELQKENSKRWNPEVQYTSNYAKSANVDFTVDNNGLYTEPRPIGTRYLTRPL

SEQ ID NO: 268 - protein, 736 aa, Adeno-associated virus
MAADGYLPDWLEDTLSEGIRQWWKLRPGPPPPKPAERHKDDSRGLVLPGYKYLGPFNGLDKGEPVNEADAAALEHDKAYDRQLDSGDNPYLKYNHADAEFQERLKEDTSFGGNLGRAVFQAKKRVLEPLGLVEEGAKTAPGKKRPVEQSPQGPDSSSGIGKTGQQPAKKRLNFGQTGDSESVPDPQPLGEPPATPAAVGPTTMASGGGAPMADNNEGADGVGNASGNWHCDSTWLGDRVITTSTRTWALPTYNNHLYKQISSASTGASNDNHYFGYSTPWGYFDFNRFHCHFSPRDWQRLINNNWGFRPKRLNFKLFNIQVKEVTTNDGVTTIANNLTSTVQVFSDSEYQLPYVLGSAHQGCLPPFPADVFMIPQYGYLTLNNGSQAVGRSSFYCLEYFPSQMLRTGNNFTFSYTFEEVPFHSSYAHSQSLDRLMNPLIDQYLYYLNRTQNQSGSAQNKDLLFSRGSPAGMSVQPKNWLPGPCYRQQRVSKTKTDNNNSNFTWTGASKYNLNGRESIINPGTAMASHKDDEDKFFPMSGVMIFGKESAGASNTALDNVMITDEEEIKATNPVATERFGTVAVNFQSSSTDPATGDVHAMGALPGMVWQDRDVYLQGPIWAKIPHTDGHFHPSPLMGGFGLKNPPPQILIKNTPVPANPPAEFSATKFASFITQYSTGQVSVEIEWELQKENSKRWNPEVQYTSNYAKSANVDFTVDNNGLYTEPRPIGTRYLTRPL

SEQ ID NO: 269 - DNA, 2208 bp, Adeno-associated virus
atggctgccgatggctatcttccagattggctcgaggacactctctctgaaggaataagacagtggtggaagctcaaacctggcccaccaccaccaaagcccgcagagcggcatagggacgacagcaggggtcttgtgcttcctgggtacaagtacctcggacccttcaacggactcgacaagggagagccggtcaacgaggcagacgccgcggccctcgagcacgacaaagcctacgaccggcagctcgacagcggagacaacccgtacctcaagtacaaccacgccgacgcggagtttcaggagcgccttaaagaagatacgtcttttgggggcaacctcggacgagcagtcttccaggcgaaaaagagggttcttgaacctctgggcctggttgaggaacctgttaagacggctccgggaaaaaagaggccggtagagcactctcctgtggagccagactcctcctcgggaaccggaaaggcgggccagcagcctgcaagaaaaagattgaattttggtcagactggagacgcagactcagtacctgacccccagcctctcggacagccaccagcagccccctctggtctgggaactaatacgatggctacaggcagtggcgcaccaatggcagacaataacgagggcgccgacggagtgggtaattcctcgggaaattggcattgcgattccacatggatgggcgacagagtcatcaccaccagcacccgaacctgggccctgcccacctacaacaaccacctctacaaacaaatttccagccaatcaggagcctcgaacgacaatcactactttggctacagcaccccttgggggtattttgacttcaacagattccactgccacttttcaccacgtgactggcaaagactcatcaacaacaactggggattccgacccaagagactcaacttcaagctctttaacattcaagtcaaagaggtcacgcagaatgacggtacgacgacgattgccaataaccttaccagcacggttcaggtgtttactgactcggggtaccagctcccgtacgtcctcggctcggcgcatcaaggatgcctcccgccgttcccagcagacgtcttcatggtgccacagtatggataccccaccctgaacaacgggagtcaggcagtaggacgctcttcattttactgcctggagtactttccttctcagatgctgcgtaccggaaacaactttaccttcagctacacttttgaggacgttcctttccacagcagctacgctcacagccagagtctggaccgtctcatgaatcctctcatcgaccagtacctgtattacttgagcacaacaaacactccaagtggaaccaccacgcagtcaaggcttcagttttctcaggccggagcgagtgacattcgggaccagtctaggaactggcttcctggaccctgttaccgccagcagcgagtatcaaagacatctgcggataacaacaacagtgaatactcgtggactggagctaccaagtaccacctcaatggcagagactctctggtgaatccgggcccggccgtggcaagccacaaggacgatgaagaaaagttttttcctcagagcggggttctcatctttgggaagcaaggctcagagaaaacaaatgtggacattgaaaaggtcatgattacagacgaagaggaaatcaggacaaccaatcccgtggctacggagcagtatggttctgtatctaccaacctccagagaggcaacagacaagcagctaccgcagatgtcaacacacaaggcgttcttccaggcatggtctggcaggacagagatgtgtaccttcaggggcccatctgggcaaagattccacacacggacggacattttcacccctctcccctcatgggtggattcggacttaaacaccctcctccacagattctcatcaagaacaccccggtacctgcgaatccttcgaccaccttcagtgcggcaaagtttgcttccttcatcacacagtactccacgggacaggtcagcgtggagatcgagtgggagctgcagaaggaaaacagcaaacgctggaatcccgaaattcagtacacttccaactacaacaagtctgttaatgtggactttactgtggacactaatggcgtgtattcagagcctcgccccattggcaccagatacctgactcgtaatctgtaa

SEQ ID NO: 270 - protein, 735 aa, Adeno-associated virus
MAADGYLPDWLEDTLSEGIRQWWKLKPGPPPPKPAERHRDDSRGLVLPGYKYLGPFNGLDKGEPVNEADAAALEHDKAYDRQLDSGDNPYLKYNHADAEFQERLKEDTSFGGNLGRAVFQAKKRVLEPLGLVEEPVKTAPGKKRPVEHSPVEPDSSSGTGKAGQQPARKRLNFGQTGDADSVPDPQPLGQPPAAPSGLGTNTMATGSGAPMADNNEGADGVGNSSGNWHCDSTWMGDRVITTSTRTWALPTYNNHLYKQISSQSGASNDNHYFGYSTPWGYFDFNRFHCHFSPRDWQRLINNNWGFRPKRLNFKLFNIQVKEVTQNDGTTTIANNLTSTVQVFTDSGYQLPYVLGSAHQGCLPPFPADVFMVPQYGYPTLNNGSQAVGRSSFYCLEYFPSQMLRTGNNFTFSYTFEDVPFHSSYAHSQSLDRLMNPLIDQYLYYLSTTNTPSGTTTQSRLQFSQAGASDIRDQSRNWLPGPCYRQQRVSKTSADNNNSEYSWTGATKYHLNGRDSLVNPGPAVASHKDDEEKFFPQSGVLIFGKQGSEKTNVDIEKVMITDEEEIRTTNPVATEQYGSVSTNLQRGNRQAATADVNTQGVLPGMVWQDRDVYLQGPIWAKIPHTDGHFHPSPLMGGFGLKHPPPQILIKNTPVPANPSTTFSAAKFASFITQYSTGQVSVEIEWELQKENSKRWNPEIQYTSNYNKSVNVDFTVDTNGVYSEPRPIGTRYLTRNL

SEQ ID NO: 271 - DNA, 2211 bp, Adeno-associated virus
atggctgccgacggttatcttccagattggctcgaggacactctctctgaaggaataagacagtggtggaagctcaaacctggcccaccaccaccaaagcccgcagagcggcataaggacgacagcaggggtcttgtgcttcctgggtacaagtacctcggacccttcaacggactcgacaagggagagccggtcaacgaggcagacgccgcggccctcgagcacgacaaagcctacgaccggcagctcgacagcggagacaacccgtacctcaagtacaaccacgccgacgcggagtttcaggagcgccttaaagaagatacgtcttttgggggcaacctcgggcgggcagtcttccaggccaagaagcgggttctcgaacctctcggtctggttgaggaaggcgctaagacggctcctggaaagaaacgtccggtagagcagtcgccacaagagccagactccccctcgggcatcggcaagacaggccagcagcccgctaaaaagagactcaattttggtcagactggcgactcagagtcagtccccgatccacaacctctcggagaacctccagcaacccccgctgctgtgggacctactacaatggcttcaggcggtggcgcaccaatggcagacaataacgaaggcgccgacggagtgggtaatgcctcaggaaattggcactgcgattccacatggctgggcgacagagtcatcaccaccagcacccgcacctgggccttgcccacctacaataaccacctctacaagcaaatctccagtgcttcaacgggggccagcaacgacaaccactacttcggctacagcaccccctgggggtattttgatttcaacagattccactgccacttttcaccacgtgactggcagcgactcatcaacaacaattggggattccggcccaagagactcaacttcaaactcttcaacatccaagtcaaggaggtcacgacgaatgatggcgtcacaaccatcgctaataaccttaccagcacggttcaagtcttctcggactcggagtaccagcttccgtacgtcctcggctctgcgcaccagggccgcctccctccgttcccggcggacgtgttcatgattccgcaatacggctacctgacgctcaacaatggcagccaagccgtgggacgttcatcctcttactgcctggaatatttcccttctcagatgctgagaacgggcaacaactttaccttcagctacacctttgaggaagtgcctctccacagcagctgcgcgcacagccagagcctggaccggctgatgaatcctctcatcgaccaatacctgtattacctgaacagaactcaaaatcagtccggaagtgcccaaaacagggacttgctgttcagccgtgggtctccagctggcatgtctgttcagcccaaaaactggctacctggaccctgttatcggcagcagcgcgtttctaaaacaaaaacagacaacaacaacagcaattttacctggactggtgcttcaaaatataacctcaatgggcgtgaatccatcatcaaccctggcactgctatggcctcacacaaagacgacgaagacaagttctttcccatgagcggtgtcatgatttttggaaaagagagcgccggagcttcaaacactgcattggacaatgtcatgattacagacgaagaggaaattaaagccactaaccctgtggccaccgaaagatttgggaccgtggcagtcaatttccagagcagcagcacagaccctgcgaccggagatgtgcatgctatgggagcattacctggcatggtgtggcaagatagagacgtgtacctgcagggtcccatttgggccaaaattcctcacacagatggacactttcacccgtctcctcttatgggcggctttggactcaagaacccgcctcctcagatcctcatcaaaaacacgcctgttcctgcgaatcctccggcggagttttcagctacaaagtttgcttcattcatcacccaatactccgcaggacaagtgagtgtggaaattgaatgggagctgcagaaagaaaacagcaagcgctggaatcccgaagtgcagtacacatccaattatgcaaaatctgccaacgttgattttactgtggacaacaatggactttatactgagcctcgccccattggcacccgttaccttacccgtcccctgtaa

SEQ ID NO: 272 - protein, 736 aa, Adeno-associated virus
MAADGYLPDWLEDTLSEGIRQWWKLKPGPPPPKPAERHKDDSRGLVLPGYKYLGPFNGLDKGEPVNEADAAALEHDKAYDRQLDSGDNPYLKYNHADAEFQERLKEDTSFGGNLGRAVFQAKKRVLEPLGLVEEGAKTAPGKKRPVEQSPQEPDSPSGIGKTGQQPAKKRLNFGQTGDSESVPDPQPLGEPPATPAAVGPTTMASGGGAPMADNNEGADGVGNASGNWHCDSTWLGDRVITTSTRTWALPTYNNHLYKQISSASTGASNDNHYFGYSTPWGYFDFNRFHCHFSPRDWQRLINNNWGFRPKRLNFKLFNIQVKEVTTNDGVTTIANNLTSTVQVFSDSEYQLPYVLGSAHQGRLPPFPADVFMIPQYGYLTLNNGSQAVGRSSSYCLEYFPSQMLRTGNNFTFSYTFEEVPLHSSCAHSQSLDRLMNPLIDQYLYYLNRTQNQSGSAQNRDLLFSRGSPAGMSVQPKNWLPGPCYRQQRVSKTKTDNNNSNFTWTGASKYNLNGRESIINPGTAMASHKDDEDKFFPMSGVMIFGKESAGASNTALDNVMITDEEEIKATNPVATERFGTVAVNFQSSSTDPATGDVHAMGALPGMVWQDRDVYLQGPIWAKIPHTDGHFHPSPLMGGFGLKNPPPQILIKNTPVPANPPAEFSATKFASFITQYSAGQVSVEIEWELQKENSKRWNPEVQYTSNYAKSANVDFTVDNNGLYTEPRPIGTRYLTRPL

SEQ ID NO: 273 - protein, 736 aa, Adeno-associated virus
MAADGYLPDWLEDTLSEGIRQWWKLKPGPPPPKPAERHKDDSRGLVLPGYKYLGPFNGLDKGEPVNEADAAALEHDKAYDRQLDSGDNPYLKYNHADAEFQERLKEDTSFGGNLGRAVFQAKKRVLEPLGLVEEGAKTAPGKKRPVEQSPQEPDSSSGIGKTGQQPAKKRLNFGQTGDSESVPDPQPLGEPPATPAAVGPTTMASGGGAPMADNNEGADGVGNASGNWHCDSTWLGDRVITTSTRTWALPTYNNHLYKQISSASTGASNDNHYFGYSTPWGYFDFNRFHCHFSPRDWQRLINNNWGFRPKRLNFKLFNIQVKEVTTNDGVTTIANNLTSTVQVFSDSEYQLPYVLGSAHQGCLPPFPADVFMIPQYGYLTLNNGSQAVGRSSFYCLEYFPSQMLRTGNNFTFSYTFEEVPLHSSCAHSQSLDRLMNPLIDQYLYYLNRTQNQSGSAQNRDLLFSRGSPAGMSVQPKNWLPGPCYRQQRVSKTKTDNNNSNFTWTGASKYNLNGRESIINPGTAMASHKDDEDKFFPMSGVMIFGKESAGASNTALDNVMITDEEEIKATNPVATERFGTVAVNFQSSSTDPATGDVHAMGALPGMVWQDRDVYLQGPIWAKIPHTDGHFHPSPLMGGFGLKNPPPQILIKNTPVPANPPAEFSATKFASFITQYSTGQVSVEIEWELQKENSKRWNPEVQYTSNYAKSANVDFTVDNNGLYTEPRPIGTRYLTRPL

SEQ ID NO: 274 - DNA, 2208 bp, Adeno-associated virus
atggctgccgatggctatcttccagattggctcgaggacactctctctgaaggaataagacagtggtggaagctcaaacctggcccaccaccaccaaagcccgcagagcggcatagggacgacagcaggggtcttgtgcttcctgggtacaagtacctcggacccttcaacggactcgacaagggagagccggtcaacgaggcagacgccgcggccctcgagcacgacaaagcctacgaccggcagctcgacagcggagacaacccgtacctcaagtacaaccacgccgacgcggagtttcaggagcgccttaaagaagatacgtcttttgggggcaacctcggacgagcagtcttccaggcgaaaaagagggttcttgaacctctgggcctggttggggaacctgttaagacggctccgggaaaaaagaggccggtagagcactctcctgtggagccagactcctcctcgggaaccggaaaggcgggccagcagcctgcaagaaaaagattgaattttggtcagactggagacgcagactcagtacctgacccccagcctctcggacagccaccagcagccccctctggtctgggaactaatacgatggctacaggcagtggcgcaccaatggcagacaataacgagggcgccgacggagtgggtaattcctcgggaaattggcattgcgattccacatggatgggcgacagagtcatcaccaccagcacccgaacctgggccctgcccacctacaacaaccacctctacaaacaaatttccagccaatcaggagcctcgaacgacagtcactactttggctacagcaccccttgggggtattttgacttcaacagattccactgccacttttcaccacgtgactggcaaagactcatcaacaacaactggggattccgacccaagagactcaacttcaagctctttaacattcaagtcaaagaggtcacgcagaatgacggtacgacgacgattgccaataaccttaccagcacggttcaggtgtttactgactcggagtaccagctcccgtacgtcctcggctcggcgcatcaaggatgcctcccgccgttcccagcagacgtcttcatggtgccacagtatggatacctcaccctgaacaacgggagtcaggcagtaggacgctcttcattttactgcctggagtactttccttctcagatgctgcgtaccggaaacaactttaccttcagctacacttttgaggacgttcctttccacagcagctacgctcacagccagagtctggaccgtctcatgaatcctctcatcgaccagtacctgtattacttgagcacaacaaacactccaagtggaaccaccacgcagtcaaggctccagttttctcaggccggagcgagtgacattcgggaccagtctaggaactggcttcctggaccctgttaccgccagcagcgagtatcaaagacatctgcggataacaacaacagtgaatactcgtggactggagctaccaagtaccacctcaatggcagagactctctggtgaatccgggcccggccatggcaagccacaaggacaatgaagaaaagttttttcctcagagcggggttctcatctttgggaagcaaggctcagagaaaacaaatgtggacattgaaaaggtcatgattacagacgaagaggaaatcaggacaaccaatcccgtggctacggagcagtatggttctgtatctaccaacctccagagaggcaacagacaagcagctaccgcagatgtcaacacacaaggcgttcttccaggcatggtctggcaggacagagatgtgtaccttcaggggcccatctgggcaaagattccacacacggacggacattttcacccctctcccctcatgggtggattcggacttaaacaccctcctccacagattctcatcaagaacaccccggtacctgcgaatccttcgaccaccttcagtgcggcaaagtttgcttccttcatcacacagtactccacgggacaggtcagcgtggagatcgagtgggagctgcagaaggaaaacagcaaacgctggaatcccgaaattcagtacacttccaactacaacaagtctgttaatgtggactttactgtggacactaatggcgtgtattcagagcctcgccccattggcaccagatacctgactcgtaatctgtaa

SEQ ID NO: 275 - protein, 735 aa, Adeno-associated virus
MAADGYLPDWLEDTLSEGIRQWWKLKPGPPPPKPAERHRDDSRGLVLPGYKYLGPFNGLDKGEPVNEADAAALEHDKAYDRQLDSGDNPYLKYNHADAEFQERLKEDTSFGGNLGRAVFQAKKRVLEPLGLVGEPVKTAPGKKRPVEHSPVEPDSSSGTGKAGQQPARKRLNFGQTGDADSVPDPQPLGQPPAAPSGLGTNTMATGSGAPMADNNEGADGVGNSSGNWHCDSTWMGDRVITTSTRTWALPTYNNHLYKQISSQSGASNDSHYFGYSTPWGYFDFNRFHCHFSPRDWQRLINNNWGFRPKRLNFKLFNIQVKEVTQNDGTTTIANNLTSTVQVFTDSEYQLPYVLGSAHQGCLPPFPADVFMVPQYGYLTLNNGSQAVGRSSFYCLEYFPSQMLRTGNNFTFSYTFEDVPFHSSYAHSQSLDRLMNPLIDQYLYYLSTTNTPSGTTTQSRLQFSQAGASDIRDQSRNWLPGPCYRQQRVSKTSADNNNSEYSWTGATKYHLNGRDSLVNPGPAMASHKDNEEKFFPQSGVLIFGKQGSEKTNVDIEKVMITDEEEIRTTNPVATEQYGSVSTNLQRGNRQAATADVNTQGVLPGMVWQDRDVYLQGPIWAKIPHTDGHFHPSPLMGGFGLKHPPPQILIKNTPVPANPSTTFSAAKFASFITQYSTGQVSVEIEWELQKENSKRWNPEIQYTSNYNKSVNVDFTVDTNGVYSEPRPIGTRYLTRNL

SEQ ID NO: 276 - protein, 737 aa, Adeno-associated virus
RMAADGYLPDWLEDNLSEGIREWWDLKPGAPKPKANQQKQDDGRGLVLPGYKYLGPFNGLDKGEPVNAADAAALEHDKAYDQQLKAGDNPYLRYNHADAEFQERLQEDTSFGGNLGRAVFQAKKRVLEPLGLVEEGAKTAPGKKRPVEQSPQEPDSSSGIGKTGQQPAKKRLNFGQTGDSESVPDPQPLGEPPATPAAVGPTTMASGGGAPMADNNEGADGVGNASGNWHCDSTWLGDRVITTSTRTWALPTYNNHLYKQISSTSTGASNDNHYFGYGTPWGYFDFNRFHCHFSPRDWQRLINNNWGFRPKRLNFKLFNIQVEEVTTNDGVTTIANNLTSTVQVFSDSEYQLPYVLGSAHQGCLPPFPADVFMIPQYGYLTLNNGSQAVGRSSFYCLEYFPSQMLRTGNNFTFSYTFEEVPFHSSYAHSQSLDRLMNPLIDQYLYYLNRTQNQSGSAQNKDLLFSRGSPAGMSVQPKNWLPGPCYRQQRVSKTKTDNNNSNFTWTGASKYNLNGRESIINPGTAVASHKDDEDKFFPMSGVMIFGKESAGASSTALDNVMITDEEEIKATNPVATERFGTVAVNFQSSSTDPATGDVHAMGALPGMVWQDRDVYLQGPIWAKIPHTDGHFHPSPLMGGFGLKNPPPQILIKNTPVPANPPAEFSATKFASFITQYSTGQVSVEIEWELQKENSKRWNPEVQYTSNYAKSANVDFTVDNNGLYTEPRPIGTRYLTRPL

SEQ ID NO: 277 - protein, 736 aa, Adeno-associated virus
MAADGYLPDWLEDNLSEGIREWWDLKPGAPKPKANQQKQDDGRGLVLPGYKYLGPFNGLDKGEPVNAADAAALEHDKAYDQQLKAGDNPYLRYNHADAEFQERLQEDTSFGGNLGRAVFQAKKRVLEPLGLVEEGAKTAPGKKRPVEQSPQEPDSSSGIGKTGQQPAKKRLNFGQTGDSESVPDPQPLGEPPATPAAVGPTTMASGGGAPMADNNEGADGVGNASGNWHCDSTWLGDRVITTSTRTWALPTYNNHLYKQISSTSTGASNDNHYFGYGTPWGYFDFNRFHCHFSPRDWQRLINNNWGFRPKRLNFKLFNIQVEEVTTNDGVTTIANNLTSTVQVFSDSEYQLPYVLGSAHQGCLPPFPADVFMIPQYGYLTLNNGSQAVGRSSFYCLEYFPSQMLRTGNNFTFSYTFEEVPFHSSYAHSQSLDRLMNPLIDQYLYYLNRTQNQSGSAQNKDLLFSRGSPAGMSVQPKNWLPGPCYRQQRVSKTKTDNNNSNFTWTGASKYNLNGRESIINPGTAVASHKDDEDKFFPMSGVMIFGKESAGASSTALDNVMITDEEEIKATNPVATERFGTVAVNFQSSSTDPATGDVHAMGALPGMVWQDRDVYLQGPIWAKIPHTDGHFHPSPLMGGFGLKNPPPQILIKNTPVPANPPAEFSATKFASFITQYSTGQVSVEIEWELQKENSKRWNPEVQYTSNYAKSANVDFTVDNNGLYTEPRPIGTRYLTRPL

SEQ ID NO: 278 - DNA, 2211 bp, Adeno-associated virus
atggctgccgatggttatcttccagattggctcgaggacaacctctctgagggcattcgcgagtggtgggacttgaaacctggagccccgaagcccaaagccaaccagcaaaagcaggacgacggccggggtctggtgcttcctggctacaagtacctcggacccttcaacggactcgacaagggggagcccgtcaacgcggcggacgcagcggccctcgagcacgacaaggcctacgaccagcagctcaaagcgggtgacaatccgtacctgcggtataaccacgccgacgccgagtttcaggagcgtctgcaagaagatacgtcttttgggggcaacctcgggcgagcagtcttccaggccaagaagcgggttctcgaacctctcggtctggttgaggaaggcgctaagacggctcctggaaagaaacgtccggtagagcagtcgccacaagagccagactcctcctcgggcatcggcaagacaggccagcagcccgctaaaaagagactcaattttggccagactggcgactcagagtcagtccccgatccacaacctctcggagaacctccagcaacccccgctgctgtgggacctactacaatggcttcaggcggtggcgcaccaatggcagacaataacgaaggcgccgacggagtgggtaatgcctcaggaaattggcattgcgattccacatggctgggcgacagagtcatcaccaccagcacccgcacctgggccttgcccacctacaataaccacctctacaagcaaatctccagtacttcaacgggggccagcaacgacaaccactacttcggctacggcaccccctgggggtattttgatttcaacagattccactgccacttttcaccacgtgactggcagcgactcatcaacaacaattggggattccggcccaagagactcaacttcaaactcttcaacatccaagtcgaggaggtcacgacgaatgatggcgtcacaaccatcgctaataaccttaccagcacggttcaagtcttctcggactcggagtaccagcttccgtacgtcctcggctctgcgcaccagggctgcctccctccgttcccggcggacgtgttcatgattccgcaatacggctacctgacgctcaacaatggcagccaagccgtgggacgttcatccttttactgcctggaatatttcccttctcagatgctgagaacgggcaacaactttaccttcagctacacctttgaggaagtgcctttccacagcagctacgcgcacagccagagcctggaccggctgatgaatcctctcatcgaccaatacctgtattacctgaacagaacacaaaatcagtccggaagtgcccaaaacaaggacttgctgtttagccgtgggtctccagctggcatgtctgttcagcccaaaaactggctacctggaccctgttatcggcagcagcgcgtttctaaaacaaaaacagacaacaacaacagcaattttacctggactggtgcttcaaaatataacctcaatgggcgtgaatccatcatcaaccctggcaccgctgtggcctcacacaaagacgacgaagacaagttctttcccatgagcggtgtcatgatttttggaaaagagagcgccggagcttcaagcactgcattggacaatgtcatgattacagacgaagaggaaattaaagccactaaccctgtggccaccgaaagatttgggaccgtggcagtcaatttccagagcagcagcacagaccctgcgaccggagatgtgcatgctatgggagcattacctggcatggtgtggcaagatagagacgtgtacctgcagggtcccatttgggccaaaattcctcacacagatggacactttcacccgtctcctcttatgggcggctttggactcaagaacccgcctcctcagatcctcatcaaaaacacgcctgttcctgcgaatcctccggcggagttttcagctacaaagtttgcttcattcatcacccaatactccacaggacaagtgagtgtggaaattgaatgggagctgcagaaagaaaacagcaagcgctggaatcccgaagtgcagtacacatccaattatgcaaaatctgccaacgttgattttactgtggacaacaatggactttatactgagcctcgccccattggcacccgttaccttacccgtcccctgtaa

SEQ ID NO: 279 - protein, 737 aa, Adeno-associated virus
RMAADGYLPDWLEDNLSEGIREWWDLKPGAPKPKANQQKQDDGRGLVLPGYKYLGPFNGLDKGEPVNAADAAALEHDKAYDQQLKAGDNPYLRYNHADAEFQERLQEDTSFGGNLGRAVFQAKKRVLEPLGLVEEGAKTAPGKKRPVEQSPQEPDSSSGIGKTGQQPAKKRLNFGQTGDSESVPDPQPLGEPPATPAAVGPTTMASGGGAPMADNNEGADGVGNASGNWHCDSTWLGDRVITTSTRTWALPTYNNHLYKQISSTSTGASNDNHYFGYSTPWGYFDFNRFHCHFSPRDWQRLINNNWGFRPKRLNFKLFNIQVEEVTTNDGVTTIANNLTSTVQVFSDSEYQLPYVLGSAHQGCLPPFPADVFMIPQYGYLTLNNGSQAVGRSSFYCLEYFPSQMLRTGNNFTFSYTFEEVPFHSSYAHSQSLDRLMNPLIDQYLYYLNRTQNQSGSAQNKDLLFSRGSPAGMSVQPKNWLPGPCYRQQRVSKTKTDNNNSNFTWTGASKYNLNGRESIINPGTAVASHKDDEDKFFPMSGVMIFGKESAGASSTALDNVMITDEEEIKATNPVATERFGTVAVNFQSSSTDPATGDVHAMGALPGMVWQDRDVYLQGPIWAKIPHTDGHFHPSPLMGGFGLKNPPPQILIKNTPVPANPPAEFSATKFASFITQYSTGQVSVEIEWELQKENSKRWNPEVQYTSNYAKSANVDFTVDNNGLYTEPRPIGTRYLTRPL

SEQ ID NO: 280 - protein, 737 aa, Adeno-associated virus
RMAADGYLPDWLEDNLSEGIREWWDLKPGAPKPKANQQKQDDGRGLVLPGYKYLGPFNGLDKGEPVNAADAAALEHDKAYDQQLKAGDNPYLRYNHADAEFQERLQEDTSFGGNLGRAVFQAKKRVLEPLGLVEEGAKTAPGKKRPVEQSPQEPDSSSGIGKTGQQPAKKRLNFGQTGDSESVPDPQPLGEPPATPAAVGPTTMASGGGAPMADNNEGADGVGNASGNWHCDSTWLGDRVITTSTRTWALPTYNNHLYKQISSTSTGASNDNHYFGYSTPWGYFDFNRFHCHFSPRDWQRLINNNWGFRPKRLNFKLFNIQVKEVTTNDGVTTIANNLTSTVQVFSDSEYQLPYVLGSAHQGCLPPFPADVFMIPQYGYLTLNNGSQAVGRSSFYCLEYFPSQMLRTGNNFTFSYTFEEVPFHSSYAHSQSLDRLMNPLIDQYLYYLNRTQNQSGSAQNKDLLFSRGSPAGMSVQPKNWLPGPCYRQQRVSKTKTDNNNSNFTWTGASKYNLNGRESIINPGTAVASHKDDEDKFFPMSGVMIFGKESAGASSTALDNVMITDEEEIKATNPVATERFGTVAVNFQSSSTDPATGDVHAMGALPGMVWQDRDVYLQGPIWAKIPHTDGHFHPSPLMGGFGLKNPPPQILIKNTPVPANPPAEFSATKFASFITQYSTGQVSVEIEWELQKENSKRWNPEVQYTSNYAKSANVDFTVDNNGLYTEPRPIGTRYLTRPL

SEQ ID NO: 281 - protein, 737 aa, Adeno-associated virus
RMAADGYLPDWLEDNLSEGIREWWDLKPGAPKPKANQQKQDDGRGLVLPGYKYLGPFNGLDKGEPVNAADAAALEHDKAYDQQLKAGDNPYLRYNHADAEFQERLQEDTSFGGNLGRAVFQAKKRVLEPLGLVEEGAKTAPGKKRPVEQSPQEPDSSSGIGKTGQQPAKKRLNFGQTGDSESVPDPQPLGEPPATPAAVGPTTMASGGGAPMADNNEGADGVGNASGNWHCDSTWLGDRVITTSTRTWALPTYNNHLYKQISSTSTGASNDNHYFGYSTPWGYFDFNRFHCHFSPRDWQRLINNNWGFRPKRLNFKLFNIQVKEVTTNDGVTTIANNLTSTVQVFSDSEYQLPYVLGSAHQGCLPPFPADVFMIPQYGYLTLNNGSQAVGRSSFYCLEYFPSQMLRTGNNFTFSYTFEEVPFHSSYAHSQSLDRLMNPLIDQYLYYLNRTQNQSGSAQNKDLLFSRGSPAGMSVQPKNWLPGPCYRQQRVSKTKTDNNNSNFTWTGASKYNLNGRESIINPGTAVASHKDDEDKFFPMSGVMIFGKESAGANSTALDNVMITDEEEIKATNPVATERFGTVAVNFQSSSTDPATGDVHAMGALPGMVWQDRDVYLQGPIWAKIPHTDGHFHPSPLMGGFGLKNPPPQILIKNTPVPANPPAEFSATKFASFITQYSTGQVSVEIEWELQKENSKRWNPEVQYTSNYAKSANVDFTVDNNGLYTEPRPIGTRYLTRPL

SEQ ID NO: 282 - DNA, 2208 bp, Adeno-associated virus
atggctgccgatggttatcttccagattggctcaaggacactctctctgaaggaataagacagtggtggaagctcaaacctggcccaccaccaccaaagcccgcagagcggcataaggacgacagcgggggtcttgtgcttcctgggtacaagtacctcggacccttcaacggactcgacaagggagagccggtcaacgaggcagacgccgcggccctcgagtacgacaaggcctacgaccggcagctcgacagcggagacaacccgtacctcaagtacaaccacgccgacgcggagtttcaggagcgccttaaagaagatacgtcttttgggggcaacctcggacgagcagtcttccaggcgaaaaagagggttcttgaacctctgggcctggttgaggaacctgttaagacggctccgggaaaaaagaggccggtagagcactctcctgtggagccagactcctcctcgggaacaggaaaagcgggccagcagcctgcgagaaagagattgaattttggtcagactggagacgcagactccgtacctgacccccagcctctcggacagccaccagcagccccctctggtctgggaactaatacgatggctacaggcagtggcgcaccaatggcagacaataacgagggcgccgacggagtgggtaattcctcgggaagttggcattgcgattccacatggatgggcgacagagtcatcaccaccagcacccgaacctgggctctgcccacctacaacaaccatctgtacaagcagatctccagccaatcaggagccagcaacgacaaccactactttggctacagcaccccttgggggtattttgacttcaacagattccactgccacttttcaccacgtgactggcaaagactcatcaacaacaactggggattccggcccaagagactcaacttcaagctctttaacattcaagtcaaggaggtcacgcagaatgacggtacgacgacgattgccaataaccttaccagcacggttcaggtgtttactgactcggagtaccagctcccgtacgtccccggctcggcgcatcaaggatgcctcccgccgttcccagcagacgtcttcatggtgccacagtatggatacctcaccctgaacaacgggagtcaggcagtaggacgctcttcattttactgcctggagtactttccttctcagatgcttcgtaccggaaacaactttaccttcagctacacctttgaggatgttcctttccacagcagctacgctcacagccagagtttggaccgtctcatgaatcctctcatcgaccagtacctgtattacttgagcagaacaaacactccaagcggaaccaccacgcagtccaggcttcagttttctcaggccggagcaagtgacattcgggaccagtctaggaactggcttcctggaccctgttaccgccagcagcgagtatcaaagacagctgcggacaacaacaacagtgaatactcgtggactggagctaccaagtaccacctcaatggcagagactctctggtgaatccgggcccggccatggccagccacaaggacgatgaagaaaagttttttcctcaaagcggggttctcatctttgggaagcaaggctcagagaaaacaaatgtggacattgaaaaggtcatgattacagacgaagaggaaatcagaaccaccaatcccgtggccacggagcagtatggttctgtatctaccaacctccagagcggcaacacacaagcagctactgcagatgtcaacacacaaggcgttcttccaggcatggtctggcaggacagagacgtgcacctgcaggggcctatctgggcaaagattccacacacggacggacattttcacccctctcccctcatgggcggatttggacttaaacaccctcctccacagattctcatcaagaacaccccggtacctgcaaatccttcgaccaccttcagtgcggcaaagtttgcttccttcatcacacagtattccacagggcaggtcagcgtggagatcgagtgggagctgcagaaggagaacagcaaacgctggaaccccgagatccagtacacttccaactacaacaaatctgttaatgtggactttactgtggacactaatggtgtgtattcagagcctcgccccattggcaccagatacctgactcgtaatctgtaa

SEQ ID NO: 283 - protein, 735 aa, Adeno-associated virus
MAADGYLPDWLKDTLSEGIRQWWKLKPGPPPPKPAERHKDDSGGLVLPGYKYLGPFNGLDKGEPVNEADAAALEYDKAYDRQLDSGDNPYLKYNHADAEFQERLKEDTSFGGNLGRAVFQAKKRVLEPLGLVEEPVKTAPGKKRPVEHSPVEPDSSSGTGKAGQQPARKRLNFGQTGDADSVPDPQPLGQPPAAPSGLGTNTMATGSGAPMADNNEGADGVGNSSGSWHCDSTWMGDRVITTSTRTWALPTYNNHLYKQISSQSGASNDNHYFGYSTPWGYFDFNRFHCHFSPRDWQRLINNNWGFRPKRLNFKLFNIQVKEVTQNDGTTTIANNLTSTVQVFTDSEYQLPYVPGSAHQGCLPPFPADVFMVPQYGYLTLNNGSQAVGRSSFYCLEYFPSQMLRTGNNFTFSYTFEDVPFHSSYAHSQSLDRLMNPLIDQYLYYLSRTNTPSGTTTQSRLQFSQAGASDIRDQSRNWLPGPCYRQQRVSKTAADNNNSEYSWTGATKYHLNGRDSLVNPGPAMASHKDDEEKFFPQSGVLIFGKQGSEKTNVDIEKVMITDEEEIRTTNPVATEQYGSVSTNLQSGNTQAATADVNTQGVLPGMVWQDRDVHLQGPIWAKIPHTDGHFHPSPLMGGFGLKHPPPQILIKNTPVPANPSTTFSAAKFASFITQYSTGQVSVEIEWELQKENSKRWNPEIQYTSNYNKSVNVDFTVDTNGVYSEPRPIGTRYLTRNL

SEQ ID NO: 284 - DNA, 2208 bp, Adeno-associated virus
atggctgccgatggttatcttccagattggctcgaggacactctctctgaaggaataagacagtggtggaagctcaaacctggcccaccaccaccaaagcccgcagagcggcataaggacgacagcaggggtcttgtgcttcctgggtacaagtacctcggacccttcaacggactcgacaagggggagccggtcaacgaggcagacgccgcggccctcgagcacgacaaggcctacgaccggcagctcgacagcggagacaacccgtacctcaagtacaaccacgccgacgcagagtttcaggagcgccttaaagaagatacgtcttttgggggcaacctcggacgagcagtcttccaggcgaaaaagagggttcttgaacctctgggcctggttgaggaacctgttaagacggctccgggaaaaaagaggccggtagagcactctcctgtggagccagactcctcctcgggaaccggaaaagcgggccagcagcctgcaagaaaaagattaaattttggtcagactggagacgcagactccgtacctgacccccagcctctcggacagccaccagcagccccctctggtctgggatctactacaatggctacaggcagtggcgcaccaatggcagacaataacgagggtgccgatggagtgggtaattcctcaggaaattggcattgcgattcccaatggctgggcgacagagtcatcaccaccagcacccgaacctgggccctgcccacatacaacaaccacctctacaagcaaatctccagccaatcaggagccagcaacgacaaccactactttggctacagcaccccctgggggtattttgacttcaacagattccactgccacttttcaccacgtgactggcaaagactcatcaacaacaactggggattccggcccaaaagactcaacttcaagctctttaatattcaagtcaaagaggtcacgcagaatgacggtacgacgacgattgccaataaccttaccagcacggttcaggtgtttactgactcggagtaccagctcccgtacgtcctgggctcggcgcatcaaggatgcctcccgccgtttccagcggacgtcttcatggtcccacagtatggatacctcaccctgaacaacgggagtcaggcggtaggacgctcttccttttactgcctggagtactttccttctcagatgctgcgtactggaaacaactttcagttcagctacacttttgaagacgtgcctttccacagcagctacgctcacagccagagtctggatcggctgatgaatcctctgatcgaccagtacctgtattatctgaacaagacacaaacaaatagtggaactcttcagcagtctcggctactgtttagccaagctggaccaaccaacatgtctcttcaagctaaaaactggctgcctggaccttgctacagacagcagcgtctgtcaaaacaggcaaacgacaacaacaacagcaactttccctggactgcagctacaaagtatcatctaaatggccgggactcgttggttaatccaggaccagctatggccagtcgcaaggatgacgaagaaaagtttttccccatgcatggaaccctgatatttggtaaacaaggaacaaatgccaacgacgcggatttggaaaatgtcatgattacagatgaagaagaaatcagggccaccaatcccgtggctacggagcagtacgggactgtgtcaaataatttgcaaaactcaaacactggtccaactactggaactgtcaatcaccaaggagcgttacctggtatggtgtggcaggatcgagacgtgtacctgcagggacccatttgggccaagattcctcacaccgatggacactttcatccttctccactgatgggaggttttggactcaaacacccgcctcctcagatcatgatcaaaaacactcccgttccagccaatcctcccacaaacttcagttctgccaagtttgcttctttcatcacacagtattccacgggacaggtcagcgtggagatcgagtgggagctgcagaaggagaacagcaaacgctggaatcccgaaattcagtacacttccaactacaacaagtctgttaatgtggactttactgtggacactaatggtgtgtattcagagcctcgccccattggcaccagatacctgactcgtaatctgtaa

SEQ ID NO: 285 - protein, 735 aa, Adeno-associated virus
MAADGYLPDWLEDTLSEGIRQWWKLKPGPPPPKPAERHKDDSRGLVLPGYKYLGPFNGLDKGEPVNEADAAALEHDKAYDRQLDSGDNPYLKYNHADAEFQERLKEDTSFGGNLGRAVFQAKKRVLEPLGLVEEPVKTAPGKKRPVEHSPVEPDSSSGTGKAGQQPARKRLNFGQTGDADSVPDPQPLGQPPAAPSGLGSTTMATGSGAPMADNNEGADGVGNSSGNWHCDSQWLGDRVITTSTRTWALPTYNNHLYKQISSQSGASNDNHYFGYSTPWGYFDFNRFHCHFSPRDWQRLINNNWGFRPKRLNFKLFNIQVKEVTQNDGTTTIANNLTSTVQVFTDSEYQLPYVLGSAHQGCLPPFPADVFMVPQYGYLTLNNGSQAVGRSSFYCLEYFPSQMLRTGNNFQFSYTFEDVPFHSSYAHSQSLDRLMNPLIDQYLYYLNKTQTNSGTLQQSRLLFSQAGPTNMSLQAKNWLPGPCYRQQRLSKQANDNNNSNFPWTAATKYHLNGRDSLVNPGPAMASRKDDEEKFFPMHGTLIFGKQGTNANDADLENVMITDEEEIRATNPVATEQYGTVSNNLQNSNTGPTTGTVNHQGALPGMVWQDRDVYLQGPIWAKIPHTDGHFHPSPLMGGFGLKHPPPQIMIKNTPVPANPPTNFSSAKFASFITQYSTGQVSVEIEWELQKENSKRWNPEIQYTSNYNKSVNVDFTVDTNGVYSEPRPIGTRYLTRNL

SEQ ID NO: 286 - DNA, 2208 bp, Adeno-associated virus
atggctgccgatggttatcttccagattggctcgaggacactctctctgaaggaataagacagtggtggaagctcaaacctggcccaccaccaccaaagcccgcagagcggcataaggacgacagcaggggtcttgtgcttcctgggtacaagtacctcggacccttcaacggactcgacaagggagagccggtcaacgaggcagacgccgcggccctcgagcacgacaaagcctacgaccggcagctcgacagcggagacaacccgtacctcaagtacaaccacgccgacgcggagtttcaggagcgccttaaagaagatacgtcttttgggggcaacctcggacgagcagtcttccaggcgaaaaagagggttcttgaacctctgggcctggttggggaacctgtcaagacggctccaggaaaaaagaggccggtagagcactctcctgtggagccagactcctcctcgggaaccggaaaggcgggccagcagcctgcaagaaaaagattgaattttggtcagactggagacgcagactcagtacctgacccccagcctctcggacagccaccagcagccccctctggtctgggaactaatacgatggctacaggcagtggcgcaccaatggcagacaataacgagggcgccgacggagtgggtaattcctcgggaaattggcattgcgattccacatggatgggcgacagagtcatcaccaccagcacccgaacctgggccctgcccacctacaacaaccacctctacaaacaaatttccagccaatcaggagcctcgaacgacaatcactactttggctacagcaccccttgggggtattttgacttcaacagattccactgccacttttcaccacgtgactggcaaagactcatcaacaacaactggggattccgacccaagagactcaacttcaagctctttaacattcaagtcaaagaggtcacgcagaatgacggtacgacgacgattgccaataaccttaccagcacggttcaggtgtttactgactcggagtaccagctcccgtacgtcctcggctcggcgcatcaaggatgcctcccgccgttcccagcagacgtcttcatggtgccacagtatggatacctcaccctgaacaacgggagtcaggcagtaggacgctcttcattttactgcctggagtactttccttctcagatgctgcgtaccggaaacaactttaccttcagctacacttttgaggacgttcctttccacagcggctacgctcacagccagagtctggaccgtctcatgaatcctctcatcgaccagtacctgtattacttgagcacaacaaacactccaagtggaaccaccacgcagtcaaggcttcagttttctcaggccggagcgagtgacattcgggaccagtctaggaactggcttcctggaccctgttaccgccagcagcgagtatcaaagacatctgcggataacaacaacagtgaatactcgtggactggagctaccaagtaccacctcaatggcagagactctctggtgaatccgggcccggccatggcaagccacaaggacaatgaagaaaagttttttcctcagagcggggttctcatctttgggaagcaaggctcagagaaaacaaatgtggacattgaaaaggtcatgattacagacgaagaggaaatcaggacaaccaatcccgtggctacggagcagtacggttctgtatctaccaacctccagagaggcaacagacaagcagctaccgcagatgtcaacacacaaggcgttcttccaggcatggtctggcaggacagagatgtgtaccttcaggggcccatctgggcaaagattccacacacggacggacattttcacccctctcccctcatgggtggattcggacttaaacaccctcctccacagattctcatcaagaacaccccggtacctgcgaatccttcgaccaccttcagtgcggcaaagtttgcttccttcatcacacagtactccacgggacaggtcagcgtggagatcgagtgggagctgcagaaggaaaacagcaaacgctggaatcccgaaattcagtacacttccaactacaacaagtctgttaatgtggactttactgtggacactaatggcgtgtattcagagcctcgccccattggcaccagatacctgactcgtaatctgtaa

SEQ ID NO: 287 - protein, 735 aa, Adeno-associated virus
MAADGYLPDWLEDTLSEGIRQWWKLKPGPPPPKPAERHKDDSRGLVLPGYKYLGPFNGLDKGEPVNEADAAALEHDKAYDRQLDSGDNPYLKYNHADAEFQERLKEDTSFGGNLGRAVFQAKKRVLEPLGLVGEPVKTAPGKKRPVEHSPVEPDSSSGTGKAGQQPARKRLNFGQTGDADSVPDPQPLGQPPAAPSGLGTNTMATGSGAPMADNNEGADGVGNSSGNWHCDSTWMGDRVITTSTRTWALPTYNNHLYKQISSQSGASNDNHYFGYSTPWGYFDFNRFHCHFSPRDWQRLINNNWGFRPKRLNFKLFNIQVKEVTQNDGTTTIANNLTSTVQVFTDSEYQLPYVLGSAHQGCLPPFPADVFMVPQYGYLTLNNGSQAVGRSSFYCLEYFPSQMLRTGNNFTFSYTFEDVPFHSGYAHSQSLDRLMNPLIDQYLYYLSTTNTPSGTTTQSRLQFSQAGASDIRDQSRNWLPGPCYRQQRVSKTSADNNNSEYSWTGATKYHLNGRDSLVNPGPAMASHKDNEEKFFPQSGVLIFGKQGSEKTNVDIEKVMITDEEEIRTTNPVATEQYGSVSTNLQRGNRQAATADVNTQGVLPGMVWQDRDVYLQGPIWAKIPHTDGHFHPSPLMGGFGLKHPPPQILIKNTPVPANPSTTFSAAKFASFITQYSTGQVSVEIEWELQKENSKRWNPEIQYTSNYNKSVNVDFTVDTNGVYSEPRPIGTRYLTRNL

SEQ ID NO: 288 - DNA, 2208 bp, Adeno-associated virus
atggctgccgatggttatcttccagattggctcgaggacactctctctgaaggaataagacagtggtggaagctcaaacctggcccaccaccaccaaagcccgcagagcggcataaggacgacagcaggggtcttgtgcttcctgggtacaagtacctcggacccttcaacggactcgacaagggagagccggtcaacgaggcagacgccgcggccctcgagcacgacaaagcctacgaccggcagctcgacagcggagacaacccgtacctcaagtacaaccacgccgacgcggagtttcaggagcgccttaaagaagatacgtcttttgggggcaacctcggacgagcagtcttccaggcgaaaaagagggttcttgaacctctgggcctggttggggaacctgttaagacggctccgggaaaaaagaggccggtagagcactctcctgtggagccagactcctcctcgggaaccggaaaggcgggccagcagcctgcaagaaaaagattgaattttggtcagactggagacgcagactcagtacctgacccccagcctctcggacagccaccagcagccccctctggtctgggaactaatacgatggctacaggcagtggcgcaccaatggcagacaataacgagggcgccgacggagtgggtaattcctcgggaaatcggcattgcgattccacatggatgggcgacagagtcatcaccaccagcacccgaacctgggccctgcccacctacaacaaccacctctacagacaaatttccagccaatcaggagcctcgaacgacaatcactactttggctacagcaccccttgggggtattttgacttcaacagattccactgccacttttcaccacgtgactggcaaagactcatcaacaacaactggggattccgacccaagagactcaacttcaagctctttaacattcaagtcaaagaggtcacgcagaatgacggtacgacgacgattgccaataaccttaccagcacggttcaggtgtttactgactcggagtaccagctcccgtacgtcctcggctcggcgcatcaaggatgcctcccgccgttcccagcagacgtcttcatggtgccacagtatggatacctcaccctgagcaacgggagtcaggcagtaggacgctcttcattttactgcccggagtactttccttctcagatgctgcgtaccggaaacaactttaccttcagctacacttttgaggacgttcctttccacagcagctacgctcacagccagagtctggaccgtctcatgaatcctctcatcgaccagtacctgtattacttgagcacaacaaacactccaagtggaaccaccacgcagtcaaggcttcagttttctcaggccggagcgagtgacattcgggaccagtctaggaactggcttcctggaccctgttaccgccagcagcgagtatcaaagacatctgcggataacaacaacagtgaatactcgtggactggagctaccaagtaccacctcaatggcagagactctctggtgaatccgggcccggccatggcaagccacaaggacaatgaagaaaagttttttcctcagagcggggttctcatctttgggaagcaaggctcagagaaaacaaatgtggacattgaaaaggtcatgattacagacgaagaggaaatcaggacaaccaatcccgtggctacggagcagtatggttctgtatctaccaacctccagagaggcaacagacaagcagctaccgcagatgtcaacacacaaggcgttcttccaggcatggtctggcaggacagagatgtgtaccttcaggggcccatctgggcaaagattccacacacggacggacattttcacccctctcccctcatgggtggattcggacctaaacaccctcctccacagattctcatcaagaacaccccggtacctgcgaatccttcgaccaccttcagtgcggcaaagtttgcttccttcatcacacagtactccacgggacaggtcagcgtggagatcgagtgggagctgcagaaggaaaacagcaaacgctggaatcccgaaattcagtacacttccaactacaacaagtctgttaatgtggactttactgtggacactaatggcgtgtattcagagcctcgccccattggcaccagatacctgactcgtaatttgtaa

SEQ ID NO: 289 - protein, 735 aa, Adeno-associated virus
MAADGYLPDWLEDTLSEGIRQWWKLKPGPPPPKPAERHKDDSRGLVLPGYKYLGPFNGLDKGEPVNEADAAALEHDKAYDRQLDSGDNPYLKYNHADAEFQERLKEDTSFGGNLGRAVFQAKKRVLEPLGLVGEPVKTAPGKKRPVEHSPVEPDSSSGTGKAGQQPARKRLNFGQTGDADSVPDPQPLGQPPAAPSGLGTNTMATGSGAPMADNNEGADGVGNSSGNRHCDSTWMGDRVITTSTRTWALPTYNNHLYRQISSQSGASNDNHYFGYSTPWGYFDFNRFHCHFSPRDWQRLINNNWGFRPKRLNFKLFNIQVKEVTQNDGTTTIANNLTSTVQVFTDSEYQLPYVLGSAHQGCLPPFPADVFMVPQYGYLTLSNGSQAVGRSSFYCPEYFPSQMLRTGNNFTFSYTFEDVPFHSSYAHSQSLDRLMNPLIDQYLYYLSTTNTPSGTTTQSRLQFSQAGASDIRDQSRNWLPGPCYRQQRVSKTSADNNNSEYSWTGATKYHLNGRDSLVNPGPAMASHKDNEEKFFPQSGVLIFGKQGSEKTNVDIEKVMITDEEEIRTTNPVATEQYGSVSTNLQRGNRQAATADVNTQGVLPGMVWQDRDVYLQGPIWAKIPHTDGHFHPSPLMGGFGPKHPPPQILIKNTPVPANPSTTFSAAKFASFITQYSTGQVSVEIEWELQKENSKRWNPEIQYTSNYNKSVNVDFTVDTNGVYSEPRPIGTRYLTRNL

SEQ ID NO: 290 - DNA, 2205 bp, Adeno-associated virus
atggctgccgatggttatcttccagattggctcgaggacactctctctgaaggaataagacagtggtggaagctcaaacctggcccaccaccaccaaagcccgcagagcggcataaggacgacagcaggggtcttgtgcttcctgggtacaagtacctcggacccttcaacggactcgacaagggagagccggtcaacgaggcagacgccgcggccctcgagcacgacaaggcctacgaccggcagctcgacagcggagacaacccgtacctcaagtacaaccacgccgacgcggagtttcaggagcgtcttaaagaagatacgtcttttgggggcaacctcggacgagcagtcttccaggcgaaaaagagggttcttgaacctctgggcctggttgaggaacctgttaagacggctccgggaaaaaagaggccggtagagcactctcctgcggagccagactcctcctcgggaaccggaaaagcgggccagcagcctgcaagaaaaagactgaatttcggtcagactggagacgcagactccgtacctgacccccagcctctcagacagccaccagcagcccccacaagtttgggatctactacaatggctacaggcagtggcgcaccaatggcagacaataacgagggtgccgatggagtgggtaattcctcaggaaattggcattgcgattcccaatggctgggcgacagagtcatcaccaccagcacccgaacctgggccctgcccacctacaacaaccacctttacaagcaaatctccagccaatcaggagcctcaaacgacaaccactactttggctacagcaccccctgggggtattttgacttcaacagattccactgccacttttcaccacgtgactggcaaagactcatcaacaacaactggggattccgacccaagagactcaacttcaagctctttaacattcaagtcaaagaggtcacgcagaatgacggtacgacgacgattgccaataaccttaccagcacggttcaggtgtttactgactcggagtaccagctcccgtacgtcctcggctcggcgcatcaaggatgcctcccgccgtttccagcggacgtcttcatggtcccacagtatggatacctcaccctgaacaacgggagtcaggcggtaggacgctcttccttttactgcctggagtactttccttctcagatgctgcgtactggaaacaactttcagttcagctacacttttgaagacgtgcctttccacagcagctacgctcacagccagagtttggatcggctgatgaatcctctgatcgaccagtacctgtattatctaaacagaacacaaacagctagtggaactcagcagtctcggctactgtttagccaagctggacccacaagcatgtctcttcaagctaaaaactggctgcctggaccgtgttatcgccagcagcgtttgtcaaagcaggcaaacgacaacaacaacagcaactttccctggactggagctaccaagtactacctcaatggcagagactctttggtgaacccgggcccggccatggccagccacaaggacgatgaagaaaagtttttccccatgcatggaaccctaatatttggtaaagaaggaacaaatgctaccaacgcggaattggaaaatgtcatgattacagatgaagaggaaatcaggaccaccaatcccgtggctacagagcagtacggatatgtgtcaaataatttgcaaaactcaaatactgctgcaagtactgaaactgtgaatcaccaaggagcattacctggtatggtgtggcaggatcgagacgtgtacctgcagggacccatttgggccaagattcctcacaccgatggacactttcatccttctccactgatgggaggttttggactcaaacacccgcctcctcagattatgatcaaaaacactcccgttccagccaatcctcccacaaacttcagttctgccaagtttgcttccttcatcacacagtattccacgggacaggtcagcgtggagatcgagtgggagctgcagaaggagaacagcaaacgctggaatcccgaaattcagtacacttccaactacaacaaatctgttaatgtggactttactgtggacactaatggtgtgtattcagagcctcgccccattggcaccagatacctgactcgtaatctgtaa

SEQ ID NO: 291 - protein, 734 aa, Adeno-associated virus
MAADGYLPDWLEDTLSEGIRQWWKLKPGPPPPKPAERHKDDSRGLVLPGYKYLGPFNGLDKGEPVNEADAAALEHDKAYDRQLDSGDNPYLKYNHADAEFQERLKEDTSFGGNLGRAVFQAKKRVLEPLGLVEEPVKTAPGKKRPVEHSPAEPDSSSGTGKAGQQPARKRLNFGQTGDADSVPDPQPLRQPPAAPTSLGSTTMATGSGAPMADNNEGADGVGNSSGNWHCDSQWLGDRVITTSTRTWALPTYNNHLYKQISSQSGASNDNHYFGYSTPWGYFDFNRFHCHFSPRDWQRLINNNWGFRPKRLNFKLFNIQVKEVTQNDGTTTIANNLTSTVQVFTDSEYQLPYVLGSAHQGCLPPFPADVFMVPQYGYLTLNNGSQAVGRSSFYCLEYFPSQMLRTGNNFQFSYTFEDVPFHSSYAHSQSLDRLMNPLIDQYLYYLNRTQTASGTQQSRLLFSQAGPTSMSLQAKNWLPGPCYRQQRLSKQANDNNNSNFPWTGATKYYLNGRDSLVNPGPAMASHKDDEEKFFPMHGTLIFGKEGTNATNAELENVMITDEEEIRTTNPVATEQYGYVSNNLQNSNTAASTETVNHQGALPGMVWQDRDVYLQGPIWAKIPHTDGHFHPSPLMGGFGLKHPPPQIMIKNTPVPANPPTNFSSAKFASFITQYSTGQVSVEIEWELQKENSKRWNPEIQYTSNYNKSVNVDFTVDTNGVYSEPRPIGTRYLTRNL

SEQ ID NO: 292 - DNA, 3160 bp, Adeno-associated virus
acccttcactaaagggactagtcctgcaggtttaaacgaattcgcccttgctgcgtcaactggaccaatgagaactttcccttcaacgactgtgtcgacaagatggtgatttggtgggaggaggggaagatgaccgccaaggtcgtggagtcggccaaagccattctcggaggaagcaaggtgcgcgtggaccagaaatgcaagtcctcggcccagatagatccgactcccgtgatcgtcacctccaacaccaacatgtgcgccgtgattgacgggaactcaacgaccttcgaacaccagcagccgttgcaagaccggatgttcaaatttgaactcacccgccgtctggatcatgactttgggaaggtcaccaagcgggaagtcaaagactttttccggtgggcaaaggatcacgtggttgaggtggagcatgaattctacgtcaaaaagggtggagccaagaaaagacccgcccctagtgacgcagatataagtgagcccaaacgggtgcgcgagtcagttgcgcagccatcgacgtcagacgcggaagcttcgatcaactacgcggacaggtaccaaaacaaatgttctcgtcacgtgggcatgaatctgatgctgtttccctgcagacaatgcgagagaatgaatcaaaattcaaatatctgcttcactcacggacagaaagactgtttagagtgctttcccgtgtcagaatctcaacctgtttctgtcgtcaaaaaggcgtatcagaaactgtgctacattcatcatatcatgggaaaggtgccagacgcttgcactgcctgcgatctggtcaatgtggatttggatgactgcatctctgaacaataaatgatttaaatcaggtatggctgccgatggttatcttccagattggctcgaggacactctctctgaaggaataagacagtggtggaagctcaaacctggcccaccaccaccaaagcccgcagagcggcataaggacgacagcaggggtcttgtgcttcctgggtacaagtacctcggacccttcaacggactcgacaagggagagccggtcaacgaggcagacgccgcggccctcgagcacgacaaggcctacgaccggcagctcgacagcggagacaacccgtacctcaagtacaaccacgccgacgcggagtttcaggagcgtcttaaagaagatacgtcttttgggggcaacctcggacgagcagtcttccaggcgaaaaagagggttcttgaacctctgggcctggttgaggaacctgttaagacggctccgggaaaaaagaggccggtagagcactctcctgcggagccagactcctcctcgggaaccggaaaagcgggccagcagcctgcaagaaaaagactgaatttcggtcagactggagacgcagactccgtacctgacccccagcctctcagacagccaccagcagcccccacaagtttgggatctactacaatggctacaggcagtggcgcaccaatggcagacaataacgagggtgccgatggagtgggtaattcctcaggaaattggcattgcgattcccaatggctgggcgacagagtcatcaccaccagcacccgaacctgggccctgcccacctacaacaaccacctttacaagcaaatctccagccaatcaggagcctcaaacgacaaccactactttggctacagcaccccctgggggtattttgacttcaacagattccactgccacttttcaccacgtgactggcaaagactcatcaacaacaactggggattccgacccaagagactcaacttcaagctctttaacattcaagtcaaagaggtcacgcagaatgacggtacgacgacgattgccaataaccttaccagcacggttcaggtgtttactgactcggagtaccagctcccgtacgtcctcggctcggcgcatcaaggatgcctcccgccgtttccagcggacgtcttcatggtcccacagtatggatacctcaccctgaacaacgggagtcaggcggtaggacgctcttccttttactgcctggagtactttccttctcagatgctgcgtactggaaacaactttcagttcagctacacttttgaagacgtgcctttccacagcagctacgctcacagccagagtttggatcggctgatgaatcctctgatcgaccagtacctgtattatctaaacagaacacaaacagctagtggaactcagcagtctcggctactgtttagccaagctggacccacaagcatgtctcttcaagctaaaaactggctgcctggaccgtgttatcgccagcagcgtttgtcaaagcaggcaaacgacaacaacaacagcaactttccctggactggagctaccaagtactacctcaatggcagagactctttggtgaacccgggcccggccatggccagccacaaggacgatgaagaaaagtttttccccatgcatggaaccctaatatttggtaaagaaggaacaaatgctaccaacgcggaattggaaaatgtcatgattacagatgaagaggaaatcaggaccaccaatcccgtggctacagagcagtacggatatgtgtcaaataatttgcaaaactcaaatactgctgcaagtactgaaactgtgaatcaccaaggagcattacctggtatggtgtggcaggatcgagacgtgtacctgcagggacccatttgggccaagattcctcacaccgatggacactttcatccttctccactgatgggaggttttggactcaaacacccgcctcctcagattatgatcaaaaacactcccgttccagccaatcctcccacaaacttcagttctgccaagtttgcttccttcatcacacagtattccacgggacaggtcagcgtggagatcgagtgggagctgcagaaggagaacagcaaacgctggaatcccgaaattcagtacacttccaactacaacaaatctgttaatgtggactttactgtggacactaatggtgtgtattcagagcctcgccccattggcaccagatacctgactcgtaatctgtaattgcttgttaatcaataaaccgtttaattcgtttcagttgaactttggtctctgcgaagggcgaattcgcggccgctaaatcaatcg

SEQ ID NO: 293 - protein, 734 aa, Adeno-associated virus
MAADGYLPDWLEDTLSEGIRQWWKLKPGPPPPKPAERHKDDSRGLVLPGYKYLGPFNGLDKGEPVNEADAAALEHDKAYDRQLDSGDNPYLKYNHADAEFQERLKEDTSFGGNLGRAVFQAKKRVLEPLGLVEEPVKTAPGKKRPVEHSPAEPDSSSGTGKAGQQPARKRLNFGQTGDADSVPDPQPLGQPPAAPTSLGSTTMATGSGAPMADNNEGADGVGNSSGNWHCDSQWLGDRVITTSTRTWALPTYNNHLYKQISSQSGASNDNHYFGYSTPWGYFDFNRFHCRFSPRDWQRLINNNWGFRPKRLNFKLFNIQVKEVTQNDGTTTIANNLTSTVQVFTDSEYQLPYVLGSAHQGCLPPFPADVFMVPQYGYLTLNNGSQAVGRSSFYCLEYFPSQMLRTGNNFQFSYTFEDVPFHSSYAHSQGLDRLMNPLIDQYLYYLNRTQTASGTQQSRLLFSQAGPTSMSLQAKNWLPGPCYRQQRLSKQANDNNNSNFPWTGATKYHLNGGDSLVNPGPAMASHKDDEEKFFPMHGTLIFGKEGTNATNAELENVMITDEEEIRTTNPVATEQYGYVSNNLQNSNTAASTETVNHQGALPGMVWQDRDVYLRGPIWAKIPHADGHFHPSPLMGGFGLKHPPPQIMIKNTPVPANPPTNFSSAKFASFITQYSTGQVSVEIEWELQKENSKRWNPEIQYTSNYNKSVNVDFTVDTNGVYSEPRPIGTRYLTRNL

SEQ ID NO: 294 - DNA, 3157 bp, Adeno-associated virus
ctcactaagggactagtcctgcaggtttaaacgaattcgcccttgctgcgtcaactggaccaatgagaactttcccttcaacgactgtgtcgacaagatggtgatttggtgggaggaggggaagatgaccgccaaggtcgtggagtcggccaaagccactctcggaggaagcaaggtgcgcgtggaccagaaacgcaagtcctcggcccagatagatccgactcccgtgatcgtcacctccaacaccaacatgtgcgccgtgattgacgggaactcaacgaccttcgaacaccagcagccgttgcaagaccgaatgttcaaatttgaactcacccgccgtctggatcatgacttcgggaaggtcaccaagcaggaagtcaaagactttttccggtgggcaaaggatcacgtggttgaggtggagcatgaattctacgtcaaaaagggtggagccaagaaaagacccgcccctagtgacgcagatataagtgagcccaaacgggtgcgcgagtcagttgcgcagccatcgacgtcagacgcggaagcttcgatcaactacgcggacaggtaccaaaacaaatgttctcgtcacgtgggcatgaatctgatgctgtttccctgcagacaatgcgagagaatgaatcaaaattcaaatatctgcttcactcacggacagaaagactgtttagagtgctttcccgtgtcagaatctcaacctgtttctgtcgtcaaaaaggcgtatcagaaactgtgctacattcatcatatcatgggaaaggtgccagacgcttgcactgcctgcgatctggtcaatgtggatttggatgactgcatctctgaacaataaatgatttaaatcaggtatggctgccgatggttatcttccagattggctcgaggacactctctctgaaggaataagacagtggtggaagctcaaacctggcccaccaccaccaaagcccgcagagcggcataaggacgacagcaggggtcttgtgcttcctgggtacaagtacctcggacccttcaacggactcgacaagggagagccggtcaacgaggcagacgccgcggctctcgagcacgacaaggcctacgaccggcagctcgacagcggagacaacccgtacctcaagtacaaccacgccgacgcggagtttcaggagcgtcttaaagaagatacgtcttttgggggcaacctcggacgagcagtcttccaggcgaaaaagagggttcttgaacctctgggcctggttgaggaacctgttaagacggctccgggaaaaaagaggccggtagagcactctcctgcggagccagactcctcctcgggaaccggaaaagcgggccagcagcctgcaagaaaaagactgaatttcggtcagactggagacgcagactccgtacctgacccccagcctctcggacagccaccagcagcccccacaagtttgggatctactacaatggctacaggcagtggcgcaccaatggcagacaataacgagggtgccgatggagtgggtaattcctcaggaaattggcattgcgattcccaatggctgggcgacagagtcatcaccaccagcacccgaacctgggccctgcccacctacaacaaccacctttacaagcaaatctccagccaatcaggagcctcaaacgacaaccactactttggctacagcaccccctgggggtattttgacttcaacagattccactgccgcttttcaccacgtgactggcaaagactcatcaacaacaactggggattccgacccaagagactcaacttcaagctctttaacattcaagtcaaagaggtcacgcagaatgacggtacgacgacgattgccaataaccttaccagcacggttcaggtgtttactgactcggagtaccagctcccgtacgtcctcggctcggcgcatcaaggatgcctcccgccgtttccagcggacgtcttcatggtcccacagtatggatacctcaccctgaacaacgggagtcaggcggtaggacgctcttccttttactgcctggagtactttccttctcagatgctgcgtactggaaacaactttcagttcagctacacttttgaagacgtgcctttccacagcagctacgctcacagccagggtttggatcggctgatgaatcctctgatcgaccagtacctgtattatctaaacagaacacaaacagctagtggaactcagcagtctcggctactgtttagccaagctggacccacaagcatgtctcttcaagctaaaaactggctgcctggaccgtgttatcgccagcagcgtttgtcaaagcaggcaaacgacaacaacaacagcaactttccctggactggagctaccaagtaccacctcaatggcggagactctttggtgaacccgggcccggccatggccagccacaaggacgatgaagaaaagtttttccccatgcatggaaccctaatatttggtaaagaaggaacaaatgctaccaacgcggaattggaaaatgtcatgattacagatgaagaggaaatcaggaccaccaatcccgtggctacagagcagtacggatatgtgtcaaataatttgcaaaactcaaatactgctgcaagtactgaaactgtgaatcaccaaggagcattacctggtatggtgtggcaggatcgagacgtgtacctgcggggacccatttgggccaagattcctcacgccgatggacactttcatccttctccactgatgggaggttttggactcaaacacccgcctcctcagattatgatcaaaaacactcccgttccagccaatcctcccacaaacttcagttctgccaagtttgcttccttcatcacacagtattccacgggacaggtcagcgtggagatcgagtgggagctgcagaaggagaacagcaaacgctggaatcccgaaattcagtacacttccaactacaacaaatctgttaatgtggactttactgtggacactaatggtgtgtattcagagcctcgccccattggcaccagatacctgactcgtaatctgtaattgcttgttaatcaataaaccgtttaattcgtttcagttgaactttggtctctgcgaagggcgaattcgcggccgctaaattcaattcg

SEQ ID NO: 295 - protein, 734 aa, Adeno-associated virus
MAADGYLPDWLEDTLSEGIRQWWKLKPGPPPPKPAERHKDDSRGLVLPGYKYLGPFNGLDKGEPVNEADAAALEHDKAYDRQLDSGDNPYLKYNHADAEFQERLKEDTSFGGNLGRAVFQAKKRVLEPLGLVEEPVKTAPGKKRPVEHSPAEPDSSSGTGKAGQQPARKRLNFGQTGDADSVPDPQPLGQPPAAPTSLGSTTMATGSGAPMADNNEGADGVGNSSGNWHCDSQWLGDRVITTSTRTWALPTYNNHLYKQISSQSGASNDNHYFGYSTPWGYFDFNRFHCHFSPRDWQRLINNNWGFRPKRLNFKLFNIQVKEVTQNDGTTTIANNLTSTVQVFTDSEYQLPYVLGSAHQGCLPPFPADVFMVPQYGYLTLNNGSQAVGRSSFYCLECFPSQMLRTGNNFQFSYTFEDVPFHSSYAHSQSLDRLMNPLIDQYLYYLNRTQTASGTQQSRLLFSQAGPTSMSLQAKNWLPGPCYRQQRLSKQANDNNNSNFPWTGATKYHLNGRDSLVNPGPAMASHKDDEEKFFPMHGTLIFGKEGTNATNAELENVMITDEEEIRTTNPVATEQYGYVSNNLQNSNTAASTETVNHQGALPGMVWQDRDVYLQGPIWAKIPHTDGHFHPSPLMGGFGLKHPPPQIMIKNTPVPANPPTNFSSAKFASFITQYSTGQVSVEIEWELQKENSKRWNPEIQYTSNYNKSVNVDFTVDTNGVYSEPRPIGTRYLTRNL

SEQ ID NO: 296 - DNA, 2208 bp, Adeno-associated virus
atggctgccgatggttatcttccagattggctcgaggacactctctctgaaggaataagacagtggtggaagctcaaacctggcccaccaccaccaaagcccgcagagcggcataaggacgacagcaggggtcttgtgcttcctggatacaagtacctcggacccttcaacggactcgacaagggagagccggtcaacgaggcagacgccgcggccctcgagcacgacaaggcctacgaccggcagctcgacagcggagacaacccgtacctcaagtacaaccacgccgacgcggagtttcaggagcgccttaaagaagatacgtcttttgggggcaacctcggacgagcagtcttccaggcgaaaaagagggttcttgaacctctgggcctggttgaggaacctgttaagacggctccgggaaaaaagaggccggtagagcactctcctgtggagccagactcctcctcgggaaccggaaaagcgggcaaccagcctgcaagaaaaagattgaatttcggtcagactggagacgcagactccgtacctgacccccagcctctcggacagccaccagcatccccctctggtctgggaactaatacgatggctacaggcagtggcgcaccaatggcagacaataacgagggcgccgacggagtgggtaattcctcgggaaattggcattgcgattccacatggatgggcgacagagtcgtcaccaccagcacccgcacctgggccctgcccacctacaacaaccacctctacaagcagatttccagccaatcaggagccagcaacgacaaccactactttggctacagcaccccttgggggtattttgacttcaacagattccactgccacttttcgccacgcgactggcagagactcatcaacaacaactggggattccggcccaaaagactcaacttcaagctgtttaacattcaagtcaaggaggtcacgcagaatgacggtacgacgacgattgccaataaccttaccagcacggttcaggtgtttactgacttggagtaccagctcccgtacgtcctcggctcggcgcatcaaggatgcctcccgccgttcccagcagacgtcttcatggtgccacagtatggatacctcaccctgaacaacgggagtcaggcggtaggacgctcttccttttactgcctggagtactttccttctcagatgcttcgcaccggaaacaactttaccttcagctacacttttgaagacgttcctttccacagcagctacgctcacagtcaaagtctggaccgtctcatgaatcctctcatcgaccagtacctgtattacttgagcagaacaaacactccaagcggaaccactacgcagtccaggcttcagttttctcaggccggagcgagtgacattcgggaccagtctaggaactggcttcctggaccctgttaccgccagcagcgagtatcaaagacagctgcggataacaacaacagtgaatactcgtggactggagctaccaagtaccacctcaatggcagagactctctggtgaatccgggcccggccatggccagccacaaggacgatgaagaaaagttttttcctcaaagcggggttctcatctttgggaagcaaggctcagagaaaacaaatgtggacattgaaaaggtcatgattacagacgaagaggaaatcaggaccaccaatcccgtggctacggagcagtatggttctgtatctaccaacctccagagcggcaacacacaagcagctacctcagatgtcaacacacaaggcgttcttccaggcatggtctggcaggacagagacgtgtacctgcaggggcccatctgggcaaaaattccacacacggacggacattttcacccctctcccctcatgggcggatttggacttaaacaccctcctccacagattctcattaagaataccccggtacctgcgaatccttcgaccaccttcagcgcggcaaagtttgcttccttcatcacacagtattccacggggcaggtcagcgtggagatcgagtgggagctgcagaaggagaacagcaaacgctggaatcccgaaattcagtacacttccaactacaacaaatctgttaatgtggactttactgtggacactaatggggtgtattcagagcctcgccctattggcaccagatacctgactcgtaatctgtaa

SEQ ID NO: 297 - DNA, 3159 bp, Adeno-associated virus
gattgatttagcggccgcgaattcgcccttgctgcgtcaactggaccaatgagaactttcccttcaacgattgcgtcgacaagatggtgatctggtgggaggagggaaagatgaccgccaaggtcgtggagtcggccaaagccattctcggaggaagcaaggtgcgtgtggaccaaaagtgcaagtcttcggcccagatcgacccgactcccgtgatcgtcacctccaacaccaacatgtgcgccgtgattgatggaaactcaacgaccttcgagcaccagcagccgttgcaagaccggatgttcaaatttgaacttacccgccgtctggatcatgactttggaaaggtcaccaagcaggaagtgaaagactttttccggtgggcaaaggatcacgtggttgaggtggagcatgagttctacgtcaaaaagggtggagccaaaaaaagacccgcccccagtgacgcagatataagtgagcccaaacgggcgcgcgagtcagttgcgcagccatcgacgtcagacgcggaagcttcgatcaactacgcggacaggtaccaaaacaaatgttctcgtcacgtgggcatgaatctgatgctgtttccctgcagacaatgcgagagaatgaatcagaattcaaatatctgcttcactcacggacagaaagactgtccatagtgctttcccgtgtcagaatctcaacccgtttctgtcgtcaaaaaggcgtatcagaaactgtgctacattcatcacatcatgggaaaggtgccagacgcttgcactgcttgcgacctggtcaatgtggatttggatgactgcatctctgaacaataaatgatttaaatcaggtatggctgccgatggttatcttccagattggctcgaggacactctctctgaaggaataagacagtggtggaagctcaaacctggcccaccaccaccaaagcccgcagagcggcataaggacgacagcaggggtcttgtgcttcctggatacaagtacctcggacccttcaacggactcgacaagggagagccggtcaacgaggcagacgccgcggccctcgagcacgacaaggcctacgaccggcagctcgacagcggagacaacccgtacctcaagtacaaccacgccgacgcggagtttcaggagcgccttaaagaagatacgtcttttgggggcaacctcggacgagcagtcttccaggcgaaaaagagggttcttgaacctctgggcctggttgaggaacctgttaagacggctccgggaaaaaagaggccggtagagcactctcctgtggagccagactcctcctcgggaaccggaaaagcgggcaaccagcctgcaagaaaaagattgaatttcggtcagactggagacgcagactccgtacctgacccccagcctctcggacagccaccagcatccccctctggtctgggaactaatacgatggctacaggcagtggcgcaccaatggcagacaataacgagggcgccgacggagtgggtaattcctcgggaaattggcattgcgattccacatggatgggcgacagagtcgtcaccaccagcacccgcacctgggccctgcccacctacaacaaccacctctacaagcagatttccagccaatcaggagccagcaacgacaaccactactttggctacagcaccccttgggggtattttgacttcaacagattccactgccacttttcgccacgcgactggcagagactcatcaacaacaactggggattccggcccaaaagactcaacttcaagctgtttaacattcaagtcaaggaggtcacgcagaatgacggtacgacgacgattgccaataaccttaccagcacggttcaggtgtttactgacttggagtaccagctcccgtacgtcctcggctcggcgcatcaaggatgcctcccgccgttcccagcagacgtcttcatggtgccacagtatggatacctcaccctgaacaacgggagtcaggcggtaggacgctcttccttttactgcctggagtactttccttctcagatgcttcgcaccggaaacaactttaccttcagctacacttttgaagacgttcctttccacagcagctacgctcacagtcaaagtctggaccgtctcatgaatcctctcatcgaccagtacctgtattacttgagcagaacaaacactccaagcggaaccactacgcagtccaggcttcagttttctcaggccggagcgagtgacattcgggaccagtctaggaactggcttcctggaccctgttaccgccagcagcgagtatcaaagacagctgcggataacaacaacagtgaatactcgtggactggagctaccaagtaccacctcaatggcagagactctctggtgaatccgggcccggccatggccagccacaaggacgatgaagaaaagttttttcctcaaagcggggttctcatctttgggaagcaaggctcagagaaaacaaatgtggacattgaaaaggtcatgattacagacgaagaggaaatcaggaccaccaatcccgtggctacggagcagtatggttctgtatctaccaacctccagagcggcaacacacaagcagctacctcagatgtcaacacacaaggcgttcttccaggcatggtctggcaggacagagacgtgtacctgcaggggcccatctgggcaaaaattccacacacggacggacattttcacccctctcccctcatgggcggatttggacttaaacaccctcctccacagattctcattaagaataccccggtacctgcgaatccttcgaccaccttcagcgcggcaaagtttgcttccttcatcacacagtattccacggggcaggtcagcgtggagatcgagtgggagctgcagaaggagaacagcaaacgctggaatcccgaaattcagtacacttccaactacaacaaatctgttaatgtggactttactgtggacactaatggggtgtattcagagcctcgccctattggcaccagatacctgactcgtaatctgtaattgcttgttaatcaataaaccgtttaattcgtttcagttgaactttggtctctgcgaagggcgaattcgtttaaacctgcaggactagtccctttagtgagg

SEQ ID NO: 298 - protein, 735 aa, Adeno-associated virus
MAADGYLPDWLEDTLSEGIRQWWKLKPGPPPPKPAERHKDDSRGLVLPGYKYLGPFNGLDKGEPVNEADAAALEHDKAYDRQLDSGDNPYLKYNHADAEFQERLKEDTSFGGNLGRAVFQAKKRVLEPLGLVEEPVKTAPGKKRPVEHSPVEPDSSSGTGKAGNQPARKRLNFGQTGDADSVPDPQPLGQPPASPSGLGTNTMATGSGAPMADNNEGADGVGNSSGNWHCDSTWMGDRVVTTSTRTWALPTYNNHLYKQISSQSGASNDNHYFGYSTPWGYFDFNRFHCHFSPRDWQRLINNNWGFRPKRLNFKLFNIQVKEVTQNDGTTTIANNLTSTVQVFTDLEYQLPYVLGSAHQGCLPPFPADVFMVPQYGYLTLNNGSQAVGRSSFYCLEYFPSQMLRTGNNFTFSYTFEDVPFHSSYAHSQSLDRLMNPLIDQYLYYLSRTNTPSGTTTQSRLQFSQAGASDIRDQSRNWLPGPCYRQQRVSKTAADNNNSEYSWTGATKYHLNGRDSLVNPGPAMASHKDDEEKFFPQSGVLIFGKQGSEKTNVDIEKVMITDEEEIRTTNPVATEQYGSVSTNLQSGNTQAATSDVNTQGVLPGMVWQDRDVYLQGPIWAKIPHTDGHFHPSPLMGGFGLKHPPPQILIKNTPVPANPSTTFSAAKFASFITQYSTGQVSVEIEWELQKENSKRWNPEIQYTSNYNKSVNVDFTVDTNGVYSEPRPIGTRYLTRNL

SEQ ID NO: 299 - DNA, 2205 bp, Adeno-associated virus
atggctgccgatggttatcttccagattggctcgaggacactctctctgaaggaataagacagtggtggaagctcaaacctggcccaccaccaaagcccgcagagcggcataaggacgacagcaggggtcttgtgcttcctggatacaagtacctcggacccttcaacggactcgacaagggagagccggtcaacgaggcagacgccgcggccctcgagcacgacaaggcctacgaccggcagctcgacagcggagacaacccgtacctcaagtacaaccacgccgacgcggagtttcaggagcgccttaaagaagatacgtcttttgggggcaacctcggacgagcagtcttccaggcgaaaaagagggttcttgaacctctgggcctggttgaggaacctgttaagacggctccgggaaaaaagaggcccgtagagcactctcctgtggagccagactcctcctcgggaaccggaaaagcgggcaaccagcctgcaagaaaaagattgaatttcggtcagactggagacgcagactccgtacctgacccccagcctctcggacagccaccagcagccccctctggtctgggaactaatacgatggctacaggcagtggcgcaccaatggcagacaataacgagggcgccgacggagtgggtaattcctcgggagattggcattgcgattccacatggatgggcgacagagtcatcaccaccagcacccgcacctgggccctgcccacctacaacaaccacctctacaagcagatttccagccaatcaggagccagcaatgacaaccactactttggctacagcaccccttgggggtattttgacttcaacagattccactgccacttttcgccacgcgactggcagagactcatcaacaacaactggggattccggcccaaaagactcaacctcaagctgtttaacattcaagtcaaggaggtcacgcagaatgacggtacgacgacgattgccaataaccttaccagcacggttcaggtgtttactgacttggagtaccagctcccgtacgtcctcggctcggcgcatcaaggatgcctcccgccgttcccagcagacgtcttcatggtgccacagtatggatacctcaccctgaacaacgggagtcaggcggtaggacgctcttccttttactgcctggagtactttccttctcagatgcttcgtaccggaaacaactttaccttcagctacacttttgaagacgttcctttccacagcagctacgctcacagtcaaagtctggaccgtctcatgaatcctctcatcgaccagtacctgtattacttgagcagaacaaacactccaagcggaaccactacgcagtccaggcttcagttttctcaggccggagcgagtgacattcgggaccagtctaggaactggcttcctggaccctgttaccgccagcagcgagtatcaaagacagctgcggataacaacaacggtgaatactcgtggactggagctaccaagtaccacctcaatggcagagactctctggtgaatccgggcccggccatggccagccacaaggacgatgaagaaaagttttttcctcaaagcggggttctcatctttgggaagcaaggctcagagaaaacaaatgtggacattgaaaaggtcatgattacagacgaagaggaaatcaggaccaccaatcccgtggctacggagcagtatggttctgtatctaccaacctccagagcggcaacacacgagcagctacctcagatgtcaacacacaaggcgttcttccaggcatggtctggcaggacagagacgtgtacctgcaggggcccatctgggcaaaaattccacacacggacggacattttcacccctctcccctcatgggcggatttggacttaaacaccctcctccacagattctcattaagaataccccggtacctgcgaatccttcgaccaccttcagcgcggcaaagtttgcttccttcatcacacagtattccacggggcaggtcagcgtggagatcgagtgggagctgcagaaggagaacagcaaacgctggaatcccgaaattcagtacacttccaactacaacaaatctgttaatgtggactttactgtggacactaatggggtgtattcagagcctcgccctattggcaccagatacctgactcgtaatctgtaa

SEQ ID NO: 300 - DNA, 3156 bp, Adeno-associated virus
cgattgaatttagcggccgcgaattcgcccttgctgcgtcaacggaccaatgagaactttcccttcaacgattgcgtcgacaagatggtgatctggtgggaggagggaaagatgaccgccaaggtcgtggagtcggccaaagccattctcggaggaagcaaggtgcgtgtggaccaaaagtgcaagtcttcggcccagatcgacccgactcccgtgatcgtcacctccaacaccaacatgtgcgccgtgattgatggaaactcaacgaccttcgagcaccagcagccgttgcaagaccggatgttcaaatttgaacttacccgccgtctggatcatgactttggaaaggtcaccaagcaggaagtgaaagactttttccggtgggcaaaggatcacgtggttgaggtggagcatgagttctacgtcaaaaagggtggagccaaaaaaagacccgcccccagtgacgcagatataagtgagcccaaacgggcgcgcgagtcagttgcgcagccatcgacgtcagacgcggaagcttcgatcaactacgcggacaggtaccaaaacaaatgttctcgtcacgtgggcatgaatctgatgctgtttccctgcagacaatgcgagcgaatgaatcagaattcaaatatctgcttcactcacggacagaaagactgtttagagtgctttcccgtgtcagaatctcaacccgtttctgtcgtcaaaaaggcgtatcagaaactgtgctacattcatcacatcatgggaaaggtgccagacgcttgcactgcttgcgacctggtcaatgtggatttggatgactgcatctctgaacaataaatgatttaaatcaggtatggctgccgatggttatcttccagattggctcgaggacactctctctgaaggaataagacagtggtggaagctcaaacctggcccaccaccaaagcccgcagagcggcataaggacgacagcaggggtcttgtgcttcctggatacaagtacctcggacccttcaacggactcgacaagggagagccggtcaacgaggcagacgccgcggccctcgagcacgacaaggcctacgaccggcagctcgacagcggagacaacccgtacctcaagtacaaccacgccgacgcggagtttcaggagcgccttaaagaagatacgtcttttgggggcaacctcggacgagcagtcttccaggcgaaaaagagggttcttgaacctctgggcctggttgaggaacctgttaagacggctccgggaaaaaagaggcccgtagagcactctcctgtggagccagactcctcctcgggaaccggaaaagcgggcaaccagcctgcaagaaaaagattgaatttcggtcagactggagacgcagactccgtacctgacccccagcctctcggacagccaccagcagccccctctggtctgggaactaatacgatggctacaggcagtggcgcaccaatggcagacaataacgagggcgccgacggagtgggtaattcctcgggagattggcattgcgattccacatggatgggcgacagagtcatcaccaccagcacccgcacctgggccctgcccacctacaacaaccacctctacaagcagatttccagccaatcaggagccagcaatgacaaccactactttggctacagcaccccttgggggtattttgacttcaacagattccactgccacttttcgccacgcgactggcagagactcatcaacaacaactggggattccggcccaaaagactcaacctcaagctgtttaacattcaagtcaaggaggtcacgcagaatgacggtacgacgacgattgccaataaccttaccagcacggttcaggtgtttactgacttggagtaccagctcccgtacgtcctcggctcggcgcatcaaggatgcctcccgccgttcccagcagacgtcttcatggtgccacagtatggatacctcaccctgaacaacgggagtcaggcggtaggacgctcttccttttactgcctggagtactttccttctcagatgcttcgtaccggaaacaactttaccttcagctacacttttgaagacgttcctttccacagcagctacgctcacagtcaaagtctggaccgtctcatgaatcctctcatcgaccagtacctgtattacttgagcagaacaaacactccaagcggaaccactacgcagtccaggcttcagttttctcaggccggagcgagtgacattcgggaccagtctaggaactggcttcctggaccctgttaccgccagcagcgagtatcaaagacagctgcggataacaacaacggtgaatactcgtggactggagctaccaagtaccacctcaatggcagagactctctggtgaatccgggcccggccatggccagccacaaggacgatgaagaaaagttttttcctcaaagcggggttctcatctttgggaagcaaggctcagagaaaacaaatgtggacattgaaaaggtcatgattacagacgaagaggaaatcaggaccaccaatcccgtggctacggagcagtatggttctgtatctaccaacctccagagcggcaacacacgagcagctacctcagatgtcaacacacaaggcgttcttccaggcatggtctggcaggacagagacgtgtacctgcaggggcccatctgggcaaaaattccacacacggacggacattttcacccctctcccctcatgggcggatttggacttaaacaccctcctccacagattctcattaagaataccccggtacctgcgaatccttcgaccaccttcagcgcggcaaagtttgcttccttcatcacacagtattccacggggcaggtcagcgtggagatcgagtgggagctgcagaaggagaacagcaaacgctggaatcccgaaattcagtacacttccaactacaacaaatctgttaatgtggactttactgtggacactaatggggtgtattcagagcctcgccctattggcaccagatacctgactcgtaatctgtaattgcttgttaatcaataaaccgtttaattcgtttcagttgaactttggtctctgcgaagggcgaattcgtttaaacctgcaggactagtccctttagtgag

SEQ ID NO: 301 - protein, 734 aa, Adeno-associated virus
MAADGYLPDWLEDTLSEGIRQWWKLKPGPPPKPAERHKDDSRGLVLPGYKYLGPFNGLDKGEPVNEADAAALEHDKAYDRQLDSGDNPYLKYNHADAEFQERLKEDTSFGGNLGRAVFQAKKRVLEPLGLVEEPVKTAPGKKRPVEHSPVEPDSSSGTGKAGNQPARKRLNFGQTGDADSVPDPQPLGQPPAAPSGLGTNTMATGSGAPMADNNEGADGVGNSSGDWHCDSTWMGDRVITTSTRTWALPTYNNHLYKQISSQSGASNDNHYFGYSTPWGYFDFNRFHCHFSPRDWQRLINNNWGFRPKRLNLKLFNIQVKEVTQNDGTTTIANNLTSTVQVFTDLEYQLPYVLGSAHQGCLPPFPADVFMVPQYGYLTLNNGSQAVGRSSFYCLEYFPSQMLRTGNNFTFSYTFEDVPFHSSYAHSQSLDRLMNPLIDQYLYYLSRTNTPSGTTTQSRLQFSQAGASDIRDQSRNWLPGPCYRQQRVSKTAADNNNGEYSWTGATKYHLNGRDSLVNPGPAMASHKDDEEKFFPQSGVLIFGKQGSEKTNVDIEKVMITDEEEIRTTNPVATEQYGSVSTNLQSGNTRAATSDVNTQGVLPGMVWQDRDVYLQGPIWAKIPHTDGHFHPSPLMGGFGLKHPPPQILIKNTPVPANPSTTFSAAKFASFITQYSTGQVSVEIEWELQKENSKRWNPEIQYTSNYNKSVNVDFTVDTNGVYSEPRPIGTRYLTRNL

SEQ ID NO: 302 - DNA, 2208 bp, Adeno-associated virus
atggctgccgatggttatcttccagattggctcgaggacactctctctgaaggaataagacagtggtggaagctcaaacctggcccaccaccaccaaagcccgcagagcggcataaggacgacagcaggggtcttgtgcttcctgggtacaagtacctcggacccttcaacggactcgacaagggagagccggtcaacgaggcagacgccgcggccctcgagcacgacaaggcctacgaccggcagctcgacagcggagacaacccgtacctcaagtacgaccacgccgacgcggagtttcaggagcgccttaaagaagatacgtcttttgggggcaacctcggacgagcagtcttccaggcaaaaaagagggttcttgaacctctgggcctggttgaggagcctgttaagacggctccgggaaaaaagaggccggtagagcactctcctgtggagccagactcctcctcgggaaccggaaaagcgggcaaccagcctgcaagaaagagattgaatttcggtcagactggagacgcagactccgtacctgacccccagcctctcggacagccaccagcagccccctctggtctgggaactaatacgatggctacaggcagtggcgcaccaatggcagacaataacgatggcgccgacggagtgggtaattcctcgggaaattggcattgcgattccacatggatgggcgacagagtcatcaccaccagcacccgaacctgggctctgcccacctacaacaaccatctgtacaagcagatttccagccaatcaggagccagcaacgacaaccactactttggctacagcaccccttgggggtattttgacttcaacagattccactgccacttttcaccacgtgactggcaaagactcatcaacaacaactggggattccggcccaagagactcaacttcaagctctttaacattcaagtcagagaggtcacgcagaatgatggtacgacgacgattgccaataaccttaccagcacggttcaggtgtttactgactcggagtaccagctcccgtacgtcctcggctcggcgcatcaaggatgcctcccgccgttcccagcagacgtcttcatggtgccacagtatggatacctcaccctgaacaacgggagtcaggcagtaggacgctcttcattttactgcctggagtacttcccttctcagatgctgcgtaccggaaacaactttaccttcagctacacctttgaggatgttcctttccacagcagctacgctcacagccagagtttggaccgtctcatgaatcctctcatcgaccagtacctgtattacttgagcagaacaaacactccaagcggaaccaccacgcagtccaggcttcagttttctcaggccggagcgagtgacattcgggatcagtctaggaactggcttcctggaccctgttaccgccagcagcgagtatcaaagacatctgcggacaacaacaacagtgaatactcgtggattggagctaccaagtaccacctcaatggcagagactctctggtgaatccgggcccggcaatggccagccacaaggacgatgaagaaaagttttttcctcagagcggggttctcatctttggaaaacaaggatcagagaaaacaaatgtggacattgaaaaggtcatgattacagacgaagaggaaatcagaaccaccaatcccgtggccacggagcagtatggttctgtatctaccaacctccagagcggcaacacacaagcatctactgcagatgtcaacacacaaggcgttcttccaggcatggtctggcaggacagagacgtgtacctgcaggggcctatctgggcaaagattccgcacacggacggacattttcacccctctcccctcatgggcggattcggacttaaacaccctcctccacagattctcatcaaaaacaccccggtacctgcgaatccttcgaccaccttcagtgcggcaaagtttgcttccttcatcacacagtattccacggggcgggtcagcgtggagatcgagtgggagctacagaaggagaacagcaaacgctggaatcccgagatccagtacacttccaactacaacaaatctgttaatgtggactttactgtggacactaatggtgtgtattcagagcctcgccccattggcaccagatacctgactcgtaatctgtaa

SEQ ID NO: 303 - protein, 735 aa, Adeno-associated virus
MAADGYLPDWLEDTLSEGIRQWWKLKPGPPPPKPAERHKDDSRGLVLPGYKYLGPFNGLDKGEPVNEADAAALEHDKAYDRQLDSGDNPYLKYDHADAEFQERLKEDTSFGGNLGRAVFQAKKRVLEPLGLVEEPVKTAPGKKRPVEHSPVEPDSSSGTGKAGNQPARKRLNFGQTGDADSVPDPQPLGQPPAAPSGLGTNTMATGSGAPMADNNDGADGVGNSSGNWHCDSTWMGDRVITTSTRTWALPTYNNHLYKQISSQSGASNDNHYFGYSTPWGYFDFNRFHCHFSPRDWQRLINNNWGFRPKRLNFKLFNIQVREVTQNDGTTTIANNLTSTVQVFTDSEYQLPYVLGSAHQGCLPPFPADVFMVPQYGYLTLNNGSQAVGRSSFYCLEYFPSQMLRTGNNFTFSYTFEDVPFHSSYAHSQSLDRLMNPLIDQYLYYLSRTNTPSGTTTQSRLQFSQAGASDIRDQSRNWLPGPCYRQQRVSKTSADNNNSEYSWIGATKYHLNGRDSLVNPGPAMASHKDDEEKFFPQSGVLIFGKQGSEKTNVDIEKVMITDEEEIRTTNPVATEQYGSVSTNLQSGNTQASTADVNTQGVLPGMVWQDRDVYLQGPIWAKIPHTDGHFHPSPLMGGFGLKHPPPQILIKNTPVPANPSTTFSAAKFASFITQYSTGRVSVEIEWELQKENSKRWNPEIQYTSNYNKSVNVDFTVDTNGVYSEPRPIGTRYLTRNL

SEQ ID NO: 304 - DNA, 2217 bp, Adeno-associated virus
atggctgccgatggttatcttccagattggctcgaggacaacctctctgagggcattcgcgagtggtgggacttgaaacctggagccccgaaacccaaagccaaccagcaaaagcaggacgacggccggggtctggtgcttcctggctacaagtacctcggacccttcaacggactcgacaagggggagcccgtcaacgcggcggacgcagcggccctcgagcacgacaaggcctacgaccagcagctcaaagcgggtgacaatccgtacctgcggtataaccacgccgacgccgagtttcaggagcgtctgcaagaagatacgtcttttgggggcaacctcgggcgagcagtcttccaggccaagaagcgggttctcgaacctctcggtctggttgaggaaggcgctaagacggctcctggaaagaagagaccggtagagccatcaccccagcgttctccagactcctctacgggcatcggcaagacaggccagcagcccgcgaaaaagagactcaactttgggcagactggcgactcagagtcagtgcccgaccctcaaccaatcggagaaccccccgcaggcccctctggtctgggatctggtacaatggctgcaggcggtggcgctccaatggcagacaataacgaaggcgccgacggagtgggtagttcctcaggaaattggcattgcgattccgcatggctgggcgacagagtcatcaccaccagcacccgaccctgggccctccccacctacaacaaccacctctacaagcaaatctccaacgggacatcgggaggaagcaccaacgacaacacctacttcggctacagcaccccctgggggtattttgactttaacagattccactgccacttctcaccacgtgactggcagcgactcatcaacaacaactggggattccggcccaagagactcaacttcaagctcttcaacatccaggtcaaggaggtcacgcagaatgaaggcaccaagaccatcgccaataaccttaccagcacgattcaggtctttacggactcggaataccagctcccgtacgtcctcggctctgcgcaccagggctgcccgcctccgttcccggcggacgtcttcatgattcctcagtacgggtacctgactctgaacaacggcagtcaggccgtgggccgttcctccttctactgcctggagtactttccttctcaaatgcggagaacgggcaacaactttgagttcagctaccagtttgaggacgtgccttttcacagcagctacgcgcatagccaaagcctggaccggctgatgaaccccctcatcgaccagtacctgtactacctgtctcggactcagtccacgggaggtaccgcaggaactcagcagttgctattttctcaggccgggcctaataacatgtcggctcaggccaaaaactggctacccgggccctgctaccggcagcaacgcgtctccacgacactgtcgcaaaataacaacagcaactttgcttggaccggtgccaccaagtatcatctgaatggcagagactctctggtaaatcccggtgtcgctatggcaacgcacaaggacgacgaagagcgattttttccatccagcggagtcttgatgtttgggaaacagggagctggaaaagacaacgtggactatagcagcgttatgctaaccagtgaggaagaaatcaaaaccaccaacccagtggccacagaacagtacggcgtggtggccgataacctgcaacagcaaaacgccgctcctattgtaggggccgtcaacagtcaaggagccttacctggcatggtctggcagaaccgggacgtgtacctgcagggtcctatctgggccaagattcctcacacggacggcaactttcatccttcgccgctgatgggaggctttggactgaaacacccgcctcctcagatcctgattaagaatacacctgttcccgcggatcctccaactaccttcagtcaagccaagctggcgtcgttcatcacgcagtacagcaccggacaggtcagcgtggaaattgaatgggagctgcagaaagagaacagcaagcgctggaacccagagattcagtatacttccaactactacaaatctacaaatgtggactttgctgtcaatactgagggtacttattcagagcctcgccccattggcacccgttacctcacccgtaacctgtaa

SEQ ID NO: 305 - protein, 738 aa, Adeno-associated virus
MAADGYLPDWLEDNLSEGIREWWDLKPGAPKPKANQQKQDDGRGLVLPGYKYLGPFNGLDKGEPVNAADAAALEHDKAYDQQLKAGDNPYLRYNHADAEFQERLQEDTSFGGNLGRAVFQAKKRVLEPLGLVEEGAKTAPGKKRPVEPSPQRSPDSSTGIGKTGQQPAKKRLNFGQTGDSESVPDPQPIGEPPAGPSGLGSGTMAAGGGAPMADNNEGADGVGSSSGNWHCDSAWLGDRVITTSTRPWALPTYNNHLYKQISNGTSGGSTNDNTYFGYSTPWGYFDFNRFHCHFSPRDWQRLINNNWGFRPKRLNFKLFNIQVKEVTQNEGTKTIANNLTSTIQVFTDSEYQLPYVLGSAHQGCPPPFPADVFMIPQYGYLTLNNGSQAVGRSSFYCLEYFPSQMRRTGNNFEFSYQFEDVPFHSSYAHSQSLDRLMNPLIDQYLYYLSRTQSTGGTAGTQQLLFSQAGPNNMSAQAKNWLPGPCYRQQRVSTTLSQNNNSNFAWTGATKYHLNGRDSLVNPGVAMATHKDDEERFFPSSGVLMFGKQGAGKDNVDYSSVMLTSEEEIKTTNPVATEQYGVVADNLQQQNAAPIVGAVNSQGALPGMVWQNRDVYLQGPIWAKIPHTDGNFHPSPLMGGFGLKHPPPQILIKNTPVPADPPTTFSQAKLASFITQYSTGQVSVEIEWELQKENSKRWNPEIQYTSNYYKSTNVDFAVNTEGTYSEPRPIGTRYLTRNL

SEQ ID NO: 306 - protein, 735 aa, Adeno-associated virus
MAADGYLPDWLEDTLSEGIRQWWKLKPGPPPPKPAERHKDDSRGLVLPGYKYLGPFNGLDKGEPVNEADAAALEHDKAYDRQLDSGDNPYLKYNHADAEFQERLKEDTSFGGNLGRAVFQAKKRVLEPLGLVEEPVKTAPGKKRPVEHSPVEPDSSSGTGKAGQQPARKRLNFGQTGDADSVPDPQPLGQPPAAPSGLGSTTMATGSGAPMADNNEGADGVGNSSGNWHCDSQWLGDRVITTSTRTWALPTYNNHLYKQISSQSGASNDNHYFGYSTPWGYFDFNRFHCHFSPRDWQRLINNNWGFRPKRLNFKLFNIQVKEVTQNDGTTTIANNLTSTVQVFTDSEYQLPYVLGSAHQGCLPPFPADVFMVPQYGYLTLNNGSQAVGRSSFYCLEYFPSQMLRTGNNFQFSYTFEDVPFHSSYAHSQSLDRLMNPLVDQYLYYLNKTQTNSGTLQQSRLLFSQAGPTNMSLQAKNWLPGPCYRQQRLSKQANDNNNSNFPWTAATKYHLNGRDSLVNPGPAMASHKDDEEKFFPMHGTLIFGKQGTNANDADLENVMITDEEEIRTTNPVATEQYGTVSNNLQNSNTGPTTGTVNHQGALPGMVWQDRDVYLQGPIWAKIPHTDGHFHPSPLMGGFGLKHPPPQIMIKNTPVPANPPTNFSSAKFASFITQYSTGQVSVEIEWELQKENSKRWNPEIQYTSNYNKSVNVDFTVDTNGVYSEPRPIGTRYLTRNL

SEQ ID NO: 307 - DNA, 3158 bp, Adeno-associated virus
gattgaatttagcggccgcgaattcgcccttgctgcgtcaactggaccaatgagaactttcctttcaatgattgcgtcgacaagatggtgatctggtgggaggagggaaagatgaccgccaaggtcgtggagtcggccaaagccattctcggaggaagcaaggtgcgcgcggaccagaaatgcaagtcctcggcccagatagacccgactcccgtgattgtcacctccaacaccaacatgtgcgccgtgattgacgggaactcaacgaccttcgaacaccagcagccgttgcaagaccggatgttcaaatttgaactcacccgccgtctggatcatgactttgggaaggtcaccaagcaggaagtcaaagactttttccggtgggcaaaggatcacgtggttgaggtggagcatgaattctacgtcaaaaagggtggagctaagaaaagacccgcccccagtgacgcagatataagtgagcccaaacgggcgcgcgagtcagttgcgcagccatcgacgtcagacgcggaagcttcgatcaactacgcgggcaggtaccaaaacaaatgttctcgtcacgtgggcatgaatctgatgctgtttccctgcagacaatgcgagagaatgaatcagaattcaaatatctgcttcactcacggacagaaagactgtttagagtgctttcccgtgtcagaatctcaacccgtttctgtcgtcaaaaaggcgtatcagaaactttgctacattcatcatatcatgggaaaggtgccagacgcttgcactgcctgcgatctggtcaatgtggatttggatgactgcatctctgaacaataaatgatttaaatcaggtatggctgccgatggttatcttccagattggctcgaggacactctctctgaaggaataagacagtggtggaagctcaaacctggcccaccaccaccaaagcccgcagagcggcataaggacgacagcaggggtcttgtgcttcctgggtacaagtacctcggacccttcaacggactcgacaagggggagccggtcaacgaggcagacgccgcggccctcgagcacgacaaggcctacgaccggcagctcgacagcggagacaacccgtacctcaagtacaaccacgccgacgcggagtttcaggagcgccttaaagaagatacgtcttttgggggcaacctcggacgagcagtcttccaggcaaaaaagagggttcttgaacctctgggcctggttgaggaacctgttaaaacggctccgggaaaaaagaggccggtagagcactctcctgtggagccagactcctcctcgggaaccggaaaagcgggccagcagcctgcaagaaaaagattgaatttcggtcagactggagacgcagactccgtacctgacccccagcctctcggacagccaccagcagccccctctggtctgggatctactacaatggctacaggcagtggcgcaccaatggcagacaataacgagggtgccgatggagtgggtaattcctcgggaaattggcattgcgattcccaatggctgggcgacagagtcatcaccaccagcacccgcacctgggccctgcccacctacaacaaccacctctacaagcaaatctccagccaatcaggagcctcaaacgacaaccactactttggctacagcaccccctgggggtattttgacttcaacagattccactgccacttttcaccacgtgactggcaaagactcatcaacaacaactggggattccgacccaagagactcaacttcaagctctttaacattcaagtcaaagaggtcacgcagaatgacggtacgacgacgattgccaataaccttaccagcacggttcaggtgtttactgactcggagtaccagctcccgtacgtcctcggctcggcgcatcaaggatgcctcccgccgtttccagcggacgtcttcatggtcccacagtatggatacctcaccctgaacaacgggagtcaggcagtaggacgctcttcattttactgcctggagtactttccttctcagatgctgcgtaccggaaacaactttcaattcagctacacttttgaagacgtgcctttccacagcagctacgctcacagccagagtctggatcggctgatgaatcctctggtcgaccagtacctgtattatctgaacaagacacaaacaaatagtggaactcttcagcagtctcggctactgtttagccaagctggacccaccaacatgtctcttcaagctaaaaactggctgcctggaccttgctacagacagcagcgtctgtcaaagcaggcaaacgacaacaacaacagcaactttccctggactgcagctacaaagtatcatctaaatggccgggactcgttggttaatccaggaccagctatggccagtcacaaggatgacgaagaaaagtttttccccatgcatggaacccttatatttggtaaacaaggaacaaatgccaacgacgcggatttggaaaatgtcatgattacagatgaagaagaaatcaggaccaccaatcccgtggctacggagcagtacggaactgtatcaaataatttgcaaaactcaaacactggtccaactactggaactgtcaatcaccaaggagcgttacctggtatggtgtggcaggatcgagacgtgtacctgcagggacccatttgggccaagattcctcacaccgatggacactttcatccttctccactgatgggaggttttggactcaaacacccacctcctcaaatcatgatcaaaaacactcccgttccagccaatcctcccacaaacttcagttctgccaagtttgcttctttcatcacacagtattccacggggcaggtcagcgtggagatcgagtgggagctgcagaaggagaacagcaaacgctggaatcccgaaattcagtacacttccaactacaacaaatctgttaatgtggactttactgtggacactaatggtgtgtattcagagcctcgccccattggcaccagatacctgactcgtaatctgtaattgcttgttaatcaataaaccgtttaattcgtttcagttgaactttggtctctgcgaagggcgaattcgtttaaacctgcaggactagtccctttagtga

SEQ ID NO: 308 - protein, 735 aa, Adeno-associated virus
MAADGYLPDWLEDTLSEGIRQWWKLKPGPPPPKPAERHKDDSRGLVLPGYKYLGPFNGLDKGEPVNEADAAALEHDKAYDRQLDSGDNPYLKYNHADAEFQERLKEDTSFGGNLGRAVFQAKKRVLEPLGLVEEPVKTAPGKKRPVEHPPVEPDSSSGTGKAGQQPARKRLNFGQTGDADSVPDPQPLGQPPAAPSGLGSTTMATGSGAPMADNNEGADGVGNSSGNWHCDSQWLGDRVITTSTRTWALPTYNNHLYKQISSQSGASNDNHYFGYSTPWGYFDFNRFHCHFSPRDWQRLINNNWGFRPKRLNFKLFNIQVKEVTQNDGTTTIANNLTSTVQVFTDSEYQLPYVLGSAHQGCLPPFPADVFMVPQYGYLTLNNGSQAVGRSSFYCLEYFPSQMLRTGNNFQFSYTFEDVPFHSSYAHSQSLDRLMNPLIDQYLYYLNKTQTNSGTLQQSRLLFSQAGPTNMSLQAKNRLPGPCYRQQRLSKQANDNNNSNFPWTAATKYHLNGRDSLVNPGPAMASHKDDEEKFFPMHGTLIFGKQGTNANDADLENVMITDEEEIRTTNPVATEQYGTVSNNLQNSNTGPTTGTVNHQGALPGMVWQDRDVYLQGPIWAKIPHTDGHFHPSPLVGGFGLKHPPPQIMIKNTPVPANPPTNFSSAKFASFITQYSTGQVSVEIEWELQKENSKRWNPEIQYTSNYNKSVNVDFTVDTNGVYSEPRPIGTRYLTRNL

SEQ ID NO: 309 - DNA, 3159 bp, Adeno-associated virus
gattgaatttagcggccgcgaattcgcccttgctgcgtcaactggaccaatgagaactttcctttcaatgattgcgtcgacaagatggtgatctggtgggaggagggaaagatgaccgccaaggtcgtggagtcggccaaagccattctcggaggaagcaaggtgcgcgtggaccagaaatgcaagtcctcggcccagatagacccgactcccgtgattgtcacctccaacaccgacatgtgcgccgtgattgacgggaactcaacgaccttcgaacaccagcagccgttgcaagaccggatgttcaaatttgaactcacccgccgtctggatcatgactttgggaaggtcaccaagcaggaagtcaaagactttttccggtgggcaaaggatcacgtggttgaggtggagcatgaattctacgtcaaaaagggtggagctaagaaaagacccgcccccagtgacgcagatataagtgagcccaaacgggcgcgcgagtcagttgcgcagccatcgacgtcagacgcggaagcttcgatcaactacgcggacaggtaccaaaacaaatgttctcgtcacgtgggcatgaatctgatgctgtttccctgcagacaatgcgagagaatgaatcagaattcaaatatctgcttcactcacggacagaaagactgtttagagtgctttcccgtgtcagaatctcaacccgtttctgtcgtcaaaaaggcgtatcagaaactttgctacattcatcatatcatgggaaaggtgccagacgcttgcactgcctgcgatctggtcaatgtggatttggatgactgcatctctgaacaataaatgatttaaatcaggtatggctgccgatggttatcttccagattggctcgaggacactctctctgaaggaataagacagtggtggaagctcaaacctggcccaccaccaccaaagcccgcagagcggcataaggacgacagcaggggtcttgtgcttcctgggtacaagtacctcggacccttcaacggactcgacaagggggagccggtcaacgaggcagacgccgcggccctcgagcacgacaaggcctacgaccggcagctcgacagcggagacaacccgtacctcaagtacaaccacgccgacgcggagtttcaggagcgccttaaagaagatacgtcttttgggggcaacctcggacgagcagtcttccaggcaaaaaagagggttcttgaacctctgggcctggttgaggaacctgttaaaacggctccgggaaaaaagaggccggtagagcaccctcctgtggagccagactcctcctcgggaaccggaaaagcgggccagcagcctgcaagaaaaagattgaatttcggtcagactggagacgcagactccgtacctgacccccagcctctcggacagccaccagcagccccctctggtctgggatctactacaatggctacaggcagtggcgcaccaatggcagacaataacgagggtgccgatggagtgggtaattcctcgggaaattggcattgcgattcccaatggctgggcgacagagtcatcaccaccagcacccgcacctgggccctgcccacctacaacaaccacctctacaagcaaatctccagccaatcaggagcctcaaacgacaaccactactttggctacagcaccccctgggggtattttgacttcaacagattccactgccacttttcaccacgtgactggcaaagactcatcaacaacaactggggattccgacccaagagactcaacttcaagctctttaacattcaagtcaaagaggtcacgcagaatgacggtacgacgacgattgccaataaccttaccagcacggttcaggtgtttactgactcggagtaccagctcccgtacgtcctcggctcggcgcatcaaggatgcctcccgccgtttccagcggacgtcttcatggtcccacagtatggatacctcaccctgaacaacgggagtcaggcagtaggacgctcttcattttactgcctggagtactttccttctcagatgctgcgtaccggaaacaactttcagttcagctacacttttgaagacgtgcctttccacagcagctacgctcacagccagagtctggatcggctgatgaatcctctgatcgaccagtacctgtattatctgaacaagacacaaacaaatagtggaactcttcagcagtctcggctactgtttagccaagctggacccaccaacatgtctcttcaagctaaaaaccggctgcctggaccttgctacagacagcagcgtctgtcaaagcaggcaaacgacaacaacaacagcaactttccctggaccgcagctacaaagtatcatctaaatggccgggactcgttggttaatccaggaccagctatggccagtcacaaggatgacgaagaaaagtttttccccatgcatggaacccttatatttggtaaacaaggaacaaatgccaacgacgcggatttggaaaatgtcatgattacagatgaagaagaaatcaggaccaccaatcccgtggctacggagcagtacggaactgtatcaaataatttgcaaaactcaaacactggtccaactactggaactgtcaatcaccaaggagcgttacctggtatggtgtggcaggatcgagacgtgtacctgcagggacccatttgggccaagattcctcacaccgatggacactttcatccttctccactggtgggaggttttggactcaaacacccacctcctcaaatcatgatcaaaaacactcccgttccagccaatcctcccacaaacttcagttctgccaagtttgcttctttcatcacacagtattccacggggcaggtcagcgtggagatcgagtgggagctgcagaaggagaacagcaaacgctggaatcccgaaattcagtacacttccaactacaacaaatctgttaatgtggactttactgtggacactaatggtgtgtattcagagcctcgccccattggcaccagatacctgactcgtaatctgtaattgcttgttaatcaataaaccgtttaattcgtttcagttgaactttggtctctgcgaagggcgaattcgtttaaacctgcaggactagtccctttagtgag

SEQ ID NO: 310 - DNA, 2208 bp, Adeno-associated virus
atggctgccgatggttatcttccagattggctcgaggacactctctctgaaggaataagacagtggtggaagctcaaacctggcccaccaccaccaaagcccgcagagcggcataaggacgacagcaggggtcttgtgcttcctgggtacaagtaccttggacccttcaacggactcgacaagggagagccggtcaacgaggcagacgccgcggccctcgagcacgacaaggcctacgaccggcagctcgacagcggagacaacccgtaccccaagtacaaccacgccgacgcggagttccaggagcgtcttaaagaagatacgtcttttgggggcaacctcggacgagcagtcttccaggcgaaaaagagggttcttgaacctctgggcctggttgaggaacctgttaagacggctccgggaaaaaagaggccggtagagcactctcctgcggagccagactcctcctcgggaaccggaaaagcgggccagcagcctgcaagaaagagattgaatttcggtcagactggagacgcagactccgtacctgacccccagcctctcggacagccaccagcagccccctctggtctgggaactaatacgatggctacaggcagtggcgcaccaatggcagacaataacgagggcgccgacggagtgggtaattcctcgggaaattggcattgcgattccacatggatgggcgacagagtcatcaccaccagcacccgcacctgggctctgcccacctacaacaaccacctctacaagcagatttccagccaatcaggagcctcaaacgacaaccactactttggctacagcaccccttgggggtattttgacttcaacagattccactgccacttttcgccacgtgactggcaaagactcatcaacaacaattggggattccggcccaaaagactcaacttcaagctctttaacattcaagtcaaggaggtcacgcagaatgacggtacgacgacgattgccaataaccttaccagcacggttcaggtgtttactgactcggagtaccagctcccgtacgtcctcggctcggcgcatcaaggatgcctcccgccgttcccagcagacgtcttcatggtgccacagtatggatacctcaccctgaacaacgggagtcaggcagtaggacgctcttcattttactgcctggagtactttccttctcagatgctgcgtaccggaaacaactttaccttcagctacacctttgaggacgttcctttccacagcagctacgcccacagccagagtttggaccgtctcatgaatcctctcatcgaccagtacctgtattacttgagcagaacaaacactccaagcggaaccaccacgcagtcaaggcttcagttttctcaggccggagcaagtgacattcgggaccagtctaggaactggcttcctggaccctgttaccgccagcagcgagtatcaaagacatctgcggataacaacaacagtgaatactcgtggactggagctaccaagtaccaccttaatggaagagactctctggtgaatccgggcccggccatggccagccacaaggacgatgaagaaaagttttttcctcagagcggggttctcatctttggaaaacaagactcgggaaaaactaatgtggacattgaaaaggtcatgattacagacgaagaggaaatcaggaccaccaatcccgtggctacggagcagtatggttctgtatctaccaacctccagagcggcaacacacaagcagctacctcagatgtcaacacacaaggcgttcttccaggcatggtgtggcaggacagagacgtgtacctgcaggggcccatctgggcaaagattccacacacggacggacattttcacccctctcccctcatgggcggattcggacttaaacaccctcccccgcagattctcatcaagaacaccccggtacctgcgaatccttcgactaccttcagtgcggcaaagtttgcttccttcattacacagtactccacggggcaggtcagcgtggagatcgagtgggagctgcagaaggagaacagcaaacgctggaatcccgagattcagtacacttccaactacaacaaatctgttaatgtggactttactgtggacactaatggtgtgtattcagagcctcgccccattggcaccaggtacctgactcgtaatctgtaa

SEQ ID NO: 311 - protein, 735 aa, Adeno-associated virus
MAADGYLPDWLEDTLSEGIRQWWKLKPGPPPPKPAERHKDDSRGLVLPGYKYLGPFNGLDKGEPVNEADAAALEHDKAYDRQLDSGDNPYPKYNHADAEFQERLKEDTSFGGNLGRAVFQAKKRVLEPLGLVEEPVKTAPGKKRPVEHSPAEPDSSSGTGKAGQQPARKRLNFGQTGDADSVPDPQPLGQPPAAPSGLGTNTMATGSGAPMADNNEGADGVGNSSGNWHCDSTWMGDRVITTSTRTWALPTYNNHLYKQISSQSGASNDNHYFGYSTPWGYFDFNRFHCHFSPRDWQRLINNNWGFRPKRLNFKLFNIQVKEVTQNDGTTTIANNLTSTVQVFTDSEYQLPYVLGSAHQGCLPPFPADVFMVPQYGYLTLNNGSQAVGRSSFYCLEYFPSQMLRTGNNFTFSYTFEDVPFHSSYAHSQSLDRLMNPLIDQYLYYLSRTNTPSGTTTQSRLQFSQAGASDIRDQSRNWLPGPCYRQQRVSKTSADNNNSEYSWTGATKYHLNGRDSLVNPGPAMASHKDDEEKFFPQSGVLIFGKQDSGKTNVDIEKVMITDEEEIRTTNPVATEQYGSVSTNLQSGNTQAATSDVNTQGVLPGMVWQDRDVYLQGPIWAKIPHTDGHFHPSPLMGGFGLKHPPPQILIKNTPVPANPSTTFSAAKFASFITQYSTGQVSVEIEWELQKENSKRWNPEIQYTSNYNKSVNVDFTVDTNGVYSEPRPIGTRYLTRNL

SEQ ID NO: 312 - DNA, 2208 bp, Adeno-associated virus
atggctgccgatggttatcttccagattggctcgaggacactctctctgaaggaataagacagtggtggaagctcaaacctggcccaccaccaccaaagcccgcagagcggcataaggacgacagcaggggtcttgtgcttcctgggtacaagtaccttggacccttcaacggactcgacaagggagagccggtcaacgaggcagacgccgcggccctcgagcacgacaaggcctacgaccggcagctcgacggcggagacaacccgtacctcaagtacaaccacgccgacgcggagttccaggagcgtcttaaagaagatacgtcttttgggggcaacctcggacgagcagtcttccaggcgaaaaagagggttcttgaacctctgggcctggttgaggaacctgttaagacggctccgggaaaaaagaggccggtagagcactctcttgcggagccagactcctcctcgggaaccggaaaagcgggccagcagcctgcaagaaggagattgaatttcggtcagactggagacgcagactccgtacctgacccccagcctctcggacagccaccagcagccccctctggtctgggaactaatacgatggctacaggcagtggcgcaccaatggcagacaataacgagggcgccgacggagtgggtaattcctcgggaaattggcattgcgattccacatggatgggcgacagagtcatcaccaccagcacccgcacctgggctctgcccacctacaacaaccacctctacaggcagatttccagccaatcaggagcctcaaacgacaaccactactttggctacagcaccccttgggggtattttgacttcaacagattccactgccacttttcgccacgtgactggcaaagactcatcaacaacaattggggatcccggcccaaaagactcaacttcaagctctttaacattcaagtcaaggaggtcacgcagaatgacggtacgacgacgattgccaataaccttaccagcacggttcaggtgtttactgactcggagtaccagctcccgtacgtcctcggctcggcgcatcaaggatgcctcccgccgttcccagcagacgtcttcatggtgccacagtatggatacctcaccctgaacaacgggagtcaggcagtaggacgctcttcattttactgcctggagtactttccttctcagatgctgcgtaccggaaacaactttaccttcagctacacctttgaggacgttcctttccacagcagctacgcccacagccagagtttggaccgtctcatgaatcctctcgtcgaccagtacctgtattacttgagcagaacaaacactccaagcggaaccaccacgcagtcaaggcttcagttttctcaggccggagcaagtgacattcgggaccagtctaggaactggcttcctggaccctgttaccgccagcagcgagtatcaaagacatctgcggataacaacaacagtgaatactcgtggactggagctaccaagtaccaccttaatggaagagactctctggtgaatccgggcccggccatggccagccacaaggacgatgaagaaaagttttttcctcagagcggggttctcatctttggaaaacaagactcgggaaaaactaatgtggacattgaaaaggtcatgattacagacgaagaggaaatcaggaccaccaatcccgtggctacggagcagtatggttctgtatctaccaacctccagagcggcaacacacaagcagctacctcagatgtcaacacacaaggcgttcttccaggcatggtgtggcaggacagagacgtgtacctgcaggggcccatctgggcaaagattccacacacggacggacattttcacccctctcccctcatgggcggattcggacttaaacaccctcccccgcagattctcatcaagaacaccccggtacctgcgaatccttcgactaccttcagtgcggcaaagtttgcttccttcattacacagtactccacggggcaggtcagcgtggagatcgagtgggagctgcagaaggagaacagcaaacgctggaatcccgagattcagtacacttccaactacaacaaatctgttaatgtggactttactgtggacactaatggtgtgtattcagagcctcgccccattggcaccagatacctgactcgtaatctgtaa

SEQ ID NO: 313 - protein, 735 aa, Adeno-associated virus
MAADGYLPDWLEDTLSEGIRQWWKLKPGPPPPKPAERHKDDSRGLVLPGYKYLGPFNGLDKGEPVNEADAAALEHDKAYDRQLDGGDNPYLKYNHADAEFQERLKEDTSFGGNLGRAVFQAKKRVLEPLGLVEEPVKTAPGKKRPVEHSLAEPDSSSGTGKAGQQPARRRLNFGQTGDADSVPDPQPLGQPPAAPSGLGTNTMATGSGAPMADNNEGADGVGNSSGNWHCDSTWMGDRVITTSTRTWALPTYNNHLYRQISSQSGASNDNHYFGYSTPWGYFDFNRFHCHFSPRDWQRLINNNWGSRPKRLNFKLFNIQVKEVTQNDGTTTIANNLTSTVQVFTDSEYQLPYVLGSAHQGCLPPFPADVFMVPQYGYLTLNNGSQAVGRSSFYCLEYFPSQMLRTGNNFTFSYTFEDVPFHSSYAHSQSLDRLMNPLVDQYLYYLSRTNTPSGTTTQSRLQFSQAGASDIRDQSRNWLPGPCYRQQRVSKTSADNNNSEYSWTGATKYHLNGRDSLVNPGPAMASHKDDEEKFFPQSGVLIFGKQDSGKTNVDIEKVMITDEEEIRTTNPVATEQYGSVSTNLQSGNTQAATSDVNTQGVLPGMVWQDRDVYLQGPIWAKIPHTDGHFHPSPLMGGFGLKHPPPQILIKNTPVPANPSTTFSAAKFASFITQYSTGQVSVEIEWELQKENSKRWNPEIQYTSNYNKSVNVDFTVDTNGVYSEPRPIGTRYLTRNL

SEQ ID NO: 314 - protein, 738 aa, Adeno-associated virus
MAADGYLPDWLEDNLSEGIREWWDLKPGAPKPKANQQKQDDGRGLVLPGYKYLGPFNGLDKGEPVNAADAAALEHDKAYDQQLKAGDNPYLRYNHADAEFQERLQEDTSFGGNLGRAVFQAKKRVLEPLGLVEEAAKTAPGKKRPVEPSPQRSPDSSAGIGKKGQQPAKKRLNFGQTGDSESVPDPQPIGEPPAGPSGLGSGTMAAGGGAPMADNNEGADGVGSSSGNWHCDSTWLGDRVITTSTRTWALPTYNNHLYKQISNGTSGGSTNDNTYFGYSTPWGYFDFNRFHCHFSPRDWQRLINNNWGFRPKRLSFKLFNIQVKEVTQNEGTETIANNLTSTIQVFTDSEYQLPYVLGSAHQGCLPPFPADVFMIPQYGYLTLNNGSQAVGRSSFYCLEYFPSQMLRTGNNFEFSYTFEDVPFHSSCAHSQSSDRLMNPLIDQYLYYLSRTRSTGGTQGTQQLLFSQAGPANMSAQAKNWLPGPCYRQQRVSTTLSQNNNSNFAWTGATKYHLNGRDSLVNPGVAMATHKDDEERFFPSSGVLMFGKQGAGRDNVDYSSVMLTSEEEIKTTNPVATEQYGVVADNLQQTNTGPIVGNVNSQGALPGMVWQNRDVYLQGPIWAKIPHTDGNFHPSPLMGGFGLKHPPPQILIKNTPVPADPPTTFSQAKLASFITQYSTGQVSVEIEWELQKENSKRWNPEIQYTSNYYKSTNVDFAVNTEGTYSEPRPIGTRYLTRNL

SEQ ID NO: 315 - DNA, 2217 bp, Adeno-associated virus
atggctgctgacggttatcttccagattggctcgaggacaacctctctgagggcattcgcgagtggtgggacctgaaacctggagcccccaagcccaaggccaaccagcagaagcaggacgacggccggggtctggtgcttcttggctacaagtacctcggacccttcaacggactcgacaagggggagcccgtcaatgcggcggacgcagcggccctcgagcacgacaaggcctacgaccagcagctcaaagcgggtgacaatccgtacctgcggtataaccacgccgacgccgagtttcaggagcgtctgcaagaagatacgtcttttgggggcaacctcgggcgagcagtcttccaggccaagaagcgggttctcgaacctctcggtctggttgaggaagctgctaagacggctcctggaaagaagagaccggtagaaccgtcacctcagcgttcccccgactcctccacgggcatcggcaagaaaggccagcagcccgctaaaaagagactgaactttggtcagactggcgactcagagtcagtccccgaccctcaaccaatcggagaaccaccagcaggcccctctggtctgggatctggtacaatggctgcaggcggtggcgctccaatggcagacaataacgaaggcgccgacggagtgggtagttcctcaggaaattggcattgcgattccacatggctgggcgacagagtcatcaccaccagcacccgaacctgggccctgcccacctacaacaaccacctctacaagcaaatatccaatgggacatcgggaggaagcaccaacgacaacacctacttcggctacagcaccccctgggggtattttgacttcaacagattccactgccacttctcaccacgtgactggcagcgactcatcaacaacaactggggattccggccaaaaagactcagcttcaagctcttcaacatccaggtcaaggaggtcacgcagaatgaaggcaccaagaccatcgccaataaccttaccagcacgattcaggtatttacggactcggaataccagctgccgtacgtcctcggctccgcgcaccagggctgcctgcctccgttcccggcggacgtcttcatgattccccagtacggctaccttacactgaacaatggaagtcaagccgtaggccgttcctccttctactgcctggaatattttccatctcaaatgctgcgaactggaaacaattttgaattcagctacaccttcgaggacgtgcctttccacagcggctacgcacacagccagagcttggaccgactgatgaatcctctcatcgaccagtacctgtactacttatccagaactcagtccacaggaggaactcaaggtacccagcaattgttattttctcaagctgggcctgcaaacatgtcggctcaggctaagaactggctacctggaccttgctaccggcagcagcgagtctctacgacactgtcgcaaaacaacaacagcaactttgcttggactggtgccaccaaatatcacctgaacggaagagactctttggtaaatcccggtgtcgccatggcaacccacaaggacgacgaggaacgcttcttcccgtcgagtggagtcctgatgtttggaaaacagggtgctggaagagacaatgtggactacagcagcgttatgctaaccagcgaagaagaaattaaaaccactaaccctgtagccacagaacaatacggtgtggtggctgacaacttgcagcaaaccaatacagggcctattgtgggaaatgtcaacagccaaggagccttacctggcatggtctggcagaaccgagacgtgtacctgcagggtcccatctgggccaagattcctcacacggacggcaacttccacccttcaccgctaatgggaggatttggactgaagcacccacctcctcagatcctgatcaagaacacgccggtacctgcggatcctccaacgacgttcagccaggcgaaattggcttccttcattacgcagtacagcaccggacaggtcagcgtggaaatcgagtgggagctgcagaaggagaacagcaaacgctggaacccagagattcagtacacttcaaactactacaaatctacaaatgtggactttgctgtcaatacagagggaacttattctgagcctcgccccattggtactcgttacctcacccgtaatctgtaa

SEQ ID NO: 316 - protein, 738 aa, Adeno-associated virus
MAADGYLPDWLEDNLSEGIREWWDLKPGAPKPKANQQKQDDGRGLVLLGYKYLGPFNGLDKGEPVNAADAAALEHDKAYDQQLKAGDNPYLRYNHADAEFQERLQEDTSFGGNLGRAVFQAKKRVLEPLGLVEEAAKTAPGKKRPVEPSPQRSPDSSTGIGKKGQQPAKKRLNFGQTGDSESVPDPQPIGEPPAGPSGLGSGTMAAGGGAPMADNNEGADGVGSSSGNWHCDSTWLGDRVITTSTRTWALPTYNNHLYKQISNGTSGGSTNDNTYFGYSTPWGYFDFNRFHCHFSPRDWQRLINNNWGFRPKRLSFKLFNIQVKEVTQNEGTKTIANNLTSTIQVFTDSEYQLPYVLGSAHQGCLPPFPADVFMIPQYGYLTLNNGSQAVGRSSFYCLEYFPSQMLRTGNNFEFSYTFEDVPFHSGYAHSQSLDRLMNPLIDQYLYYLSRTQSTGGTQGTQQLLFSQAGPANMSAQAKNWLPGPCYRQQRVSTTLSQNNNSNFAWTGATKYHLNGRDSLVNPGVAMATHKDDEERFFPSSGVLMFGKQGAGRDNVDYSSVMLTSEEEIKTTNPVATEQYGVVADNLQQTNTGPIVGNVNSQGALPGMVWQNRDVYLQGPIWAKIPHTDGNFHPSPLMGGFGLKHPPPQILIKNTPVPADPPTTFSQAKLASFITQYSTGQVSVEIEWELQKENSKRWNPEIQYTSNYYKSTNVDFAVNTEGTYSEPRPIGTRYLTRNL

SEQ ID NO: 317 - protein, 735 aa, Adeno-associated virus
MAADGYLPDWLEDTLSEGIRQWWKLKPGPPPPKPAERHKDDSRGLVLPGYKYLGPFNGLDKGEPVNEADAAALEHDKAYDRQLDSGDNPYLKYNHADAEFQERLKEDTSFGGNLGRAVFQAKKRVLEPLGLVEPPVKTAPGKKRPVEHSPAEPDSSSGTGKAGQQPARKRLNFGQTGDADSVPDPQPLGQPPAAPSGLGSTTMATGSGAPMADNNEGADGVGNSSGNWHCDSQWLGDRVITTSTRTWALPTYNNHLYKQISSQSGASNDNHYFGYSTPWGYFDFNRFHCHFSPRDWQRLINNNWGFRPKRLNFKLFNIQVKEVTQNDGTTTIANNLTSTVQVFTDSEYQLPYVLGSAHQGCLPPFPADVFMVPQYGYLTLNNGSQAVGRSSFYCLEYFPSQMLRTGNNFQFSYTFEDVPFHSSYAHSQSLDRLMNPLIDQYLYYLNKTQSNSGTLQQSRLLFSQAGPTSMSLQAKNWLPGPCYRQQRLSKQANDNNNSNFPWTAATKYHLNGRDSLVNPGPAMASHKDDEEKFFPMHGTLIFGKQGTNANDADLDNVMITDEEEIRTTNPVATEQYGYVSNNLQNSNTGPTTGTVNHQGALPGMVWQDRDVYLQGPIWAKIPHTDGHFHPSPLMGGFGLKHPPPQIMIKNTPVPANPPTNFSSAKFASFITQYSTGQVSVEIEWELQKENSKRWNPEIQYTSNYNKSVNVDFTVDTNGVYSEPRPIGTRYLTRNL

SEQ ID NO: 318 - protein, 735 aa, Adeno-associated virus
MAADGYLPDWLEDTLSEGIRQWWKLKPGPPPPKPAERHKDDSRGLVLPGYKYLGPFNGLDKGEPVNEADAAALEHDKAYDRQLDSGDNPYLKYNHADAEFQERLKEDTSFGGNLGRAVFQAKKRVLEPLGLVEGPVKTAPGKKRPVEHSPAEPDSSSGTGKAGQQPARKRLNFGQTGDADSVPDPQPLGQPPAAPSGLGSTTMATGSGAPMADNNEGADGVGNSSGNWHCDSQWLGDRVITTSTRTWALPTYNNHLYKQISSQSGASNDNHYFGYSTPWGYFDFNRFHCHFSPRDWQRLINNNWGFRPKRLNFKLFNIQVKEVTQNDGTTTIANNLTSTVQVFTDSEYQLPYVLGSAHQGCLPPFPADVFMVPQYGYLTLNNGSQAVGRSSFYCLEYFPSQMLRTGNNFQFSYTFEDVPFHSSYAHSQSLDRLMNPLIDQYLYYLNKTQSNSGTLQQSRLLFSQAGPTSMSLQAKNWLPGPCYRQQRLSKQANDNNNSNFPWTAATKYHLNGRDSLVNPGPAMASHKDDEEKFFPMHGTLIFGKQGTNANDADLDNVMITDEEEIRTTNPVATEQYGYVSNNLQNSNTGPTTGTVNHQGALPGMVWQDRDVYLQGPIWAKIPHTDGHFHPSPLMGGFGLKHPPPQIMIKNTPVPANPPTNFSSAKFASFITQYSTGQVSVEIEWELQKENSKRWNPEIQYTSNYNKSVNVDFTVDTNGVYSEPRPIGTRYLTRNL

SEQ ID NO: 319 - DNA, 2208 bp, Adeno-associated virus
atggctgccgatggttatcttccagattggctcgaggacactctctctgaaggaataagacagtggtggaagctcaaacctggcccaccaccaccaaagcccgcagagcggcataaggacgacagcaggggtcttgtgcttcctgggtacaagtacctcggacccttcaacggactcgacaagggggagccggtcaacgaggcagacgccgcggccctcgagcacgacaaggcctacgaccggcagctcgacagcggagacaacccgtacctcaagtacaaccacgccgacgcggagtttcaggagcgtcttaaagaagatacgtcttttgggggcaacctcggacgagcagtcttccaggcgaaaaagagggttcttgaacctctgggcctggttgagggacctgttaagacggctccgggaaaaaagaggccggtagagcactctcctgcggagccagactcctcctcgggaaccggaaaagcgggccagcagcctgcaagaaaaagattgaattttggtcagactggagacgcagactccgtacctgacccccagcctctcggacagccaccagcagccccctctggtttgggatctactacaatggctacaggcagtggcgcaccaatggcagacaataacgagggtgccgatggagtgggtaattcctcaggaaattggcattgcgattcccaatggctgggcgacagagtcatcaccaccagcacccgaacctgggccctgcccacctacaacaaccacctctacaagcaaatctcaagccaatcaggagcctcaaacgacaaccactactttggctacagcaccccttgggggtattttgacttcaacagattccactgccacttttcaccacgtgactggcaaagactcatcaacaacaactggggattccgacccaagagactcaacttcaagctctttaacattcaagtcaaagaggtcacgcagaatgacggtacgacgacgattgccaataaccttaccagcacggttcaggtgtttactgactcggagtaccagctcccgtacgtcctcgggtcggcgcatcaaggatgcctcccgccgtttccagcggacgtcttcatggtcccacagtatggatacctcaccctgaacaacgggagtcaggcggtaggacgctcttccttttactgcctggagtactttccttctcagatgcttcgtactggaaacaactttcagttcagctacacctttgaagacgttcctttccacagcagctacgctcacagccagagtctggatcggctgatgaatcctctgatcgaccagtacctgtattatctgaacaaaacacaatcaaatagtggaactcttcagcagtctcggctactgtttagtcaagctggacccaccagcatgtctcttcaagctaaaaactggctacctggaccttgctacagacagcagcgtctgtcaaagcaggcaaacgacaacaacaacagcaactttccctggactgcggctacaaagtatcacctaaatggccgggactcgttggttaatccaggaccagctatggccagtcacaaagacgatgaagaaaagtttttccccatgcatggaaccctgatatttggtaaacaaggaacaaatgctaacgacgcggatttggacaatgtcatgattacagatgaagaagaaatccgcaccaccaatcccgtggctacggagcagtacggatatgtgtcaaataatttgcaaaactcaaatactggtccaactactggaactgtcaatcaccaaggagcgttacctggcatggtgtggcaggatcgagacgtgtacctgcagggacccatttgggccaagattcctcacaccgatggacactttcatccttctccactgatgggaggttttgggctcaaacacccgcctcctcagatcatgatcaaaaacactcccgttccagccaatcctcccacaaacttcagttctgccaagtttgcttctttcatcacacagtattccacggggcaggtcagcgtggagatcgagtgggagctgcagaaagagaacagcaaacgctggaatcccgaaattcagtacacttccaactacaacaaatctgttaatgtggactttactgtggacactaatggcgtgtattcagagcctcgccccattggcaccagatacctgactcgtaatctgtaa

SEQ ID NO: 320 - DNA, 2211 bp, Adeno-associated virus; identical to SEQ ID NO: 1

SEQ ID NO: 321 - DNA, 2208 bp, Adeno-associated virus
atggctgccgatggttatcttccagattggctcgaggacactctctctgaaggaacaagacagtggtggaagctcaaacctggcccaccaccaccaaagcccgcagagcggcataaggacgacagcaggggtcttgtgcttcctgggtacaagtacctcggacccttcaacggactcgacaagggggagccggtcaacgaggcagacgccgcggccctcgagcacgacaaggcctacgaccggcagctcgacagcggagacaacccgtacctcaagtacaaccacgccgacgcggagtttcaggagcgtcttaaagaagatacgtcttttgggggcaacctcggacgagcagtcttccaggcgaaaaagagggttcttgaacctctgggcctggttgaggaacctgttaagacggctccgggaaaaaagaggccggtagagcactctcctgcggagccagactcctcctcgggaaccggaaaagcgggccagcagcctgcaagaaaaagattgaattttggtcagactggagacgcagactccgtacctgacccccagcctctcggacagccaccagcagccccctctggtttgggatctactacaatggctacaggcagtggcgcaccaatggcagacaataacgagggtgccgatggagtgggtaattcctcaggaaattggcattgcgattcccaatggctgggcgacagagtcatcaccaccagcacccgaacctgggccctgcccacctacaacaaccacctctacaagcaaatctcaagccaatcaggagcctcaaacgacaaccactactttggctacagcaccccttgggggtattttgacttcaacagattccactgccacttttcaccacgtgactggcaaagactcatcaacaacaactggggattccgacccaagagactcaacttcaagctctttaacattcaagtcaaagaggtcacgcagaatgacggtacgacgacgattgccaataaccttaccagcacggttcaggtgtttactgactcggagtaccagctcccgtacgtcctcgggtcggcgcatcaaggatgcctcccgccgtttccagcggacgtcttcatggtcccacagtatggatacctcaccctgaacaacgggagtcaggcggtaggacgctcttccttttactgcctggagtactttccttctcagatgcttcgtactggaaacaactttcagttcagctacacctttgaagacgttcctttccacagcagctacgctcacagccagagtctggatcggctgatgaatcctctgatcgaccagtacctgtattatctgaacaaaacacaatcaaatagtggaactcttcagcagtctcggctactgtttagtcaagctggacccaccagcatgtctcttcaagctaaaaactggctacctggaccttgctacagacagcagcgtctgtcaaagcaggcaaacgacaacaacaacagcaactttccctggactgcggctacaaagtaccacctaaatggccgggactcgttggttaatccaggaccagctatggccagtcacaaagacgatgaagaaaagtttttccccatgcatggaaccctgatatttggtaaacaaggaacaaatgctaacgacgcggatttggacaatgtcatgattacagatgaagaagaaatccgcaccaccaatcccgtggctacggagcagtacggatatgtgtcaaataatttgcaaaactcaaatactggtccaactactggaactgtcaatcaccaaggagcgttacctggcatggtgtggcaggatcgagacgtgtacctgcagggacccatttgggccaagattcctcacaccgatggacactttcatccttctccactgatgggaggttttgggctcaaacacccgcctcctcagatcatgatcaaaaacactcccgttccagccaatcctcccacaaacttcagttctgccaagtttgcttctttcatcacacagtattccacggggcaggtcagcgtggagatcgagtgggagctgcagaaagagaacagcaaacgctggaatcccgaaattcagtacacttccaactacaacaaatctgttaatgtggactttactgtggacactaatggcgtgtattcagagcctcgccccattggcaccagatacctgactcgtaatctgtaa

SEQ ID NO: 322 - DNA, 2217 bp, Adeno-associated virus
atggctgctgacggttatcttccagattggctcgaggacaacctctctgagggcattcgcgagtggtgggacctgaaacctggagcccccaagcccaaggccaaccagcagaagcaggacgacggccggggtctggtgcttcctggctacaagtacctcggacccttcaacggactcgacaagggggagcccgtcaacgcggcggacgcagcggccctcgagcacgacaaggcctacgaccagcagctcaaagcgggtgacaatccgtacctgcggtataaccacgccgacgccgagtttcaggagcgtctgcaagaagatacgtcttttgggggcaacctcgggcgagcagtcttccaggccaagaagcgggttctcgaacctctcggtctggttgaggaagctgctaagacggctcctggaaagaagagaccggtagaaccgtcacctcagcgttcccccgactcctccacgggcatcggcaagaaaggccagcagcccgctaaaaagagactgaactttggtcagactggcgactcagagtcagtccccgaccctcaaccaatcggagaaccacctgcaggcccctctggtctgggatctggtacaatggctgcaggcggtggcgctccaatggcagacaataacgaaggcgccgacggagtgggtagttcctcaggaaattggcattgcgattccacatggctgggcgacagagtcatcaccaccagcacccgaacctgggccctgcccacctacaacaaccacctctacaagcaaatatccaatgggacatcgggagggagcaccaacgacaacacctacttcggctacagcaccccctgggggtattttgacttcaacagattccactgccacttctcaccacgtgactggcagcgactcatcaacaacaactggggattccggccaaaaagactcagcttcaagctcttcaacatccaggtcaaggaggtcacgcagaatgaaggcaccaagaccatcgccaataaccttaccagcacgattcaggtatttacggactcggaataccagctgccgtacgtcctcggctccgcgcaccagggctgcctgcctccgttcccggcggacgtcttcatgattccccagtacggctaccttacactgaacaatggaagtcaagccgtaggccgttcctccttctactgcctggaatattttccatctcaaatgctgcgaactggaaacaattttgaattcagctacaccttcgaggacgtgcctttccacagcagctacgcacacagccagagcttggaccgactgatgaatcctctcatcgaccagtacctgtactacttatccagaactcagtccacaggaggaactcaaggtacccagcaattgttattttctcaagctgggcctgcaaacatgtcggctcaggctaagaactggctacctggaccttgctaccggcagcagcgagtctctacgacactgtcgcaaaacaacaacagcaactttgcttggactggtgccaccaaatatcacctgaacggaagagactctttggtaaatcccggtgtcgccatggcaacccacaaggacgacgaggaacgcttcttcccgtcgagtggagtcctgatgtttggaaaacagggtgctggaagagacaatgtggactacagcagcgttatgctaaccagcgaagaagaaattaaaaccactaaccctgtagccacagaacaatacggtgtggtggctgacaacttgcagcaaaccaatacagggcctattgtgggaaatgtcaacagccaaggagccttacctggcatggtctggcagaaccgagacgtgtacctgcagggtcccatctgggccaagattcctcacacggacggcaactgccacccttcaccgctaatgggaggatttggactgaagcacccacctcctcagatcctgatcaagaacacgccggtacctgcggatcctccaacaacgttcagccaggcgaaattggcttccttcattacgcagtacagcaccggacaggtcagcgtggaaatcgagtgggagctgcagaaggagaacagcaaacgctggaacccagagattcagtacacttcaaactactacaaatctacaaatgtggactttgctgtcaatacagagggaacttattctgagcctcgccccattggtactcgttacctcacccgtaatctgtaa

SEQ ID NO: 323 - protein, 735 aa, Adeno-associated virus
MAADGYLPDWLEDTLSEGTRQWWKLKPGPPPPKPAERHKDDSRGLVLPGYKYLGPFNGLDKGEPVNEADAAALEHDKAYDRQLDSGDNPYLKYNHADAEFQERLKEDTSFGGNLGRAVFQAKKRVLEPLGLVEEPVKTAPGKKRPVEHSPAEPDSSSGTGKAGQQPARKRLNFGQTGDADSVPDPQPLGQPPAAPSGLGSTTMATGSGAPMADNNEGADGVGNSSGNWHCDSQWLGDRVITTSTRTWALPTYNNHLYKQISSQSGASNDNHYFGYSTPWGYFDFNRFHCHFSPRDWQRLINNNWGFRPKRLNFKLFNIQVKEVTQNDGTTTIANNLTSTVQVFTDSEYQLPYVLGSAHQGCLPPFPADVFMVPQYGYLTLNNGSQAVGRSSFYCLEYFPSQMLRTGNNFQFSYTFEDVPFHSSYAHSQSLDRLMNPLIDQYLYYLNKTQSNSGTLQQSRLLFSQAGPTSMSLQAKNWLPGPCYRQQRLSKQANDNNNSNFPWTAATKYHLNGRDSLVNPGPAMASHKDDEEKFFPMHGTLIFGKQGTNANDADLDNVMITDEEEIRTTNPVATEQYGYVSNNLQNSNTGPTTGTVNHQGALPGMVWQDRDVYLQGPIWAKIPHTDGHFHPSPLMGGFGLKHPPPQIMIKNTPVPANPPTNFSSAKFASFITQYSTGQVSVEIEWELQKENSKRWNPEIQYTSNYNKSVNVDFTVDTNGVYSEPRPIGTRYLTRNL

SEQ ID NO: 324 - DNA, 2208 bp, Adeno-associated virus
atggctgccgatggttatcttccagattggctcgaggacactctctctgaaggaataagacagtggtggaagctcaaacctggcccaccaccaccaaagcccgcagagcggcatcaggacaacagcaggggtcttgtgcttcctgggtacaagtacctcggaccctccaacggactcgacaaaggagagccggtcaacgaggcagacgccgcggccctcgagcacgacaaggcctacgaccggcagctcgacagcggagacaacccgtacctcaagtacaaccacgccgacgcggagtttcaggagcgtcttaaagaagatacgtcttttgggggcaacctcggacgagcagtcttccaggcgaaaaagagggttcttgaacctctgggcctggttgaggaacctgttaagacggctccgggaaaaaagaggccggtagagcactctcctgtggagccagactcctcctcgggaaccggaaaagcgggccatcagcctgcgagaaagagattgaattttggtcagactggagacgcagactccgtacctgacccccagcctctcggacagccaccagcagcccccacaagtttgggatctactacaatggctacaggcagtggcgcaccaatggcagacaataacgagggtgccgatggagtgggtaattcctcaggaaattggcattgcgattcccaatggctgggcgacagagtcatcaccaccagcacccgaacctgggccctgcccacctacaacaaccacctctacaagcaaatctccagccaatcaggagcctcgaacgacaaccactactttggctgcagcaccccctgggggtattttgacttcaacagattccactgtcacttctccccacgtgattggcaaagactcatcaacaacaactggggattccgacccaagagactcaacttcaagctctttaacattcaagtcaaagaggtcacgcagaatgacggtacgacgacgattgccaataaccttaccagcacggttcaggtgtttactgactcggagtacccgctcccgtacgtcctcggctcggcgcatcaaggatgcctcccgccgtttccagcggacgtcttcatggtcccacagtatggatacctcaccctgaacaacgggagtcaggcggtaggacgctcttccttttactgcctggagtactttccttctcagatgctgcgtaccggaaacaactttaccttcagctacacctttgaggacgttcctttccacagcagctacgctcacagccagagtttggaccggctgatgaatcctctgatcgaccagtatctatattatctgaacaggacacaatcaaatagtggaactcttcagcagtctaggctactgtttagccaagctggacccaccagcatgtctcttcaagctaaaaactggctgcctggaccttgctacagacagcagcgtctttcaaagcaggcaaacgacaacaacaacagcaactttccctggactgcggctacaaagtatcatctaaatggccgggactcgttggttaatccaggaccagctatggccagccacaaagacgatgaagaaaagtttttccccatgcatggaaccctgatatttggtaaacaaggaacaaatgctaacgacgcggatttggagcatgttatgattacagatgaagaagaaatcaggaccaccaatcctgtggctacagagcagtacggaaacgtgtcaaataatttgcaaaactcaaatactggtccaactacagaaaatgtcaatcaccagggagcgttacctggtatggtgtggcaggatcgagacgtgtacctgcagggacccatttgggccaagattcctcacaccgacggacactttcacccttctccactgatgggaggttttggactcaaacacccgcctcctcaaatcatgatcaaaaacactcccgttccagccaatcctcccacaaacttcagttctgccaagtttgcttctttcatcacacagtattccacgggccaggtcagcgtggagattgagtgggagctgcagaaggagaacagcaaacgctggaaccccgagatccagtatacttccaactacaacaaatctgttaatgtggactttactgtggacactaatggtgtgtattcagagccttgccccattggcaccagatacctgactcgtaatctgtaa

SEQ ID NO: 325 - protein, 735 aa, Adeno-associated virus
MAADGYLPDWLEDTLSEGIRQWWKLKPGPPPPKPAERHQDNSRGLVLPGYKYLGPSNGLDKGEPVNEADAAALEHDKAYDRQLDSGDNPYLKYNHADAEFQERLKEDTSFGGNLGRAVFQAKKRVLEPLGLVEEPVKTAPGKKRPVEHSPVEPDSSSGTGKAGHQPARKRLNFGQTGDADSVPDPQPLGQPPAAPTSLGSTTMATGSGAPMADNNEGADGVGNSSGNWHCDSQWLGDRVITTSTRTWALPTYNNHLYKQISSQSGASNDNHYFGCSTPWGYFDFNRFHCHFSPRDWQRLINNNWGFRPKRLNFKLFNIQVKEVTQNDGTTTIANNLTSTVQVFTDSEYPLPYVLGSAHQGCLPPFPADVFMVPQYGYLTLNNGSQAVGRSSFYCLEYFPSQMLRTGNNFTFSYTFEDVPFHSSYAHSQSLDRLMNPLIDQYLYYLNRTQSNSGTLQQSRLLFSQAGPTSMSLQAKNWLPGPCYRQQRLSKQANDNNNSNFPWTAATKYHLNGRDSLVNPGPAMASHKDDEEKFFPMHGTLIFGKQGTNANDADLEHVMITDEEEIRTTNPVATEQYGNVSNNLQNSNTGPTTENVNHQGALPGMVWQDRDVYLQGPIWAKIPHTDGHFHPSPLMGGFGLKHPPPQIMIKNTPVPANPPTNFSSAKFASFITQYSTGQVSVEIEWELQKENSKRWNPEIQYTSNYNKSVNVDFTVDTNGVYSEPCPIGTRYLTRNL

SEQ ID NO: 326 - DNA, 2214 bp, Artificial Sequence
  Description of Artificial Sequence: Synthetic polynucleotide
atggctgccgatggttatcttccagattggctcgaggacaaccttagtgaaggaattcgcgagtggtgggctttgaaacctggagcccctcaacccaaggcaaatcaacaacatcaagacaacgctcgaggtcttgtgcttccgggttacaaataccttggacccggcaacggactcgacaagggggagccggtcaacgcagcagacgcggcggccctcgagcacgacaaggcctacgaccagcagctgcaggcgggtgacaatccgtacctgcggtataaccacgccgacgccgagtttcaggagcgtctgcaagaagatacgtcttttgggggcaaccttggcagagcagtcttccaggccaaaaagaggatccttgagcctcttggtctggttgaggaagcagctaaaacggctcctggaaagaagaggcctgtagatcagtctcctcaggaaccggactcatcatctggtgttggcaaatcgggcaaacagcctgccagaaaaagactaaatttcggtcagactggcgactcagagtcagtcccagaccctcaacctctcggagaaccaccagcagcccccacaagtttgggatctaatacaatggcttcaggcggtggcgcaccaatggcagacaataacgagggtgccgatggggtgggtagttcctcgggaaattggcattgcgattcccaatggctgggggacagagtcatcaccaccagcacccgaacctgggccctgcccacctacaacaatcacctctacaagcaaatctccaacgggacatcgggaggagccaccaacgacaacacctacttcggctacagcaccccctgggggtattttgactttaacagattccactgccacttttcaccacgtgactggcagcgactcatcaacaacaactggggattccggcccaagagactcagcttcaagctcttcaacatccaggtcaaggaggtcacgcagaatgaaggcaccaagaccatcgccaataacctcaccagcaccatccaggtgtttacggactcggagtaccagctgccgtacgttctcggctctgcgcaccagggctgcctccctccgttcccggcggacgtgttcatgattccgcaatacggctacctgacgctcaacaatggcagccaagccgtgggacgttcatccttttactgcctggaatatttcccttctcagatgctgagaacgggcaacaactttaccttcagctacacctttgaggaagtgcctttccacagcagctacgcgcacagccagagcttggaccggctgatgaatcctctgattgaccagtacctgtactacttgtctcggactcaaacaacaggaggcacggcaaatacgcagactctgggcttcagccaaggtgggcctaatacaatggccaatcaggcaaagaactggctgccaggaccctgttaccgccaacaacgcgtctcaacgacaaccgggcaaaacaacaatagcaactttgcctggactgctgggaccaaataccatctgaatggaagaaattcattggctaatcctggcatcgctatggcaacacacaaagacgacgaggagcgtttttttcccagtaacgggatcctgatttttggcaaacaaaatgctgccagagacaatgcggattacagcgatgtcatgctcaccagcgaggaagaaatcaaaaccactaaccctgtggctacagaggaatacggtatcgtggcagataacttgcagcagcaaaacacggctcctcaaattggaactgtcaacagccagggggccttacccggtatggtctggcagaaccgggacgtgtacctgcagggtcccatctgggccaagattcctcacacggacggcaacttccacccgtctccgctgatgggcggctttggcctgaaacatcctccgcctcagatcctgatcaagaacacgcctgtacctgcggatcctccgaccaccttcaaccagtcaaagctgaactctttcatcacgcaatacagcaccggacaggtcagcgtggagatcgagtgggagctgcagaaggaaaacagcaagcgctggaacccggagatccagtacacttccaactattacaagtctaataatgttgaatttgctgttaatactgaaggtgtatatagtgaaccccgccccattggcaccagatacctgactcgtaatctgtaa

SEQ ID NO: 327 - protein, 737 aa, Artificial Sequence
  Description of Artificial Sequence: Synthetic polypeptide
MAADGYLPDWLEDNLSEGIREWWALKPGAPQPKANQQHQDNARGLVLPGYKYLGPGNGLDKGEPVNAADAAALEHDKAYDQQLQAGDNPYLRYNHADAEFQERLQEDTSFGGNLGRAVFQAKKRILEPLGLVEEAAKTAPGKKRPVDQSPQEPDSSSGVGKSGKQPARKRLNFGQTGDSESVPDPQPLGEPPAAPTSLGSNTMASGGGAPMADNNEGADGVGSSSGNWHCDSQWLGDRVITTSTRTWALPTYNNHLYKQISNGTSGGATNDNTYFGYSTPWGYFDFNRFHCHFSPRDWQRLINNNWGFRPKRLSFKLFNIQVKEVTQNEGTKTIANNLTSTIQVFTDSEYQLPYVLGSAHQGCLPPFPADVFMIPQYGYLTLNNGSQAVGRSSFYCLEYFPSQMLRTGNNFTFSYTFEEVPFHSSYAHSQSLDRLMNPLIDQYLYYLSRTQTTGGTANTQTLGFSQGGPNTMANQAKNWLPGPCYRQQRVSTTTGQNNNSNFAWTAGTKYHLNGRNSLANPGIAMATHKDDEERFFPSNGILIFGKQNAARDNADYSDVMLTSEEEIKTTNPVATEEYGIVADNLQQQNTAPQIGTVNSQGALPGMVWQNRDVYLQGPIWAKIPHTDGNFHPSPLMGGFGLKHPPPQILIKNTPVPADPPTTFNQSKLNSFITQYSTGQVSVEIEWELQKENSKRWNPEIQYTSNYYKSNNVEFAVNTEGVYSEPRPIGTRYLTRNL

SEQ ID NO: 328 - DNA, 2211 bp, Artificial Sequence
  Description of Artificial Sequence: Synthetic polynucleotide
atggctgccgatggttatcttccagattggctcgaggacaacctctctgagggcattcgcgagtggtgggacttgaaacctggagccccgaagcccaaagccaaccagcaaaagcaggacgacggccggggtctggtgcttcctggctacaagtacctcggacccttcaacggactcgacaagggggagcccgtcaacgcggcggacgcagcggccctcgagcacgacaaggcctacgaccagcagctcaaagcgggtgacaatccgtacctgcggtataaccacgccgacgccgagtttcaggagcgtctgcaagaagatacgtcttttgggggcaacctcgggcgagcagtcttccaggccaagaagcgggttctcgaacctctcggtctggttgaggaaggcgctaagacggctcctggaaagaaacgtccggtagagcagtcgccacaagagccagactcctcctcgggcatcggcaagacaggccagcagcccgctaaaaagagactcaattttggtcagactggcgactcagagtcagtccccgacccacaacctctcggagaacctccagcaacccccgctgctgtgggacctactacaatggcttcaggcggtggcgcaccaatggcagacaataacgaaggcgccgacggagtgggtaatgcctcaggaaattggcattgcgattccacatggctgggcgacagagtcatcaccaccagcacccgaacatgggccttgcccacctataacaaccacctctacaagcaaatctccagtgcttcaacgggggccagcaacgacaaccactacttcggctacagcaccccctgggggtattttgatttcaacagattccactgccatttctcaccacgtgactggcagcgactcatcaacaacaattggggattccggcccaagagactcaacttcaagctcttcaacatccaagtcaaggaggtcacgacgaatgatggcgtcacgaccatcgctaataaccttaccagcacggttcaagtcttctcggactcggagtaccagctgccgtacgttctcggctctgcccaccagggctgcctgcctccgttcccggcggacgtgttcatgattccccagtacggctacctaacactcaacaacggtagtcaggccgtgggacgctcctccttctactgcctggaatactttccttcgcagatgctgagaaccggcaacaacttccagtttacttacaccttcgaggacgtgcctttccacagcagctacgcccacagccagagcttggaccggctgatgaatcctctgattgaccagtacctgtactacttgtctcggactcaaacaacaggaggcacggcaaatacgcagactctgggcttcagccaaggtgggcctaatacaatggccaatcaggcaaagaactggctgccaggaccctgttaccgccaacaacgcgtctcaacgacaaccgggcaaaacaacaatagcaattttacctggactggtgcttcaaaatataacctcaatgggcgtgaatccatcatcaaccctggcactgctatggcctcacacaaagacgacgaagacaagttctttcccatgagcggtgtcatgatttttggaaaagagagcgccggagcttcaaacactgcattggacaatgtcatgattacagacgaagaggaaattaaagccactaaccctgtggccaccgaaagatttgggaccgtggcagtcaatttccagagcagcagcacagaccctgcgaccggagatgtgcatgctatgggagcattacctggcatggtgtggcaagatagagacgtgtacctgcagggtcccatttgggccaaaattcctcacacagatggacactttcacccgtctcctcttatgggcggctttggactcaagaacccgcctcctcagatcctcatcaaaaacacgcctgttcctgcgaatcctccggcggagttttcagctacaaagtttgcttcattcatcacccaatactccacaggacaagtgagtgtggaaattgaatgggagctgcagaaagaaaacagcaagcgctggaatcccgaagtgcagtacacatccaattatgcaaaatctgccaacgttgattttactgtggacaacaatggactttatactgagcctcgccccattggcacccgttacctcacccgtcccctgtaa

SEQ ID NO: 329 - protein, 736 aa, Artificial Sequence
  Description of Artificial Sequence: Synthetic polypeptide
MAADGYLPDWLEDNLSEGIREWWDLKPGAPKPKANQQKQDDGRGLVLPGYKYLGPFNGLDKGEPVNAADAAALEHDKAYDQQLKAGDNPYLRYNHADAEFQERLQEDTSFGGNLGRAVFQAKKRVLEPLGLVEEGAKTAPGKKRPVEQSPQEPDSSSGIGKTGQQPAKKRLNFGQTGDSESVPDPQPLGEPPATPAAVGPTTMASGGGAPMADNNEGADGVGNASGNWHCDSTWLGDRVITTSTRTWALPTYNNHLYKQISSASTGASNDNHYFGYSTPWGYFDFNRFHCHFSPRDWQRLINNNWGFRPKRLNFKLFNIQVKEVTTNDGVTTIANNLTSTVQVFSDSEYQLPYVLGSAHQGCLPPFPADVFMIPQYGYLTLNNGSQAVGRSSFYCLEYFPSQMLRTGNNFQFTYTFEDVPFHSSYAHSQSLDRLMNPLIDQYLYYLSRTQTTGGTANTQTLGFSQGGPNTMANQAKNWLPGPCYRQQRVSTTTGQNNNSNFTWTGASKYNLNGRESIINPGTAMASHKDDEDKFFPMSGVMIFGKESAGASNTALDNVMITDEEEIKATNPVATERFGTVAVNFQSSSTDPATGDVHAMGALPGMVWQDRDVYLQGPIWAKIPHTDGHFHPSPLMGGFGLKNPPPQILIKNTPVPANPPAEFSATKFASFITQYSTGQVSVEIEWELQKENSKRWNPEVQYTSNYAKSANVDFTVDNNGLYTEPRPIGTRYLTRPL

SEQ ID NO: 330 - DNA, 2211 bp, Artificial Sequence
  Description of Artificial Sequence: Synthetic polynucleotide
atggctgctgacggttatcttccagattggctcgaggacaacctttctgaaggcattcgagagtggtgggcgctgcaacctggagcccctaaacccaaggcaaatcaacaacatcaggacaacgctcggggtcttgtgcttccgggttacaaatacctcggacccggcaacggactcgacaagggggaacccgtcaacgcagcggacgcggcagccctcgagcacgacaaggcctacgaccagcagctcaaggccggtgacaacccctacctcaagtacaaccacgccgacgccgagttccaggagcggctcaaagaagatacgtcttttgggggcaacctcgggcgagcagtcttccaggccaaaaagaggcttcttgaacctcttggtctggttgaggaagcggctaagacggctcctggaaagaagaggcctgtagatcagtctcctcaggaaccggactcatcatctggtgttggcaaatcgggcaaacagcctgccagaaaaagactaaatttcggtcagactggcgactcagagtcagtcccagaccctcaacctctcggagaaccaccagcagcccccacaagtttgggatctaatacaatggcttcaggcggtggcgcaccaatggcagacaataacgagggtgccgatggagtgggtaattcctcaggaaattggcattgcgattcccaatggctgggcgacagagtcatcaccaccagcaccagaacctgggccctgcccacttacaacaaccatctctacaagcaaatctccagccaatcaggagcttcaaacgacaaccactactttggctacagcaccccttgggggtattttgactttaacagattccactgccacttctcaccacgtgactggcagcgactcattaacaacaactggggattccggcccaagaaactcagcttcaagctcttcaacatccaagttaaagaggtcacgcagaacgatggcacgacgactattgccaataaccttaccagcacggttcaagtgtttacggactcggagtatcagctcccgtacgtgctcgggtcggcgcaccaaggctgtctcccgccgtttccagcggacgtcttcatggtccctcagtatggatacctcaccctgaacaacggaagtcaagcggtgggacgctcatccttttactgcctggagtacttcccttcgcagatgctaaggactggaaataacttccaattcagctataccttcgaggatgtaccttttcacagcagctacgctcacagccagagtttggatcgcttgatgaatcctcttattgatcagtatctgtactacctgaacagaacgcaaggaacaacctctggaacaaccaaccaatcacggctgctttttagccaggctgggcctcagtctatgtctttgcaggccagaaattggctacctgggccctgctaccggcaacagagactttcaaagactgctaacgacaacaacaacagtaactttccttggacagcggccagcaaatatcatctcaatggccgcgactcgctggtgaatccaggaccagctatggccagtcacaaggacgatgaagaaaaatttttccctatgcacggcaatctaatatttggcaaagaagggacaacggcaagtaacgcagaattagataatgtaatgattacggatgaagaagagattcgtaccaccaatcctgtggcaacagagcagtatggaactgtggcaaataacttgcagagctcaaatacagctcccacgactagaactgtcaatgatcagggggccttacctggcatggtgtggcaagatcgtgacgtgtaccttcaaggacctatctgggcaaagattcctcacacggatggacactttcatccttctcctctgatgggaggctttggactgaaacatccgcctcctcaaatcatgatcaaaaatactccggtaccggcaaatcctccgacgactttcagcccggccaagtttgcttcatttatcactcagtactccactggacaggtcagcgtggaaattgagtgggagctacagaaagaaaacagcaaacgttggaatccagagattcagtacacttccaactacaacaagtctgttaatgtggactttactgtagacactaatggtgtttatagtgaacctcgccccattggcacccgttaccttacccgtcccctgtaa

SEQ ID NO: 331 - protein, 736 aa, Artificial Sequence
  Description of Artificial Sequence: Synthetic polypeptide
MAADGYLPDWLEDNLSEGIREWWALQPGAPKPKANQQHQDNARGLVLPGYKYLGPGNGLDKGEPVNAADAAALEHDKAYDQQLKAGDNPYLKYNHADAEFQERLKEDTSFGGNLGRAVFQAKKRLLEPLGLVEEAAKTAPGKKRPVDQSPQEPDSSSGVGKSGKQPARKRLNFGQTGDSESVPDPQPLGEPPAAPTSLGSNTMASGGGAPMADNNEGADGVGNSSGNWHCDSQWLGDRVITTSTRTWALPTYNNHLYKQISSQSGASNDNHYFGYSTPWGYFDFNRFHCHFSPRDWQRLINNNWGFRPKKLSFKLFNIQVKEVTQNDGTTTIANNLTSTVQVFTDSEYQLPYVLGSAHQGCLPPFPADVFMVPQYGYLTLNNGSQAVGRSSFYCLEYFPSQMLRTGNNFQFSYTFEDVPFHSSYAHSQSLDRLMNPLIDQYLYYLNRTQGTTSGTTNQSRLLFSQAGPQSMSLQARNWLPGPCYRQQRLSKTANDNNNSNFPWTAASKYHLNGRDSLVNPGPAMASHKDDEEKFFPMHGNLIFGKEGTTASNAELDNVMITDEEEIRTTNPVATEQYGTVANNLQSSNTAPTTRTVNDQGALPGMVWQDRDVYLQGPIWAKIPHTDGHFHPSPLMGGFGLKHPPPQIMIKNTPVPANPPTTFSPAKFASFITQYSTGQVSVEIEWELQKENSKRWNPEIQYTSNYNKSVNVDFTVDTNGVYSEPRPIGTRYLTRPL

SEQ ID NO: 332 - DNA, 2211 bp, Artificial Sequence
  Description of Artificial Sequence: Synthetic polynucleotide
atggctgccgatggttatcttccagattggctcgaggacaaccttagtgaaggaattcgcgagtggtgggctttgaaacctggagcccctcaacccaaggcaaatcaacaacatcaagacaacgctcgaggtcttgtgcttccgggttacaaataccttggacccggcaacggactcgacaagggggagccggtcaacgcagcagacgcggcggccctcgagcacgacaaggcctacgaccagcagctcaaggccggagacaacccgtacctcaagtacaaccacgccgacgccgagttccaggagcggctcaaagaagatacgtcttttgggggcaacctcgggcgagcagtcttccaggccaaaaagaggcttcttgaacctcttggtctggttgaggaagcggctaagacggctcctggaaagaagagaccggtagagccatcaccccagcgttctccagactcctctacgggcatcggcaagaaaggccaacagcccgctaaaaagagactcaattttggtcagactggcgactcagagtcagtccccgacccacaacctctcggagaacctccagcaacccccgctgctgtgggacctactacaatggcttcaggcggtggcgcaccaatggcagacaataacgagggtgccgatggagtgggtaattcctcaggaaattggcattgcgattcccaatggctgggcgacagagtcatcaccaccagcaccagaacctgggccctgcccacttacaacaaccatctctacaagcaaatctccagccaatcaggagcttcaaacgacaaccactactttggctacagcaccccttgggggtattttgactttaacagattccactgccacttttcaccacgtgactggcaaagactcatcaacaacaactggggattccgacccaagagactcaacttcaagctcttcaacatccaagtcaaggaggtcacgacgaatgatggcgtcacgaccatcgctaataaccttaccagcacggttcaagtcttctcggactcggagtaccagttgccgtacgtcctcggctctgcgcaccagggctgcctccctccgttcccggcggacgtgttcatgattccgcagtacggctacctaacgctcaacaatggcagccaagccgtgggacgttcatccttttactgcctggaatatttcccttctcagatgctgagaacgggcaacaactttaccttcagctacacttttgaggacgttcctttccacagcagctacgctcacagccagagtctggaccgtctcatgaatcctctcatcgaccagtacctgtattacttgagcagaacaaacactccaagtggaaccaccacgcagtcaaggcttcagttttctcaggccggagcgagtgacattcgggaccagtctaggaactggcttcctggaccctgttaccgccagcagcgcgtttctaaaacaaaaacagacaacaacaacagcaattttacctggactggtgcttcaaaatataaccttaatgggcgtgaatctataatcaaccctggcactgctatggcctcacacaaagacgacgaagacaagttctttcccatgagcggtgtcatgatttttggaaaagagagcgccggagcttcaaacactgcattggacaatgtcatgattacagacgaagaggaaattaaagccactaaccctgtggccaccgaaagatttgggaccgtggcagtcaatttccagagcagcagcacagaccctgcgaccggagatgtgcatgttatgggagccttacctggaatggtgtggcaagacagagacgtatacctgcagggtcctatttgggccaaaattcctcacacggatggacactttcacccgtctcctcttatgggcggctttggactcaagaacccgcctcctcagatcctcatcaaaaacacgcctgttcctgcgaatcctccggcggagttttcagctacaaagtttgcttcattcatcacccaatactccacaggacaagtgagtgtggaaattgaatgggagctgcagaaagaaaacagcaagcgctggaatcccgaagtgcagtacacatccaattatgcaaaatctgccaacgttgattttactgtggacaacaatggactttatactgagcctcgccccattggcacccgttaccttacccgtcccctgtaa

SEQ ID NO: 333 - protein, 736 aa, Artificial Sequence
  Description of Artificial Sequence: Synthetic polypeptide
MAADGYLPDWLEDNLSEGIREWWALKPGAPQPKANQQHQDNARGLVLPGYKYLGPGNGLDKGEPVNAADAAALEHDKAYDQQLKAGDNPYLKYNHADAEFQERLKEDTSFGGNLGRAVFQAKKRLLEPLGLVEEAAKTAPGKKRPVEPSPQRSPDSSTGIGKKGQQPAKKRLNFGQTGDSESVPDPQPLGEPPATPAAVGPTTMASGGGAPMADNNEGADGVGNSSGNWHCDSQWLGDRVITTSTRTWALPTYNNHLYKQISSQSGASNDNHYFGYSTPWGYFDFNRFHCHFSPRDWQRLINNNWGFRPKRLNFKLFNIQVKEVTTNDGVTTIANNLTSTVQVFSDSEYQLPYVLGSAHQGCLPPFPADVFMIPQYGYLTLNNGSQAVGRSSFYCLEYFPSQMLRTGNNFTFSYTFEDVPFHSSYAHSQSLDRLMNPLIDQYLYYLSRTNTPSGTTTQSRLQFSQAGASDIRDQSRNWLPGPCYRQQRVSKTKTDNNNSNFTWTGASKYNLNGRESIINPGTAMASHKDDEDKFFPMSGVMIFGKESAGASNTALDNVMITDEEEIKATNPVATERFGTVAVNFQSSSTDPATGDVHVMGALPGMVWQDRDVYLQGPIWAKIPHTDGHFHPSPLMGGFGLKNPPPQILIKNTPVPANPPAEFSATKFASFITQYSTGQVSVEIEWELQKENSKRWNPEVQYTSNYAKSANVDFTVDNNGLYTEPRPIGTRYLTRPL

SEQ ID NO: 334 - DNA, 2211 bp, Artificial Sequence
  Description of Artificial Sequence: Synthetic polynucleotide
atggctgccgatggttatcttccagattggctcgaggacaacctctctgagggcattcgcgagtggtgggacttgaaacctggagcccctaaacccaaggcaaatcaacaacatcaggacaacgctcgaggtcttgtgcttccgggttacaaataccttggacccggcaacggactcgacaagggggagccggtcaacgcagcagacgcggcggccctcgagcacgacaaggcctacgaccagcagctcaaggccggagacaacccgtacctcaagtacaaccacgccgacgccgagttccaggagcggctcaaagaagatacgtcttttgggggcaacctcgggcgagcagtcttccaggccaaaaagaggcttcttgaacctcttggtctggttgaggaagcggctaagacggctcctggaaagaagagaccggtagagccatcaccccagcgttctccagactcctctacgggcatcggcaagaaaggccaacagcccgctaaaaagagactcaattttggtcagactggcgactcagagtcagtccccgacccacaacctctcggagaacctccagcaacccccgctgctgtgggacctactacaatggcttcaggcggtggcgcaccaatggcagacaataacgagggtgccgatggagtgggtaattcctcaggaaattggcattgcgattcccaatggctgggcgacagagtcatcaccaccagcaccagaacctgggccctgcccacttacaacaaccatctctacaagcaaatctccagccaatcaggagcttcaaacgacaaccactactttggctacagcaccccttgggggtattttgactttaacagattccactgccacttttcaccacgtgactggcaaagactcatcaacaacaactggggattccgacccaagagactcaacttcaagctcttcaacatccaagtcaaggaggtcacgacgaatgatggcgtcacgaccatcgctaataaccttaccagcacggttcaagtcttctcggactcggagtaccagttgccgtacgtcctcggctctgcgcaccagggctgcctccctccgttcccggcggacgtgttcatgattccgcagtacggctacctaacgctcaacaatggcagccaagccgtgggacgttcatccttttactgcctggaatatttcccttctcagatgctgagaacgggcaacaactttaccttcagctacacttttgaggacgttcctttccacagcagctacgctcacagccagagtctggaccgtctcatgaatcccctcatcgaccagtacctgtattacttgagcagaacaaacactccaagtggaaccaccacgcagtcaaggcttcagttttctcaggccggagcgagtgacattcgggaccagtctaggaactggcttcctggaccctgttaccggcagcagcgcgtttctaaaacaaaaacagacaacaacaacagcaactttacctggactggtgcttcaaaatataaccttaatgggcgtgaatctataatcaaccctggcactgctatggcctcacacaaagacgacgaagacaagttctttcccatgagcggtgtcatgatttttggaaaggagagcgccggagcttcaaacactgcattggacaatgtcatgatcacagacgaagaggaaatcaaagccactaaccccgtggccaccgaaagatttgggactgtggcagtcaatctccagagcagcagcacagaccctgcgaccggagatgtgcatgttatgggagccttacctggaatggtgtggcaagacagagacgtgtacctgcagggtcctatttgggccaaaattcctcacacggatggacactttcacccgtctcctctcatgggcggctttggacttaagcacccgcctcctcagatcctcatcaaaaacacgcctgttcctgcgaatcctccggcagagttttcggctacaaagtttgcttcattcatcacccagtattccacaggacaagtgagtgtggaaattgaatgggagctgcagaaagaaaacagcaagcgctggaatcccgaagtgcagtacacatccaattatgcaaaatctgccaacgttgattttactgtggacaacaatggactttatactgagcctcgccccattggcacccgttacctcacccgtcccctgtaa

SEQ ID NO: 335 - protein, 736 aa, Artificial Sequence
  Description of Artificial Sequence: Synthetic polypeptide
MAADGYLPDWLEDNLSEGIREWWDLKPGAPKPKANQQHQDNARGLVLPGYKYLGPGNGLDKGEPVNAADAAALEHDKAYDQQLKAGDNPYLKYNHADAEFQERLKEDTSFGGNLGRAVFQAKKRLLEPLGLVEEAAKTAPGKKRPVEPSPQRSPDSSTGIGKKGQQPAKKRLNFGQTGDSESVPDPQPLGEPPATPAAVGPTTMASGGGAPMADNNEGADGVGNSSGNWHCDSQWLGDRVITTSTRTWALPTYNNHLYKQISSQSGASNDNHYFGYSTPWGYFDFNRFHCHFSPRDWQRLINNNWGFRPKRLNFKLFNIQVKEVTTNDGVTTIANNLTSTVQVFSDSEYQLPYVLGSAHQGCLPPFPADVFMIPQYGYLTLNNGSQAVGRSSFYCLEYFPSQMLRTGNNFTFSYTFEDVPFHSSYAHSQSLDRLMNPLIDQYLYYLSRTNTPSGTTTQSRLQFSQAGASDIRDQSRNWLPGPCYRQQRVSKTKTDNNNSNFTWTGASKYNLNGRESIINPGTAMASHKDDEDKFFPMSGVMIFGKESAGASNTALDNVMITDEEEIKATNPVATERFGTVAVNLQSSSTDPATGDVHVMGALPGMVWQDRDVYLQGPIWAKIPHTDGHFHPSPLMGGFGLKHPPPQILIKNTPVPANPPAEFSATKFASFITQYSTGQVSVEIEWELQKENSKRWNPEVQYTSNYAKSANVDFTVDNNGLYTEPRPIGTRYLTRPL

SEQ ID NO: 336 - DNA, 2214 bp, Artificial Sequence
  Description of Artificial Sequence: Synthetic polynucleotide
atggctgccgatggttatcttccagattggctcgaggacaaccttagtgaaggaattcgcgagtggtgggctttgaaacctggagcccctcaacccaaggcaaatcaacaacatcaagacaacgctcgaggtcttgtgcttccgggttacaaataccttggacccggcaacggactcgacaagggggagccggtcaacgcagcagacgcggcggccctcgagcacgacaaggcctacgaccagcagctgcaggcgggtgacaatccgtacctgcggtataaccacgccgacgccgagtttcaggagcgtctgcaagaagatacgtcttttgggggcaaccttggcagagcagtcttccaggccaaaaagaggatccttgagcctcttggtctggttgaggaagcagctaaaacggctcctggaaagaagaggcctgtagatcagtctcctcaggaaccggactcatcatctggtgttggcaaatcgggcaaacagcctgccagaaaaagactaaatttcggtcagactggcgactcagagtcagtcccagaccctcaacctctcggagaaccaccagcagcccccacaagtttgggatctaatacaatggcttcaggcggtggcgcaccaatggcagacaataacgagggtgccgatggggtgggtagttcctcgggaaattggcattgcgattcccaatgactgggggacagagtcatcaccaccagcacccgaacctgggccctgcccacctacaacaatcacctctacaagcaaatctccaacgggacatcgggaggagccaccaacgacaacacctacttcggctacagcaccccctgggggtattttgactttaacagattccactgccacttttcaccacgtgactggcagcgactcatcaacaacaactggggattccggcccaagagactcagcttcaagctcttcaacatccaggtcaaggaggtcacgcagaatgaaggcaccaagaccatcgccaataacctcaccagcaccatccaggtgtttacggactcggagtaccagctgccgtacgttctcggctctgcgcaccagggctgcctccctccgttcccggcggacgtgttcatgattccgcaatacggctacctgacgctcaacaatggcagccaagccgtgggacgttcatccttttactgcctggaatatttcccttctcagatgctgagaacgggcaacaactttaccttcagctacacctttgaggaagtgcctttccacagcagctacgcgcacagccagagcttggaccggctgatgaatcctctgattgaccagtacctgtactacttgtctcggactcaaacaacaggaggcacggcaaatacgcagactctgggcttcagccaaggtgggcctaatacaatggccaatcaggcaaagaactggctgccaggaccctgttaccgccaacaacgcgtctcaacgacaaccgggcaaaacaacaatagcaactttgcctggactgctgggaccaaataccatctgaatggaagaaattcattggctaatcctggcatcgctatggcaacacacaaagacgacgaggagcgtttttttcccagtaacgggatcctgatttttggcaaacaaaatgctgccagagacaatgcggattacagcgatgtcatgctcaccagcgaggaagaaatcaaaaccactaaccctgtggctacagaggaatacggtatcgtggcagataacttgcagcagcaaaacacggctcctcaaattggaactgtcaacagccagggggccttacccggtatggtctggcagaaccgggacgtgtacctgcagggtcccatctgggccaagattcctcacacggacggcaacttccacccgtctccgctgatgggcggctttggcctgaaacatcctccgcctcagatcctgatcaagaacacgcctgtacctgcggatcctccgaccaccttcaaccagtcaaagctgaactctttcatcacgcaatacagcaccggacaggtcagcgtggagatcgagtgggagctgcagaaggaaaacagcaagcgctggaacccggagatccagtacacttccaactattacaagtctaataatgttgaatttgctgttaatactgaaggtgtatatagtgaaccccgccccattggcaccagatacctgactcgtaatctgtaa

SEQ ID NO: 337 - protein, 736 aa, Artificial Sequence
  Description of Artificial Sequence: Synthetic polypeptide
MAADGYLPDWLEDNLSEGIREWWALKPGAPQPKANQQHQDNARGLVLPGYKYLGPGNGLDKGEPVNAADAAALEHDKAYDQQLQAGDNPYLRYNHADAEFQERLQEDTSFGGNLGRAVFQAKKRILEPLGLVEEAAKTAPGKKRPVDQSPQEPDSSSGVGKSGKQPARKRLNFGQTGDSESVPDPQPLGEPPAAPTSLGSNTMASGGGAPMADNNEGADGVGSSSGNWHCDSQLGDRVITTSTRTWALPTYNNHLYKQISNGTSGGATNDNTYFGYSTPWGYFDFNRFHCHFSPRDWQRLINNNWGFRPKRLSFKLFNIQVKEVTQNEGTKTIANNLTSTIQVFTDSEYQLPYVLGSAHQGCLPPFPADVFMIPQYGYLTLNNGSQAVGRSSFYCLEYFPSQMLRTGNNFTFSYTFEEVPFHSSYAHSQSLDRLMNPLIDQYLYYLSRTQTTGGTANTQTLGFSQGGPNTMANQAKNWLPGPCYRQQRVSTTTGQNNNSNFAWTAGTKYHLNGRNSLANPGIAMATHKDDEERFFPSNGILIFGKQNAARDNADYSDVMLTSEEEIKTTNPVATEEYGIVADNLQQQNTAPQIGTVNSQGALPGMVWQNRDVYLQGPIWAKIPHTDGNFHPSPLMGGFGLKHPPPQILIKNTPVPADPPTTFNQSKLNSFITQYSTGQVSVEIEWELQKENSKRWNPEIQYTSNYYKSNNVEFAVNTEGVYSEPRPIGTRYLTRNL

SEQ ID NO: 338 - DNA, 2214 bp, Artificial Sequence
  Description of Artificial Sequence: Synthetic polynucleotide
atggctgccgatggttatcttccagattggctcgaggacaaccttagtgaaggaattcgcgagtggtgggctttgaaacctggagcccctcaacccaaggcaaatcaacaacatcaagacaacgctcgaggtcttgtgcttccgggttacaaataccttggacccggcaacggactcgacaagggggagccggtcaacgcagcagacgcggcggccctcgagcacgacaaggcctacgaccagcagctgcaggcgggtgacaatccgtacctgcggtataaccacgccgacgccgagtttcaggagcgtctgcaagaagatacgtcttttgggggcaaccttggcagagcagtcttccaggccaaaaagaggatccttgagcctcttggtctggttgaggaagcagctaaaacggctcctggaaagaagaggcctgtagatcagtctcctcaggaaccggactcatcatctggtgttggcaaatcgggcaaacagcctgccagaaaaagactaaatttcggtcagactggcgactcagagtcagtcccagaccctcaacctctcggagaaccaccagcagcccccacaagtttgggatctaatacaatggcttcaggcggtggcgcaccaatggcagacaataacgagggtgccgatggggtgggtagttcctcgggaaattggcattgcgattcccaatggctgggggacagagtcatcaccaccagcacccgaacctgggccctgcccacctacaacaatcacctctacaagcaaatctccaacgggacatcgggaggagccaccaacgacaacacctacttcggctacagcaccccctgggggtattttgactttaacagattccactgccacttttcaccacgtgactggcagcgactcatcaacaacaactggggattccggcccaagagactcagcttcaagctcttcaacatccaggtcaaggaggtcacgcagaatgaaggcaccaagaccatcgccaataacctcaccagcaccatccaggtgtttacggactcggagtaccagctgccgtacgttctcggctctgcgcaccagggctgcctccctccgttcccggcggacgtgttcatgattccgcaatacggctacctgacgctcaacaatggcagccaagccgtgggacgttcatccttttactgcctggaatatttcccttctcagatgctgagaacgggcaacaactttaccttcagctacacctttgaggaagtgccttttcacagcagctacgcgcacagccagagcttggaccggctgatgaatcctctgattgaccagtacctgtactacttgtctcggactcaaacaacaggaggcacggcaaatacgcagactctgggcttcagccaaggtgggcctaatacaatggccaatcaggcaaagaactggctgccaggaccctgttaccgccaacaacgcgtctcaacgacaaccgggcaaaacaacaatagcaactttgcctggactgctgggaccaaataccatctgaatggaagaaattcattggctaatcctggcatcgctatggcaacacacaaagacgacgaggagcgtttttttcccagtaacgggatcctgatttttggcaaacaaaatgctgccagagacaatgcggattacagcgatgtcatgctcaccagcgaggaagaaatcaaaaccactaaccctgtggctacagaggaatacggtatcgtggcagataacttgcagcagcaaaacacggctcctcaaattggaactgtcaacagccagggggccttacccggtatggtctggcagaaccgggacgtgtacctgcagggtcccatctgggccaagattcctcacacggacggcaacttccacccgtctccgctgatgggcggctttggcctgaaacatcctccgcctcagatcctgatcaagaacacgcctgtacctgcggatcctccgaccaccttcaaccagtcaaagctgaactctttcatcacgcaatacagcaccggacaggtcagcgtggagatcgagtgggagctgcagaaggaaaacagcaagcgctggaacccggagatccagtacacttccaactattacaagtctaataatgttgaatttgctgttaatactgaaggtgtatatagtgaaccccgccccattggcaccagatacctgactcgtaatctgtaa

SEQ ID NO: 339 - protein, 737 aa, Artificial Sequence; identical to SEQ ID NO: 327
  Description of Artificial Sequence: Synthetic polypeptide

SEQ ID NO: 340 - DNA, 2211 bp, Artificial Sequence
  Description of Artificial Sequence: Synthetic polynucleotide
atggctgccgatggttatcttccagattggctcgaggacaacctctctgagggcattcgcgagtggtgggacttgaaacctggagcccctaaacccaaggcaaatcaacaacatcaggacaacgctcgaggtcttgtgcttccgggttacaaataccttggacccggcaacggactcgacaagggggagccggtcaacgcagcagacgcggcggccctcgagcacgacaaggcctacgaccagcagctcaaggccggagacaacccgtacctcaagtacaaccacgccgacgccgagttccaggagcggctcaaagaagatacgtcttttgggggcaacctcgggcgagcagtcttccaggccaaaaagaggcttcttgaacctcttggtctggttgaggaagcggctaagacggctcctggaaagaagagaccggtagagccatcaccccagcgttctccagactcctctacgggcatcggcaagaaaggccaacagcccgctaaaaagagactcaattttggtcagactggcgactcagagtcagtccccgacccacaacctctcggagaacctccagcaacccccgctgctgtgggacctactacaatggcttcaggcggtggcgcaccaatggcagacaataacgagggtgccgatggagtgggtaattcctcaggaaattggcattgcgattcccaatggctgggcgacagagtcatcaccaccagcaccagaacctgggccctgcccacttacaacaaccatctctacaagcaaatctccagccaatcaggagcttcaaacgacaaccactactttggctacagcaccccttgggggtattttgactttaacagattccactgccacttttcaccacgtgactggcaaagactcatcaacaacaactggggattccgacccaagagactcaacttcaagctcttcaacatccaagtcaaggaggtcacgacgaatgatggcgtcacgaccatcgctaataaccttaccagcacggttcaagtcttctcggactcggagtaccagttgccgtacgtcctcggctctgcgcaccagggctgcctccctccgttcccggcggacgtgttcatgattccgcagtacggctacctaacgctcaacaatggcagccaagccgtgggacgttcatccttttactgcctggaatatttcccttctcagatgctgagaacgggcaacaactttaccttcagctacacttttgaggacgttcctttccacagcagctacgctcacagccagagtctggaccgtctcatgaatcctctcatcgaccagtacctgtattacttgagcagaacaaacactccaagtggaaccaccacgcagtcaaggcttcagttttctcaggccggagcgagtgacattcgggaccagtctaggaactggcttcctggaccctgttaccgccagcagcgcgtttctaaaacaaaaacagacaacaacaacagcaattttacctggactggtgcttcaaaatataaccttaatgggcgtgaatctataatcaaccctggcactgctatggcctcacacaaagacgacgaagacaagttctttcccatgagcggtgtcatgatttttggaaaagagagcgccggagcttcaaacactgcattggacaatgtcatgattacagacgaagaggaaattaaagccactaaccctgtggccaccgaaagatttgggaccgtggcagtcaatttccagagcagcagcacagaccctgcgaccggagatgtgcatgctatgggagcattacctggcatggtgtggcaagatagagacgtgtacctgcagggtcccatttgggccaaaattcctcacacagatggacactttcacccgtctcctcttatgggcggctttggactcaagaacccgcctcctcagatcctcatcaaaaacacgcctgttcctgcgaatcctccggcggagttttcagctacaaagtttgcttcattcatcacccaatactccacaggacaagtgagtgtggaaattgaatgggagctgcagaaagaaaacagcaagcgctggaatcccgaagtgcagtacacatccaattatgcaaaatctgccaacgttgattttactgtggacaacaatggactttatactgagcctcgccccattggcacccgttaccttacccgtcccctgtaa

SEQ ID NO: 341 - protein, 736 aa, Artificial Sequence
  Description of Artificial Sequence: Synthetic polypeptide
MAADGYLPDWLEDNLSEGIREWWDLKPGAPKPKANQQHQDNARGLVLPGYKYLGPGNGLDKGEPVNAADAAALEHDKAYDQQLKAGDNPYLKYNHADAEFQERLKEDTSFGGNLGRAVFQAKKRLLEPLGLVEEAAKTAPGKKRPVEPSPQRSPDSSTGIGKKGQQPAKKRLNFGQTGDSESVPDPQPLGEPPATPAAVGPTTMASGGGAPMADNNEGADGVGNSSGNWHCDSQWLGDRVITTSTRTWALPTYNNHLYKQISSQSGASNDNHYFGYSTPWGYFDFNRFHCHFSPRDWQRLINNNWGFRPKRLNFKLFNIQVKEVTTNDGVTTIANNLTSTVQVFSDSEYQLPYVLGSAHQGCLPPFPADVFMIPQYGYLTLNNGSQAVGRSSFYCLEYFPSQMLRTGNNFTFSYTFEDVPFHSSYAHSQSLDRLMNPLIDQYLYYLSRTNTPSGTTTQSRLQFSQAGASDIRDQSRNWLPGPCYRQQRVSKTKTDNNNSNFTWTGASKYNLNGRESIINPGTAMASHKDDEDKFFPMSGVMIFGKESAGASNTALDNVMITDEEEIKATNPVATERFGTVAVNFQSSSTDPATGDVHAMGALPGMVWQDRDVYLQGPIWAKIPHTDGHFHPSPLMGGFGLKNPPPQILIKNTPVPANPPAEFSATKFASFITQYSTGQVSVEIEWELQKENSKRWNPEVQYTSNYAKSANVDFTVDNNGLYTEPRPIGTRYLTRPL

SEQ ID NO: 342 - DNA, 2211 bp, Artificial Sequence
  Description of Artificial Sequence: Synthetic polynucleotide
atggctgccgatggttatcttccagattggctcgaggacaaccttagtgaaggaattcgcgagtggtgggcgctgaaacctggagccccgaagcccaaagccaaccagcaaaagcaggacgacggccggggtctggtgcttccgggttacaaatacctcggacccggtaacggactcgacaaaggagagccggtcaacgaggcggacgcggcagccctcgagcacgacaaggcctacgaccagcagctcaaagcgggtgacaatccgtacctgcggtataaccacgccgacgccgagtttcaggagcgtctgcaagaagatacgtcttttgggggcaacctcgggcgagcagtcttccaggccaagaagcgggttctcgaacctctcggtctggttgaggaaggcgctaagacggctcccggaaagaaacgtccggtagagcagtcgccacaagagccagactcctctacgggcatcggcaagaaaggccaacagcccgccagaaaaagactcaatttcggtcagactggcgactcagagtcagttccagaccctcaacctctcggagaacctccagcagcgccctctggtgtgggacctactacaatggcttcaggcggtggcgcaccaatggcagacaataacgaaggcgccgacggagtgggtaatgcctcaggaaattggcattgcgattccacatggctgggcgacagagtcatcaccaccagcacccgaacatgggccttgcccacctataacaaccacctctacaagcaaatctccagtgcttcaacgggggccagcaacgacaacacctacttcggctacagcaccccctgggggtattttgatttcaacagattccactgccatttctcaccacgtgactggcagcgactcatcaacaacaattggggattccggcccaagagactcaacttcaaactcttcaacatccaagtcaaggaggtcacgacgaatgatggcgtcacgaccatcgctaataaccttaccagcacggttcaagtcttctcggactcggagtaccagttgccgtacgtcctcggctctgcgcaccagggctgcctccctccgttcccggcggacgtgttcatgattccgcagtacggctacctaacgctcaacaatggcagccaggcagtgggacggtcatccttttactgcctggaatatttcccatcgcagatgctgagaacgggcaataactttaccttcagctacaccttcgaggacgtgcctttccacagcagctacgcgcacagccagagcctggaccggctgatgaatcctctcatcgaccagtacctgtattacctgaacagaactcagaatcagtccggaagtgcccaaaacaaggacttgctgtttagccgggggtctccagctggcatgtctgttcagcccaaaaactggctacctggaccctgttatcggcagcagcgcgtttctaaaacaaaaacagacaacaacaacagcaattttacctggactggtgcttcaaaatataacctcaatgggcgtgaatccatcatcaaccctggcactgctatggcctcacacaaagacgacgaagacaagttctttcccatgagcggtgtcatgatttttggaaaagagagcgccggagcttcaaacactgcattggacaatgtcatgattacagacgaagaggaaattaaagccactaaccctgtggccaccgaaagatttgggaccgtggcagtcaatttccagagcagcagcacagaccctgcgaccggagatgtgcatgttatgggagccttacctggaatggtgtggcaagacagagacgtatacctgcagggtcctatttgggccaaaattcctcacacagatggacactttcacccgtctcctcttatgggcggctttggactcaagaacccgcctcctcagatcctcatcaaaaacacgcctgttcctgcgaatcctccggcagagttttcggctacaaagtttgcttcattcatcacccagtattccacaggacaagtgagcgtggagattgaatgggagctgcagaaagaaaacagcaaacgctggaatcccgaagtgcagtatacatctaactatgcaaaatctgccaacgttgatttcactgtggacaacaatggactttatactgagcctcgccccattggcacccgttacctcacccgtcccctgtaa

SEQ ID NO: 343 - protein, 736 aa, Artificial Sequence
  Description of Artificial Sequence: Synthetic polypeptide
MAADGYLPDWLEDNLSEGIREWWALKPGAPKPKANQQKQDDGRGLVLPGYKYLGPGNGLDKGEPVNEADAAALEHDKAYDQQLKAGDNPYLRYNHADAEFQERLQEDTSFGGNLGRAVFQAKKRVLEPLGLVEEGAKTAPGKKRPVEQSPQEPDSSTGIGKKGQQPARKRLNFGQTGDSESVPDPQPLGEPPAAPSGVGPTTMASGGGAPMADNNEGADGVGNASGNWHCDSTWLGDRVITTSTRTWALPTYNNHLYKQISSASTGASNDNTYFGYSTPWGYFDFNRFHCHFSPRDWQRLINNNWGFRPKRLNFKLFNIQVKEVTTNDGVTTIANNLTSTVQVFSDSEYQLPYVLGSAHQGCLPPFPADVFMIPQYGYLTLNNGSQAVGRSSFYCLEYFPSQMLRTGNNFTFSYTFEDVPFHSSYAHSQSLDRLMNPLIDQYLYYLNRTQNQSGSAQNKDLLFSRGSPAGMSVQPKNWLPGPCYRQQRVSKTKTDNNNSNFTWTGASKYNLNGRESIINPGTAMASHKDDEDKFFPMSGVMIFGKESAGASNTALDNVMITDEEEIKATNPVATERFGTVAVNFQSSSTDPATGDVHVMGALPGMVWQDRDVYLQGPIWAKIPHTDGHFHPSPLMGGFGLKNPPPQILIKNTPVPANPPAEFSATKFASFITQYSTGQVSVEIEWELQKENSKRWNPEVQYTSNYAKSANVDFTVDNNGLYTEPRPIGTRYLTRPL

SEQ ID NO: 344 - DNA, 2205 bp, Artificial Sequence
  Description of Artificial Sequence: Synthetic polynucleotide
atggctgctgacggttatcttccagattggctcgaggacaacctttctgaaggcattcgtgagtggtgggctctgaaacctggagtccctcaacccaaagcgaaccaacaacaccaggacaaccgtcggggtcttgtgcttccgggttacaaatacctcggacccggtaacggactcgacaaaggagagccggtcaacgaggcggacgcggcagccctcgaacacgacaaggcctacgaccagcagctcaaggccggagacaacccgtacctcaagtacaaccacgccgacgccgagttccaggagcggctcaaagaagatacgtcttttgggggcaacctcgggcgagcagtcttccaggccaaaaagaggcttcttgaacctcttggtctggttgaggaagcggctaagacggctcctggaaagaagaggcctgtagagcagtctcctcaggaaccggactcctccgcgggtattggcaaatcgggtgcacagcccgctaaaaagagactcaatttcggtcagactggcgacacagagtcagtcccagaccctcaaccaatcggagaacctcccgcagccccctcaggtgtgggatctcttacaatggcttcaggtggtggcgcaccagtggcagacaataacgaaggtgccgatggagtgggtagttcctcgggaaattggcattgcgattcccaatggctgggggacagagtcatcaccaccagcacccgaacctgggccctgcccacctacaacaaccacctctacaaacaaatttccagccaatcaggagcctcgaacgacaatcactactttggctacagcaccccttgggggtattttgacttcaacagattccactgccacttttcaccacgtgactggcagcgactcatcaacaacaactggggattccggcccaagagactcagcttcaagctcttcaacatccaggtcaaagaggttacggacaacaatggagtcaagaccatcgccaataaccttaccagcacggtccaggtcttcacggactcagactatcagctcccgtacgtgctcgggtcggctcacgagggctgcctcccgccgttcccagcggacgttttcatgattcctcagtacgggtatctgacgcttaatgatggaagccaggccgtgggtcgttcgtccttttactgcctggaatatttcccgtcgcaaatgctaagaacgggtaacaacttccagttcagctacgagtttgagaacgtacctttccatagcagctacgctcacagccaaagcctggaccgactaatgaatccactcatcgaccaatacttgtactatctctcaaagactattaacggttctggacagaatcaacaaacgctaaaattcagtgtggccggacccagcaacatggctgtccagggaagaaactacatacctggacccagctaccgacaacaacgtgtctcaaccactgtgactcaaaacaacaacagcgaatttgcttggcctggagcttcttcttgggctctcaatggacgtaatagcttgatgaatcctggacctgctatggccagccacaaagaaggagaggaccgtttctttcctttgtctggatctttaatttttggcaaacaaggaactggaagagacaacgtggatgcggacaaagtcatgataaccaacgaagaagaaattaaaactactaacccggtagcaacggagtcctatggacaagtggccacaaaccaccagagtgcccaagcacaggcgcagaccggctgggttcaaaaccaaggaatacttccgggtatggtttggcaggacagagatgtgtacctgcaaggacccatctgggccaagattcctcacacggacggcaacttccacccgtctccgctgatgggcggctttggcctgaaacatcctccgcctcagatcctgatcaagaacacgcctgtacctgcggatcctccgaccaccttcaaccagtcaaagctgaactctttcatcacgcaatacagcaccggacaggtcagcgtggaaattgaatgggagctgcagaaggaaaacagcaagcgctggaatcccgaagtgcagtatacatctaactatgcaaaatctgccaacgttgatttcactgtggacaacaatggactttatactgagcctcgccccattggcacccgttacctcacccgtcccctgtaa

SEQ ID NO: 345 - protein, 734 aa, Artificial Sequence
  Description of Artificial Sequence: Synthetic polypeptide
MAADGYLPDWLEDNLSEGIREWWALKPGVPQPKANQQHQDNRRGLVLPGYKYLGPGNGLDKGEPVNEADAAALEHDKAYDQQLKAGDNPYLKYNHADAEFQERLKEDTSFGGNLGRAVFQAKKRLLEPLGLVEEAAKTAPGKKRPVEQSPQEPDSSAGIGKSGAQPAKKRLNFGQTGDTESVPDPQPIGEPPAAPSGVGSLTMASGGGAPVADNNEGADGVGSSSGNWHCDSQWLGDRVITTSTRTWALPTYNNHLYKQISSQSGASNDNHYFGYSTPWGYFDFNRFHCHFSPRDWQRLINNNWGFRPKRLSFKLFNIQVKEVTDNNGVKTIANNLTSTVQVFTDSDYQLPYVLGSAHEGCLPPFPADVFMIPQYGYLTLNDGSQAVGRSSFYCLEYFPSQMLRTGNNFQFSYEFENVPFHSSYAHSQSLDRLMNPLIDQYLYYLSKTINGSGQNQQTLKFSVAGPSNMAVQGRNYIPGPSYRQQRVSTTVTQNNNSEFAWPGASSWALNGRNSLMNPGPAMASHKEGEDRFFPLSGSLIFGKQGTGRDNVDADKVMITNEEEIKTTNPVATESYGQVATNHQSAQAQAQTGWVQNQGILPGMVWQDRDVYLQGPIWAKIPHTDGNFHPSPLMGGFGLKHPPPQILIKNTPVPADPPTTFNQSKLNSFITQYSTGQVSVEIEWELQKENSKRWNPEVQYTSNYAKSANVDFTVDNNGLYTEPRPIGTRYLTRPL

SEQ ID NO: 346 - DNA, 2211 bp, Artificial Sequence
  Description of Artificial Sequence: Synthetic polynucleotide
atggctgccgatggttatcttccagattggctcgaggacaacctctctgagggcattcgcgagtggtgggcgctgaaacctggagccccgaagcccaaagccaaccagcaaaagcaggacgacggccggggtctggtgcttcctggctacaagtacctcggacccttcaacggactcgacaagggggagcccgtcaacgcggcggacgcagcggccctcgagcacgacaaggcctacgaccagcagctgcaggcgggtgacaatccgtacctgcggtataaccacgccgacgccgagtttcaggagcgtctgcaagaagatacgtcttttgggggcaacctcgggcgagcagtcttccaggccaagaagtgggttctcgaacctctcggtctggttgaggaaggcgctaagacggctcctggaaagaaacgtccggtagagcagtcgccacaagagccagactcctcctcgggcatcggcaagacaggccagcagcccgctaaaaagagactcaattttggtcagactggcgactcagagtcagtccccgacccacaacctctcggagaacctccagcaacccccgctgctgtgggacctactacaatggcttcaggcggtggcgcaccaatggcagacaataacgaaggcgccgacggagtgggtaatgcctcaggaaattggcattgcgattccacatggctgggcgacagagtcatcaccaccagcacccgcacctgggccttgcccacctacaataaccacctctacaagcaaatctccagtgcttcaacgggggccagcaacgacaaccactacttcggctacagcaccccctgggggtattttgatttcaacagattccactgccatttctcaccacgtgactggcagcgactcatcaacaacaattggggattccggcccaagagactcaacttcaagctcttcaacatccaagtcaaggaggtcacgacgaatgatggcgtcacaaccatcgctaataaccttaccagcacggttcaagtcttctcggactcggagtaccagcttccgtacgtcctcggctctgcgcaccagggctgcctccctccgttcccggcggacgtgttcatgattccgcaatacggctacctgacgctcaacaatggcagccaagccgtgggacgttcatccttttactgcctggaatatttcccttctcagatgctgagaacgggcaacaactttaccttcagctacacctttgaggaagtgcctttccacagcagctacgcgcacagccagagcctggaccggctgatgaatcctctcatcgaccaatacctgtattacctgaacagaactcaaaatcagtccggaagtgcccaaaacaaggacttgctgtttagccgtgggtctccagctggcatgtctgttcagcccaaaaactggctacctggaccctgttatcggcagcagcgcgtttctaaaacaaaaacagacaacaacaacagcaattttacctggactggtgcttcaaaatataacctcaatgggcgtgaatccatcatcaaccctggcactgctatggcctcacacaaagacgacgaagacaagttctttcccatgagcggtgtcatgatttttggaaaggagagcgccggagcttcaaacactgcattggacaatgtcatgatcaccgacgaagaggaaatcaaagccactaaccccgtggccaccgaaagatttgggactgtggcagtcaatctccagagcagcagcacagaccctgcgaccggagatgtgcatgttatgggagccttacctggcatggtgtggcaagatagagacgtgtacctgcagggtcccatttgggccaaaattcctcacacagatggacactttcacccgtctcctcttatgggcggctttggactcaagaacccgcctcctcagatcctcatcaaaaacacgcctgttcctgcgaatcctccggcggagttttcagctacaaagtttgcttcattcatcacccaatactccacaggacaagtgagtgtggaaattgaatgggagctgcagaaagaaaacagcaagcgctggaatcccgaagtgcagtacacatccaattatgcaaaatctgccaacgttgattttactgtggacaacaatggactttatactgagcctcgccccattggcacccgttacctcacccgtcccctgtaa

SEQ ID NO: 347 - protein, 736 aa, Artificial Sequence
  Description of Artificial Sequence: Synthetic polypeptide
MAADGYLPDWLEDNLSEGIREWWALKPGAPKPKANQQKQDDGRGLVLPGYKYLGPFNGLDKGEPVNAADAAALEHDKAYDQQLQAGDNPYLRYNHADAEFQERLQEDTSFGGNLGRAVFQAKKWVLEPLGLVEEGAKTAPGKKRPVEQSPQEPDSSSGIGKTGQQPAKKRLNFGQTGDSESVPDPQPLGEPPATPAAVGPTTMASGGGAPMADNNEGADGVGNASGNWHCDSTWLGDRVITTSTRTWALPTYNNHLYKQISSASTGASNDNHYFGYSTPWGYFDFNRFHCHFSPRDWQRLINNNWGFRPKRLNFKLFNIQVKEVTTNDGVTTIANNLTSTVQVFSDSEYQLPYVLGSAHQGCLPPFPADVFMIPQYGYLTLNNGSQAVGRSSFYCLEYFPSQMLRTGNNFTFSYTFEEVPFHSSYAHSQSLDRLMNPLIDQYLYYLNRTQNQSGSAQNKDLLFSRGSPAGMSVQPKNWLPGPCYRQQRVSKTKTDNNNSNFTWTGASKYNLNGRESIINPGTAMASHKDDEDKFFPMSGVMIFGKESAGASNTALDNVMITDEEEIKATNPVATERFGTVAVNLQSSSTDPATGDVHVMGALPGMVWQDRDVYLQGPIWAKIPHTDGHFHPSPLMGGFGLKNPPPQILIKNTPVPANPPAEFSATKFASFITQYSTGQVSVEIEWELQKENSKRWNPEVQYTSNYAKSANVDFTVDNNGLYTEPRPIGTRYLTRPL

SEQ ID NO: 348 - DNA, 2214 bp, Artificial Sequence
  Description of Artificial Sequence: Synthetic polynucleotide
atggctgccgatggttatcttccagattggctcgaggacaaccttagtgaaggaattcgcgagtggtgggctttgaaacctggagcccctcaacccaaggcaaatcaacaacatcaagacaacgctcgaggtcttgtgcttccgggttacaaataccttggacccggcaacggactcgacaagggggagccggtcaacgcagcagacgcggcggccctcgagcacgacaaggcctacgaccagcagctgcaggcgggtgacaatccgtacctgcggtataaccacgccgacgccgagtttcaggagcgtctgcaagaagatacgtcttttgggggcaaccttggcagagcagtcttccaggccaaaaagaggatccttgagcctcttggtctggttgaggaagcagctaaaacggctcctggaaagaagaggcctgtagatcagtctcctcaggaaccggactcatcatctggtgttggcaaatcgggcaaacagcctgccagaaaaagactaaatttcggtcagactggcgactcagagtcagtcccagaccctcaacctctcggagaaccaccagcagcccccacaagtttgggatctaatacaatggcttcaggcggtggcgcaccaatggcagacaataacgagggtgccgatggggtgggtagttcctcgggaaattggcattgcgattcccaatggctgggggacagagtcatcaccaccagcacccgaacctgggccctgcccacctacaacaatcacctctacaagcaaatctccaacgggacatcgggaggagccaccaacgacaacacctacttcggctacagcaccccctgggggtattttgactttaacagattccactgccacttttcaccacgtgactggcagcgactcatcaacaacaactggggattccggcccaagagactcagcttcaagctcttcaacatccaggtcaaggaggtcacgcagaatgaaggcaccaagaccatcgccaataacctcaccagcaccatccaggtgtttacggactcggagtaccagctgccgtacgttctcggctcggcgcaccagggctgcctccctccgttcccggcggacgtcttcatggtgccacagtatggatacctgacgctcaacaatggcagccaagccgtgggacgttcatccttttactgcctggaatatttcccttctcagatgctgagaacgggcaacaactttaccttcagctacacctttgaggaagtgcctttccacagcagctacgcgcacagccagagcttggaccggctgatgaatcctctgattgaccagtacctgtactacttgtctcggactcaaacaacaggaggcacggcaaatacgcagactctgggcttcagccaaggtgggcctaatacaatggccaatcaggcaaagaactggctgccaggaccctgttaccgccaacaacgcgtctcaacgacaaccgggcaaaacaacaatagcaactttgcctggactgctgggaccaaataccatctgaatggaagaaattcattggctaatcctggcatcgctatggcaacacacaaagacgacgaggagcgtttttttcccagtaacgggatcctgatttttggcaaacaaaatgctgccagagacaatgcggattacagcgatgtcatgctcaccagcgaggaagaaatcaaaaccactaaccctgtggctacagaggaatacggtatcgtggcagataacttgcagcagcaaaacacggctcctcaaattggaactgtcaacagccagggggacttacccggtatggtctggcagaaccgggacgtgtacctgcagggtcccatctgggccaagattcctcacacggacggcaacttccacccgtctccgctgatgggcggctttggcctgaaacatcctccgcctcagatcctgatcaagaacacgcctgtacctgcggatcctccgaccaccttcaaccagtcaaagctgaactctttcatcacgcaatacagcaccggacaggtcagcgtggagatcgagtgggagctgcagaaggaaaacagcaagcgctggaacccggagatccagtacacttccaactattacaagtctaataatgttgaatttgctgttaatactgaaggtgtatatagtgaaccccgccccattggcaccagatacctgactcgtaatctgtaa

SEQ ID NO: 349 - protein, 737 aa, Artificial Sequence
  Description of Artificial Sequence: Synthetic polypeptide
MAADGYLPDWLEDNLSEGIREWWALKPGAPQPKANQQHQDNARGLVLPGYKYLGPGNGLDKGEPVNAADAAALEHDKAYDQQLQAGDNPYLRYNHADAEFQERLQEDTSFGGNLGRAVFQAKKRILEPLGLVEEAAKTAPGKKRPVDQSPQEPDSSSGVGKSGKQPARKRLNFGQTGDSESVPDPQPLGEPPAAPTSLGSNTMASGGGAPMADNNEGADGVGSSSGNWHCDSQWLGDRVITTSTRTWALPTYNNHLYKQISNGTSGGATNDNTYFGYSTPWGYFDFNRFHCHFSPRDWQRLINNNWGFRPKRLSFKLFNIQVKEVTQNEGTKTIANNLTSTIQVFTDSEYQLPYVLGSAHQGCLPPFPADVFMVPQYGYLTLNNGSQAVGRSSFYCLEYFPSQMLRTGNNFTFSYTFEEVPFHSSYAHSQSLDRLMNPLIDQYLYYLSRTQTTGGTANTQTLGFSQGGPNTMANQAKNWLPGPCYRQQRVSTTTGQNNNSNFAWTAGTKYHLNGRNSLANPGIAMATHKDDEERFFPSNGILIFGKQNAARDNADYSDVMLTSEEEIKTTNPVATEEYGIVADNLQQQNTAPQIGTVNSQGDLPGMVWQNRDVYLQGPIWAKIPHTDGNFHPSPLMGGFGLKHPPPQILIKNTPVPADPPTTFNQSKLNSFITQYSTGQVSVEIEWELQKENSKRWNPEIQYTSNYYKSNNVEFAVNTEGVYSEPRPIGTRYLTRNL

SEQ ID NO: 350 - DNA, 2205 bp, Artificial Sequence
  Description of Artificial Sequence: Synthetic polynucleotide
atggctgctgacggttatcttccagattggctcgaggacaacctttctgaaggcattcgtgagtggtgggctctgaaacctggagtccctcaacccaaagcgaaccaacaacaccaggacaactgtcggggtcttgtgcttccgggttacaaatacctcggacccggtaacggactcgacaaaggagagccggtcaacgaggcggacgcggcagccctcgaacacgacaaggcctacgaccagcagctcaaggccggagacaacccgtacctcaagtacaaccacgccgacgccgagttccaggagcggctcaaagaagatacgtcttttgggggcaacctcgggcgagcagtcttccagaccaaaaagaggcttcttgaacctcttggtctggttgaggaagcggctaagacggctcctggaaagaagaggcctgtagagcagtctcctcaggaaccggactcctccgcgggtattggcaaatcgggtgcacagcccgctaaaaagagactcaatttcggtcagactggcgacacagagtcagtcccagaccctcaaccaatcggagaacctcccgcagccccctcaggtgtgggatctcttacaatggcttcaggtggtggcgcaccagtggcagacaataacgaaggtgccgatggagtgggtagttcctcgggaaattggcattgcgattcccaatggctgggggacagagtcatcaccaccagcacccgaacctgggccctgcccacctacaacaaccacctctacaaacaaatttccagccaatcaggagcctcgaacgacaatcactactttggctacagcaccccttgggggtattttgacttcaacagattccactgccacttttcaccacgtgactggcagcgactcatcaacaacaactggggattccggcccaagagactcagcttcaagctcttcaacatccaggtcaaagaggttacggacaacaatggagtcaagaccatcgccaataaccttaccagcacggtccaggtcttcacggactcagactatcagctcccgtacgtgctcgggtcggctcacgagggctgcctcccgccgttcccagcggacgttttcatgattcctcagtacgggtatctgacgcttaatgatggaagccaggccgtgggtcgttcgtccttttactgcctggaatatttcccgtcgcaaatgctaagaacgggtaacaacttccagttcagctacgagtttgagaacgtacctttccatagcagctacgctcacagccaaagcctggaccgactaatgaatccactcatcgaccaatacttgtactatctctcaaagactattaacggttctggacagaatcaacaaacgctaaaattcagtgtggccggacccagcaacatggctgtccagggaagaaactacatacctggacccagctaccgacaacaacgtgtctcaaccactgtgactcaaaacaacaacagcgaatttgcttggcctggagcttcttcttgggctctcaatggacgtaatagcttgatgaatcctggacctgctatggccagccacaaagaaggagaggaccgtttctttcctttgtctggatctttaatttttggcaaacaaggaactggaagagacaacgtggatgcggacaaagtcatgataaccaacgaagaagaaattaaaactactaacccggtagcaacggagtcctatggacaagtggccacaaaccaccagagtgcccaagcacaggcgcagaccggctgggttcaaaaccaaggaatacttccgggtatggtttggcaggacagagatgtgtacctgcaaggacccatctgggccaagattcctcacacggacggcaacttccacccgtctccgctgatgggcggctttggcctgaaacatcctccgcctcagatcctgatcaagaacacgcctgttcctgcgaatcctccggcggagttttcagctacaaagtttgcttcattcatcacccagtactccacaggacaagtgagtgtggaaattgaatgggagctgcagaaagaaaacagcaagcgctggaatcccgaagtgcagtacacatccaattatgcaaaatctgccaacgttgattttactgtggacaacaatggactttatactgagcctcgccccattggcacccgttaccttaccaaacctctgtaa

SEQ ID NO: 351 - protein, 734 aa, Artificial Sequence
  Description of Artificial Sequence: Synthetic polypeptide
MAADGYLPDWLEDNLSEGIREWWALKPGVPQPKANQQHQDNCRGLVLPGYKYLGPGNGLDKGEPVNEADAAALEHDKAYDQQLKAGDNPYLKYNHADAEFQERLKEDTSFGGNLGRAVFQTKKRLLEPLGLVEEAAKTAPGKKRPVEQSPQEPDSSAGIGKSGAQPAKKRLNFGQTGDTESVPDPQPIGEPPAAPSGVGSLTMASGGGAPVADNNEGADGVGSSSGNWHCDSQWLGDRVITTSTRTWALPTYNNHLYKQISSQSGASNDNHYFGYSTPWGYFDFNRFHCHFSPRDWQRLINNNWGFRPKRLSFKLFNIQVKEVTDNNGVKTIANNLTSTVQVFTDSDYQLPYVLGSAHEGCLPPFPADVFMIPQYGYLTLNDGSQAVGRSSFYCLEYFPSQMLRTGNNFQFSYEFENVPFHSSYAHSQSLDRLMNPLIDQYLYYLSKTINGSGQNQQTLKFSVAGPSNMAVQGRNYIPGPSYRQQRVSTTVTQNNNSEFAWPGASSWALNGRNSLMNPGPAMASHKEGEDRFFPLSGSLIFGKQGTGRDNVDADKVMITNEEEIKTTNPVATESYGQVATNHQSAQAQAQTGWVQNQGILPGMVWQDRDVYLQGPIWAKIPHTDGNFHPSPLMGGFGLKHPPPQILIKNTPVPANPPAEFSATKFASFITQYSTGQVSVEIEWELQKENSKRWNPEVQYTSNYAKSANVDFTVDNNGLYTEPRPIGTRYLTKPL

SEQ ID NO: 352 - DNA, 2211 bp, Artificial Sequence
  Description of Artificial Sequence: Synthetic polynucleotide
atggctgccgatggttatcttccagattggctcgaggacaacctctctgagggcattcgcgagtggtgggacttgaaacctggagcccctaaacccaaggcaaatcaacaacatcaggacaacgctcgaggtcttgtgcttccgggttacaaataccttggacccggcaacggactcgacaagggggagccggtcaacgcagcagacgcggcggccctcgagcacgacaaggcctacgaccagcagctcaaggccggagacaacccgtacctcaagtacaaccacgccgacgccgagttccaggagcggctcaaagaagatacgtcttttgggggcaacctcgggcgagcagtcttccaggccaaaaagaggcttcttgaacctcttggtctggttgaggaagcggctaagacggctcctggaaagaagagaccggtagagccatcaccccagcgttctccagactcctctacgggcatcggcaagaaaggccaacagcccgctaaaaagagactcaattttggtcagactggcgactcagagtcagtccccgacccacaacctctcggagaacctccagcaacccccgctgctgtgggacctactacaatggcttcaggcggtggcgcaccaatggcagacaataacgagggtgccgatggagtgggtaattcctcaggaaattggcattgcgattcccaatggctgggcgacagagtcatcaccaccagcaccagaacctgggccctgcccacttacaacaaccatctctacaagcaaatctccagccaatcaggagcttcaaacgacaaccactactttggctacagcaccccttgggggtattttgactttaacagattccactgccacttttcaccacgtgactggcaaagactcatcaacaacaactggggattccgacccaagagactcaacttcaagctcttcaacatccaagtcaaggaggtcacgacgaatgatggcgtcacgaccatcgctaataaccttaccagcacggttcaagtcttctcggactcggagtaccagttgccgtacgtcctcggctctgcgcaccagggctgcctccctccgttcccggcggacgtgttcatgattccgcagtacggctacctaacgctcaacaatggcagccaagccgtgggacgttcatccttttactgcctggaatatttcccttctcagatgctgagaacgggcaacaactttaccttcagctacacttttgaggacgttcctttccacagcagctacgctcacagccagagtctggaccgtctcatgaatcctctcatcgaccagtacctgtattacttgagcagaacaaacactccaagtggaaccaccacgcagtcaaggcttcagttttctcaggccggagcgagtgacattcgggaccagtctaggaactggcttcctggaccctgttaccgccagcagcgcgtttctaaaacaaaaacagacaacaacaacagcaattttacctggactggtgcttcaaaatataaccttaatgggcgtgaatctataatcaaccctggcactgctatggcctcacacaaagacgacgaagacaagttctttcccatgagcggtgtcatgatttttggaaaagagagcgccggagcttcaaacactgcattggacaatgtcatgatcacagacgaagaggaaatcaaagccactaaccccgtggccaccgaaagatttgggactgtggcagtcaatctccagagcagcagcacagaccctgcgaccggagatgtgcatgttatgggagcattacctggcatggtgtggcaagatagagacgtgtacctgcagggtcccatttgggccaaaattcctcacacagatggacactttcacccgtctcctcttatgggcggctttggactcaagaacccgcctcctcagatcctcatcaaaaacacgcctgttcctgcgaatcctccggcggagttttcagctacaaagtttgcttcattcatcacccaatactccacaggacaagtgagtgtggaaattgaatgggagctgcagaaagaaaacagcaagcgctggaatcccgaagtgcagtacacatccaattatgcaaaatctgccaacgttgattttactgtggacaacaatggactttatactgagcctcgccccattggcacccgttaccttacccgtcccctgtaa

SEQ ID NO: 353 - protein, 736 aa, Artificial Sequence
  Description of Artificial Sequence: Synthetic polypeptide
MAADGYLPDWLEDNLSEGIREWWDLKPGAPKPKANQQHQDNARGLVLPGYKYLGPGNGLDKGEPVNAADAAALEHDKAYDQQLKAGDNPYLKYNHADAEFQERLKEDTSFGGNLGRAVFQAKKRLLEPLGLVEEAAKTAPGKKRPVEPSPQRSPDSSTGIGKKGQQPAKKRLNFGQTGDSESVPDPQPLGEPPATPAAVGPTTMASGGGAPMADNNEGADGVGNSSGNWHCDSQWLGDRVITTSTRTWALPTYNNHLYKQISSQSGASNDNHYFGYSTPWGYFDFNRFHCHFSPRDWQRLINNNWGFRPKRLNFKLFNIQVKEVTTNDGVTTIANNLTSTVQVFSDSEYQLPYVLGSAHQGCLPPFPADVFMIPQYGYLTLNNGSQAVGRSSFYCLEYFPSQMLRTGNNFTFSYTFEDVPFHSSYAHSQSLDRLMNPLIDQYLYYLSRTNTPSGTTTQSRLQFSQAGASDIRDQSRNWLPGPCYRQQRVSKTKTDNNNSNFTWTGASKYNLNGRESIINPGTAMASHKDDEDKFFPMSGVMIFGKESAGASNTALDNVMITDEEEIKATNPVATERFGTVAVNLQSSSTDPATGDVHVMGALPGMVWQDRDVYLQGPIWAKIPHTDGHFHPSPLMGGFGLKNPPPQILIKNTPVPANPPAEFSATKFASFITQYSTGQVSVEIEWELQKENSKRWNPEVQYTSNYAKSANVDFTVDNNGLYTEPRPIGTRYLTRPL

SEQ ID NO: 354 - DNA, 2214 bp, Artificial Sequence; identical to SEQ ID NO: 326
  Description of Artificial Sequence: Synthetic polynucleotide

SEQ ID NO: 355 - protein, 737 aa, Artificial Sequence; identical to SEQ ID NO: 327
  Description of Artificial Sequence: Synthetic polypeptide

SEQ ID NO: 356 - DNA, 2205 bp, Artificial Sequence
  Description of Artificial Sequence: Synthetic polynucleotide
atggctgctgacggttatcttccagattggctcgaggacaacctttctgaaggcattcgtgagtggtgggctctgaaacctggagtccctcaacccaaagcgaaccaacaacaccaggacaaccgtcggggtcttgtgcttccgggttacaaatacctcggacccggtaacggactcgacaaaggagagccggtcaacgaggcggacgcggcagccctcgaacacgacaaggcctacgaccagcagctcaaggccggagacaacccgtacctcaagtacaaccacgccgacgccgagttccaggagcggctcaaagaagatacgtcttttgggggcaacctcgggcgagcagtcttccaggccaaaaagaggcttcttgaacctcttggtctggttgaggaagcggctaagacggctcctggaaagaagaggcctgtagagcagtctcctcaggaaccggactcctccgcgggtattggcaaatcgggtgcacagcccgctaaaaagagactcaatttcggtcagactggcgacacagagtcagtcccagaccctcaaccaatcggagaacctcccgcagccccctcaggtgtgggatctcttacaatggcttcaggtggtggcgcaccagtggcagacaataacgaaggtgccgatggagtgggtagttcctcgggaaattggcattgcgattcccaatggctgggggacagagtcatcaccaccagcacccgaacctgggccctgcccacctacaacaaccacctctacaaacaaatttccagccaatcaggagcctcgaacgacaatcactactttggctacagcaccccttgggggtattttgacttcaacagattccactgccacttttcaccacgtgactggcagcgactcatcaacaacaactggggattccggcccaagagactcagcttcaagctcttcaacatccaggtcaaagaggttacggacaacaatggagtcaagaccatcgccaataaccttaccagcacggtccaggtcttcacggactcagactatcagctcccgtacgtgctcgggtcggctcacgagggctgcctcccgccgttcccagcggacgttttcatgattcctcagtacgggtatctgacgcttaatgatggaagccaggccgtgggtcgttcgtccttttactgcctggaatatttcccgtcgcaaatgctaagaacgggtaacaacttccagttcagctacgagtttgagaacgtacctttccatagcagctacgctcacagccaaagcctggaccgactaatgaatccactcatcgaccaatacttgtactatctctcaaagactattaacggttctggacagaatcaacaaacgctaaaattcagtgtggccggacccagcaacatggctgtccagggaagaaactacatacctggacccagctaccgacaacaacgtgtctcaaccactgtgactcaaaacaacaacagcgaatttgcttggcctggagcttcttcttgggctctcaatggacgtaatagcttgatgaatcctggacctgctatggccagccacaaagaaggagaggaccgtttctttcctttgtctggatctttaatttttggcaaacaaggaactggaagagacaacgtggatgcggacaaagtcatgataaccaacgaagaagaaattaaaactactaacccggtagcaacggagtcctatggacaagtggccacaaaccaccagagtgcccaagcacaggcgcagaccggctgggttcaaaaccaaggaatacttccgggtatggtttggcaggacagagatgtgtacctgcaaggacccatttgggccaaaattcctcacacggacggcaactttcacccttctccgctgatgggagggtttggaatgaaacacccgcctcctcagatcctcatcaaaaacacacctgtacctgcggatcctccaacggccttcaacaaggacaagctgaactctttcatcacccagtattctactggccaagtcagcgtggagatcgagtgggagctgcagaaggaaaacagcaagcgctggaaccccgagatccagtacacctccaactactacaaatctacaagtgtggactttgctgttaatacagaaggcgtgtactctgaaccccgccccattggcacccgttacctcacccgtaatctgtaa

SEQ ID NO: 357 - protein, 734 aa, Artificial Sequence
  Description of Artificial Sequence: Synthetic polypeptide
MAADGYLPDWLEDNLSEGIREWWALKPGVPQPKANQQHQDNRRGLVLPGYKYLGPGNGLDKGEPVNEADAAALEHDKAYDQQLKAGDNPYLKYNHADAEFQERLKEDTSFGGNLGRAVFQAKKRLLEPLGLVEEAAKTAPGKKRPVEQSPQEPDSSAGIGKSGAQPAKKRLNFGQTGDTESVPDPQPIGEPPAAPSGVGSLTMASGGGAPVADNNEGADGVGSSSGNWHCDSQWLGDRVITTSTRTWALPTYNNHLYKQISSQSGASNDNHYFGYSTPWGYFDFNRFHCHFSPRDWQRLINNNWGFRPKRLSFKLFNIQVKEVTDNNGVKTIANNLTSTVQVFTDSDYQLPYVLGSAHEGCLPPFPADVFMIPQYGYLTLNDGSQAVGRSSFYCLEYFPSQMLRTGNNFQFSYEFENVPFHSSYAHSQSLDRLMNPLIDQYLYYLSKTINGSGQNQQTLKFSVAGPSNMAVQGRNYIPGPSYRQQRVSTTVTQNNNSEFAWPGASSWALNGRNSLMNPGPAMASHKEGEDRFFPLSGSLIFGKQGTGRDNVDADKVMITNEEEIKTTNPVATESYGQVATNHQSAQAQAQTGWVQNQGILPGMVWQDRDVYLQGPIWAKIPHTDGNFHPSPLMGGFGMKHPPPQILIKNTPVPADPPTAFNKDKLNSFITQYSTGQVSVEIEWELQKENSKRWNPEIQYTSNYYKSTSVDFAVNTEGVYSEPRPIGTRYLTRNL

SEQ ID NO: 358 - DNA, 2217 bp, Artificial Sequence
  Description of Artificial Sequence: Synthetic polynucleotide
atggctgccgatggttatcttccagattggctcgaggacaacctctctgagggcattcgcgagtggtgggcgctgaaacctggagccccgaagcccaaagccaaccagcaaaagcaggacgacggccggggtctggtgcttcctggctacaagtacctcggacccttcaacggactcgacaagggggagcccgtcaacgcggcggacgcagcggccctcgagcacgacaaggcctacgaccagcagctgcaggcgggtgacaatccgtacctgcggtataaccacgccgacgccgagtttcaggagcgtctgcaagaagatacgtcttttgggggcaacctcgggcgagcagtcttccaggccaagaagcgggttctcgaacctctcggtctggttgaggaaggcgctaagacggctcctggaaagaagagaccggtagagccatcaccccagcgttctccagactcctctacgggcatcggcaagaaaggccaacagcccgccagaaaaagactcaattttggtcagactggcgactcagagtcagttccagaccctcaacctctcggagaacctccagcagcgccctctggtgtgggacctaatacaatggctgcaggcggtggcgcaccaatggcagacaataacgaaggcgccgacggagtgggtagttcctcgggaaattggcattgcgattccacatggctgggcgacagagtcatcaccaccagcacccgaacctgggccctgcccacctacaacaaccacctctacaagcaaatctccaacgggacatcgggaggagccaccaacgacaacacctacttcggctacagcaccccctgggggtattttgactttaacagattccactgccacttttcaccacgtgactggcagcgactcatcaacaacaactggggattccggcccaagagactcagcttcaagctcttcaacatccaggtcaaggaggtcacgcagaatgaaggcaccaagaccatcgccaataacctcaccagcaccatccaggtgtttacggactcggagtaccagctgccgtacgttctcggctctgcccaccagggctgcctgcctccgttcccggcggacgtgttcatgattccccagtacggctacctaacactcaacaacggtagtcaggccgtgggacgctcctccttctactgcctggaatactttccttcgcagatgctgagaaccggcaacaacttccagtttacttacaccttcgaggacgtgcctttccacagcagctacgcccacagccagagcttggaccggctgatgaatcctctgattgaccagtacctgtactacttgtctcggactcaaacaacaggaggcacggcaaatacgcagactctgggcttcagccaaggtgggcctaatacaatggccaatcaggcaaagaactggctgccaggaccctgttaccgccaacaacgcgtctcaacgacaaccgggcaaaacaacaatagcaactttgcctggactgctgggaccaaataccatctgaatggaagaaattcattggctaatcctggcatcgctatggcaacacacaaagacgacgaggagcgtttttttcccagtaacgggatcctgatttttggcaaacaaaatgctgccagagacaatgcggattacagcgatgtcatgctcaccagcgaggaagaaatcaaaaccactaaccctgtggctacagaggaatacggtatcgtggcagataacttgcagcagcaaaacacggctcctcaaattggaactgtcaacagccagggggccttacccggtatggtctggcagaaccgggacgtgtacctgcagggtcccatctgggccaagattcctcacacggacggcaacttccacccctctcccctcatgggtggattcggacttaaacatcctccgcctcagatcctgatcaagaacacgcctgtacctgcggatcctccgaccaccttcaaccagtcaaagctgaactctttcatcacgcaatacagcaccggacaggtcagcgtggaaattgaatgggagctgcagaaggaaaacagcaagcgctggaaccccgagatccagtacacctccaactactacaaatctacaagtgtggactttgctgttaatacagaaggcgtgtactctgaaccccgccccattggcacccgttacctcacccgtaatctgtaa

SEQ ID NO: 359 - protein, 738 aa, Artificial Sequence; identical to SEQ ID NO: 105
  Description of Artificial Sequence: Synthetic polypeptide

SEQ ID NO: 360 - DNA, 2211 bp, Artificial Sequence
  Description of Artificial Sequence: Synthetic polynucleotide
atggctgctgacggttatcttccagattggctcgaggacaacctttctgaaggcattcgagagtggtgggcgctgcaacctggagcccctaaacccaaggcaaatcaacaacatcaggacaacgctcggggtcttgtgcttccgggttacaaatacctcggacccggcaacggactcgacaagggggaacccgtcaacgcagcggacgcggcagccctcgagcacgacaaggcctacgaccagcagctcaaggccggtgacaacccctacctcaagtacaaccacgccgacgccgagttccaggagcggctcaaagaagatacgtcttttgggggcaacctcgggcgagcagtcttccaggccaaaaagaggcttcttgaacctcttggtctggttgaggaagcggctaagacggctcctggaaagaagaggcctgtagatcagtctcctcaggaaccggactcatcatctggtgttggcaaatcgggcaaacagcctgccagaaaaagactaaatttcggtcagactggcgactcagagtcagtcccagaccctcaacctctcggagaaccaccagcagcccccacaagtttgggatctaatacaatggcttcaggcggtggcgcaccaatggcagacaataacgagggtgccgatggagtgggtaattcctcaggaaattggcattgcgattcccaatggctgggcgacagagtcatcaccaccagcaccagaacctgggccctgcccacttacaacaaccatctctacaagcaaatctccagccaatcaggagcttcaaacgacaaccactactttggctacagcaccccttgggggtattttgactttaacagattccactgccacttctcaccacgtgactggcagcgactcattaacaacaactggggattccggcccaagaaactcagcttcaagctcttcaacatccaagttaaagaggtcacgcagaacgatggcacgacgactattgccaataaccttaccagcacggttcaggtgtttacggactcggagtatcagctcccgtacgtgctcgggtcggcgcaccaaggctgtctcccgccgtttccagcggacgtcttcatggtccctcagtatggatacctcaccctgaacaacggaagtcaagcggtgggacgctcatccttttactgcctggagtacttcccttcgcagatgctaaggactggaaataacttccaattcagctataccttcgaggatgtaccttttcacagcagctacgctcacagccagagtttggatcgcttgatgaatcctcttattgatcagtatctgtactacctgaacagaacgcaaggaacaacctctggaacaaccaaccaatcacggctgctttttagccaggctgggcctcagtctatgtctttgcaggccagaaattggctacctgggccctgctaccggcaacagagactttcaaagactgctaacgacaacaacaacagtaactttccttggacagcggccagcaaatatcatctcaatggccgcgactcgctggtgaatccaggaccagctatggccagtcacaaggacgatgaagaaaaatttttccctatgcacggcaatctaatatttggcaaagaagggacaacggcaagtaacgcagaattagataatgtaatgattacggatgaagaagagattcgtaccaccaatcctgtggcaacagagcagtatggaactgtggcaaataacttgcagagctcaaatacagctcccacgactagaactgtcaatgatcagggggccttacctggcatggtgtggcaagatcgtgacgtgtaccttcaaggacctatctgggcaaagattcctcacacggatggacactttcatccttctcctctgatgggaggctttggactgaaacatccgcctcctcaaatcatgatcaaaaatactccggtaccggcaaatcctccgacgactttcagcccggccaagtttgcttcatttatcactcagtactccactggacaggtcagcgtggaaattgagtgggagctacagaaagaaaacagcaaacgttggaatccagagattcagtacacttccaactacaacaagtctgttaatgtggactttactgtagacactaatggtgtttatagtgaacctcgccccattggcacccgttaccttacccgtcccctgtaa

SEQ ID NO: 361 - protein, 736 aa, Artificial Sequence; identical to SEQ ID NO: 331
  Description of Artificial Sequence: Synthetic polypeptide

SEQ ID NO: 362 - DNA, 2211 bp, Artificial Sequence; identical to SEQ ID NO: 330
  Description of Artificial Sequence: Synthetic polynucleotide

SEQ ID NO: 363 - protein, 736 aa, Artificial Sequence; identical to SEQ ID NO: 331
  Description of Artificial Sequence: Synthetic polypeptide

SEQ ID NO: 364 - DNA, 2211 bp, Artificial Sequence
  Description of Artificial Sequence: Synthetic polynucleotide
atggctgctgacggttatcttccagattggctcgaggacaacctttctgaaggcattcgtgagtggtgggctctgaaacctggagtccctcaacccaaagcgaaccaacaacaccaggacaaccgtcggggtcttgtgcttccgggttacaaatacctcggacccggtaacggactcgacaaaggagagcccgtcaacgcggcggatgcagcggccctcgagcacgacaaggcctacgaccagcagctcaaagcgggtgacaatccgtacctgcggtataaccacgccgacgccgagtttcaggagcgtctgcaagaagatacgtcttttgggggcaacctcgggcgagcagtcttccaggccaagaagagggttctcgaaccttttggtctggttgaggaaggtgctaagacggctcctggaaagaaacgtccggtagagcagtcgccacaagagccagactcctcctcgggcatcggcaagacaggccagcagcccgctaaaaagagactcaattttggtcagactggcgactcagagtcagtccccgacccacaacctctcggagaacctccagcaacccccgctgctgtgggacctactacaatggcttcaggcggtggcgcaccaatggcagacaataacgaaggcgccgacggagtgggtaatgcctcaggaaattggcattgcgattccacatggctgggcgacagagtcatcaccaccagcacccgcacctgggccttgcccacctacaataaccacctctacaagcaaatctccagtgcttcaacgggggccagcaacgacaaccactacttcggctacagcaccccctgggggtattttgatttcaacagattccactgccatttctcaccacgtgactggcagcgactcatcaacaacaattggggattccggcccaagagactcaacttcaagctcttcaacatccaagtcaaggaggtcacgacgaatgatggcgtcacgaccatcgctaataaccttaccagcacggttcaagtcttctcggactcggagtaccagcttccgtacgtcctcggctctgcgcaccagggctgcctccctccgttcccggcggacgtgttcatgattccgcaatacggctacctgacgctcaacaatggcagccaagccgtgggacgttcatccttttactgcctggaatatttcccttctcagatgctgagaacgggcaacaactttaccttcagctacacctttgaggaagtgcctttccacagcagctacgcgcacagccagagcctggaccggctgatgaatcctctcatcgaccaatacctgtattacctgaacagaactcaaaatcagtccggaagtgcccaaaacaaggacttgctgtttagccgtgggtctccagctggcatgtctgttcagcccaaaaactggctacctggaccctgttatcggcagcagcgcgtttctaaaacaaaaacagacaacaacaacagcaattttacctggactggtgcttcaaaatataacctcaatgggcgtgaatccatcatcaaccctggcactgctatggcctcacacaaagacgacgaagacaagttctttcccatgagcggtgtcatgatttttggaaaagagagcgccggagcttcaaacactgcattggacaatgtcatgattacagacgaagaggaaattaaagccactaaccctgtggccaccgaaagatttgggaccgtggcagtcaatttccagagcagcagcacagaccctgcgaccggagatgtgcatgttatgggagccttacctggaatggtgtggcaagacagagacgtatacctgcagggtcctatttgggccaaaattcctcacacggatggacactttcacccgtctcctctcatgggcggctttggacttaagcacccgcctcctcagatcctcatcaaaaacacgcctgttcctgcgaatcctccggcagagttttcggctacaaagtttgcttcattcatcacccagtattccacaggacaagtgagcgtggagattgaatgggagctgcagaaagaaaacagcaaacgctggaatcccgaagtgcagtatacatctaactatgcaaaatctgccaacgttgatttcactgtggacaacaatggactttatactgagcctcgccccattggcacccgttacctcacccgtcccctgtaa

SEQ ID NO: 365 - protein, 736 aa, Artificial Sequence
  Description of Artificial Sequence: Synthetic polypeptide
MAADGYLPDWLEDNLSEGIREWWALKPGVPQPKANQQHQDNRRGLVLPGYKYLGPGNGLDKGEPVNAADAAALEHDKAYDQQLKAGDNPYLRYNHADAEFQERLQEDTSFGGNLGRAVFQAKKRVLEPFGLVEEGAKTAPGKKRPVEQSPQEPDSSSGIGKTGQQPAKKRLNFGQTGDSESVPDPQPLGEPPATPAAVGPTTMASGGGAPMADNNEGADGVGNASGNWHCDSTWLGDRVITTSTRTWALPTYNNHLYKQISSASTGASNDNHYFGYSTPWGYFDFNRFHCHFSPRDWQRLINNNWGFRPKRLNFKLFNIQVKEVTTNDGVTTIANNLTSTVQVFSDSEYQLPYVLGSAHQGCLPPFPADVFMIPQYGYLTLNNGSQAVGRSSFYCLEYFPSQMLRTGNNFTFSYTFEEVPFHSSYAHSQSLDRLMNPLIDQYLYYLNRTQNQSGSAQNKDLLFSRGSPAGMSVQPKNWLPGPCYRQQRVSKTKTDNNNSNFTWTGASKYNLNGRESIINPGTAMASHKDDEDKFFPMSGVMIFGKESAGASNTALDNVMITDEEEIKATNPVATERFGTVAVNFQSSSTDPATGDVHVMGALPGMVWQDRDVYLQGPIWAKIPHTDGHFHPSPLMGGFGLKHPPPQILIKNTPVPANPPAEFSATKFASFITQYSTGQVSVEIEWELQKENSKRWNPEVQYTSNYAKSANVDFTVDNNGLYTEPRPIGTRYLTRPL

SEQ ID NO: 366 - DNA, 2217 bp, Artificial Sequence
  Description of Artificial Sequence: Synthetic polynucleotide
atggctgccgatggttatcttccagattggctcgaggacaacctctctgagggcattcgcgagtggtgggacttgaaacctggagccccgaaacccaaagccaaccagcaaaagcaggacgacggccggggtctggtgcttcctggctacaagtacctcggacccttcaacggactcgacaagggggagcccgtcaacgcggcggatgcaacggccctcgagcacgacaaggcctacgaccagcagctgcaggcgggtgacaatccgtacctgcggtataaccacgccgacgccgagtttcaggagcgtctgcaagaagatacgtcttttgggggcaacctcgggcgagcagtcttccaggccaagaagcgggttctcgaacctctcggtctggttgaggaaggcgctaagacggctcctggaaagaagagaccggtagagccatcaccccagcgttctccagactcctctacgggcatcggcaagaaaggccaacagcccgccagaaaaagactcaattttggtcagactggcgactcagagtcagttccagaccctcaacctctcggagaaccaccagcagcccccacaagtttgggatctaatacaatggcttcaggcggtggcgcaccaatggcagacaataacgagggtgccgatggagtgggtaattcctcaggaaattggcattgcgattcccaatggctgggcgacagagtcatcaccaccagcacccgcacctgggccttgcccacctacaataaccacctctacaagcaaatctccagtgcttcaacgggggccagcaacgacaaccactacttcggctacagcaccccctgggggtattttgactttaaccgcttccactgccacttctcgccaagagactggcaaagactcatcaacaacaattggggattccggcccaagagactcaacttcaaactcttcaacatccaagtcaaggaggtcacgacgaatgatggcgtcacgaccatcgccaataacctcaccagcaccatccaggtgtttacggactcggagtaccagctgccgtacgttctcggctctgcccaccagggctgcctgcctccgttcccggcggacgtgttcatgattccccagtatggatacctcaccctgaacaacggaagtcaagcggtgggacgctcatccttttactgcctggagtacttcccttcgcagatgctaaggactggaaataacttccaattcagctataccttcgaggatgtaccttttcacagcagctacgctcacagccagagtttggatcgcttgatgaatcctcttattgatcagtatctgtactacctgaacagaacgcaaggaacaacctctggaacaaccaaccaatcacggctgctttttagccaggctgggcctcagtctatgtctttgcaggccagaaattggctacctgggccctgctaccggcaacagagactttcaaagactgctaacgacaacaacaacagtaactttccttggacagcagccagcaaatatcatctcaatggccgcgactcgctggtgaatccaggaccagctatggccagtcacaaggacgatgaagaaaaatttttccctatgcacggcaatctaatatttggcaaagaagggacaacggcaagtaacgcagaattagataatgtaatgattacggatgaagaagagattcgtaccaccaatcctgtggcaacagagcagtatggaactgtggcaaataacttgcagagctcaaatacagctcccacgactagaactgtcaatgatcagggggccttacctggcatggtgtggcaagatcgtgacgtgtaccttcaggggcccatctgggcaaagattccacacacggacggacattttcacccctctcccctcatgggtggattcggacttaaacaccctcctccgcagattctcatcaagaacaccccggtacctgcgaatccttcgaccaccttcagtgcggcaaagtttgcttccttcatcacacagtactccacgggacaggtcagcgtggagatcgagtgggagctgcagaaggaaaacagcaagcgctggaacccggagatccagtacacttccaactattacaagtctaataatgttgaatttgctgttaatactgaaggtgtatatagtgaaccccgccccattggcaccagatacctgactcgtaatctgtaa

SEQ ID NO: 367 - protein, 738 aa, Artificial Sequence
  Description of Artificial Sequence: Synthetic polypeptide
MAADGYLPDWLEDNLSEGIREWWDLKPGAPKPKANQQKQDDGRGLVLPGYKYLGPFNGLDKGEPVNAADATALEHDKAYDQQLQAGDNPYLRYNHADAEFQERLQEDTSFGGNLGRAVFQAKKRVLEPLGLVEEGAKTAPGKKRPVEPSPQRSPDSSTGIGKKGQQPARKRLNFGQTGDSESVPDPQPLGEPPAAPTSLGSNTMASGGGAPMADNNEGADGVGNSSGNWHCDSQWLGDRVITTSTRTWALPTYNNHLYKQISSASTGASNDNHYFGYSTPWGYFDFNRFHCHFSPRDWQRLINNNWGFRPKRLNFKLFNIQVKEVTTNDGVTTIANNLTSTIQVFTDSEYQLPYVLGSAHQGCLPPFPADVFMIPQYGYLTLNNGSQAVGRSSFYCLEYFPSQMLRTGNNFQFSYTFEDVPFHSSYAHSQSLDRLMNPLIDQYLYYLNRTQGTTSGTTNQSRLLFSQAGPQSMSLQARNWLPGPCYRQQRLSKTANDNNNSNFPWTAASKYHLNGRDSLVNPGPAMASHKDDEEKFFPMHGNLIFGKEGTTASNAELDNVMITDEEEIRTTNPVATEQYGTVANNLQSSNTAPTTRTVNDQGALPGMVWQDRDVYLQGPIWAKIPHTDGHFHPSPLMGGFGLKHPPPQILIKNTPVPANPSTTFSAAKFASFITQYSTGQVSVEIEWELQKENSKRWNPEIQYTSNYYKSNNVEFAVNTEGVYSEPRPIGTRYLTRNL

SEQ ID NO: 368 - DNA, 2208 bp, Artificial Sequence
  Description of Artificial Sequence: Synthetic polynucleotide
atggctgccgatggttatcttccagattggctcgaggacaaccttagtgaaggaattcgcgagtggtgggacttgaaacctggagccccgaagcccaaagccaaccagcaaaagcaggacgacggccggggtctggtgcttcctggctacaagtacctcggacccttcaacggactcgacaagggggagcccgtcaacgcggcggacgcagcggccctcgagcacgacaaggcctacgaccagcagctcaaagcgggtgacaatccgtacctgcggtataaccacgccgacgccgagtttcaggagcgtctgcaagaagatacgtcttttgggggcaacctcgggcgagcagtcttccaggccaagaagcgggttctcgaacctctcggtctggttgaggaaggtgctaagacggctcctggaaagaaacgtccggtagagcagtcgccacaagagccagactcctcctcgggcattggcaagacaggccagcagcccgctaaaaagagactcaattttggtcagactggcgactcagagtcagtccccgacccacaacctctcggagaacctccagcaacccccgctgctgtgggacctactacaatggcttcaggcggtggcgcaccaatggcagacaataacgaaggcgccgacggagtgggtaatgcctcaggaaattggcattgcgattccacatggctgggcgacagagtcatcaccaccagcacccgaacctgggccctgcccacctacaacaaccacctctacaaacaaatttccagccaatcaggagcctcgaacgacaatcactactttggctacagcaccccttgggggtattttgatttcaacagattccactgccacttttcaccacgtgactggcagcgactcatcaacaacaattggggattccggcccaagagactcagcttcaagctcttcaacatccaggtcaaggaggtcacgcagaatgaaggcaccaagaccatcgccaataaccttaccagcacggttcaagtgtttacggactcggagtatcagctcccgtacgtgctcggctcggcgcatcaaggatgcctcccgccgttcccagcagacgtcttcatggtgccacagtatggatacctcaccctgaacaacgggagtcaggcagtaggacgctcttcattttactgcctggagtactttccttctcagatgctgcgtaccggaaacaactttaccttcagctacacttttgaggacgttcctttccacagcagctacgctcacagccagagtctggaccgtctcatgaatcctctgattgaccagtacctgtattacttgagcagaacaaacactccaagtggaaccaccacgcagtcaaggcttcagttttctcaggccggagcgagtgacattcgggaccagtctaggaactggcttcctggaccctgttaccgccagcagcgagtatcaaagacatctgcggataacaacaacagtgaatactcgtggactggagctaccaagtaccacctcaatggcagagactctctggtgaatccgggcccggccatggcaagccacaaggactatgaagaaaagttttttcctcagagcggggttctcatctttgggaagcaaggctcagagaaaacaaatgtggacattgaaaaggtcatgattacagacgaagaggaaatcaggacaaccaatcccgtggctacggagcagtatggttctgtatctaccaacctccagagaggcaacagacaagcagctaccgcagatgtcaacacacaaggcgttcttccaggcatggtctggcaggacagagatgtgtaccttcaggggcccatctgggcaaagattccacacacggacggacattttcacccgtctccgctgatgggcggctttggcctgaaacatcctccgcctcagatcctgatcaagaacacgcctgtacctgcggatcctccgaccaccttcaaccagtcaaagctgaactctttcatcactcagtattctactggccaagtcagcgtggagatcgagtgggagctgcagaaggaaaacagcaagcgctggaaccccgagatccagtacacctccaactactacaaatctacaagtgtggactttgctgttaatacagaaggcgtgtactctgaaccccgccccattggcacccgttacctcacccgtaatctgtaa

SEQ ID NO: 369 - protein, 735 aa, Artificial Sequence
  Description of Artificial Sequence: Synthetic polypeptide
MAADGYLPDWLEDNLSEGIREWWDLKPGAPKPKANQQKQDDGRGLVLPGYKYLGPFNGLDKGEPVNAADAAALEHDKAYDQQLKAGDNPYLRYNHADAEFQERLQEDTSFGGNLGRAVFQAKKRVLEPLGLVEEGAKTAPGKKRPVEQSPQEPDSSSGIGKTGQQPAKKRLNFGQTGDSESVPDPQPLGEPPATPAAVGPTTMASGGGAPMADNNEGADGVGNASGNWHCDSTWLGDRVITTSTRTWALPTYNNHLYKQISSQSGASNDNHYFGYSTPWGYFDFNRFHCHFSPRDWQRLINNNWGFRPKRLSFKLFNIQVKEVTQNEGTKTIANNLTSTVQVFTDSEYQLPYVLGSAHQGCLPPFPADVFMVPQYGYLTLNNGSQAVGRSSFYCLEYFPSQMLRTGNNFTFSYTFEDVPFHSSYAHSQSLDRLMNPLIDQYLYYLSRTNTPSGTTTQSRLQFSQAGASDIRDQSRNWLPGPCYRQQRVSKTSADNNNSEYSWTGATKYHLNGRDSLVNPGPAMASHKDYEEKFFPQSGVLIFGKQGSEKTNVDIEKVMITDEEEIRTTNPVATEQYGSVSTNLQRGNRQAATADVNTQGVLPGMVWQDRDVYLQGPIWAKIPHTDGHFHPSPLMGGFGLKHPPPQILIKNTPVPADPPTTFNQSKLNSFITQYSTGQVSVEIEWELQKENSKRWNPEIQYTSNYYKSTSVDFAVNTEGVYSEPRPIGTRYLTRNL

SEQ ID NO: 370 - DNA, 2214 bp, Artificial Sequence
  Description of Artificial Sequence: Synthetic polynucleotide
atggctgccgatggttatcttccagattggctcgaggacaacctctctgagggcattcgcgagtggtgggacttgaaacctggagccccgaaacccaaagccaaccagcaaaagcaggacgacggccggggtctggtgcttcctggctacaagtacctcggacccttcaacggactcgacaagggggagcccgtcaacgcggcggatgcagcggccctcgagcacgacaaggcctacgaccagcagctcaaagcgggtgacaatccgtacctgcggtataaccacgccgacgccgagtttcaggagcgtctgcaagaagatacgtcttttgggggcaacctcgggcgagcagtcttccaggccaagaagagggttctcgaaccttttggtctggttgaggaaggtgctaagacggctcctggaaagaaacgtccggtagagcagtcgccacaagagccagactcctcctcgggcattggcaagacaggccagcagcctgcaagaaaaagattgaattttggtcagactggagacgcagactcagtacctgacccccagcctctcggacagccaccagcagccccctctggtctgggaactaatacgatggctacaggcagtggcgcaccaatggcagacaataacgagggcgccgacggagtgggtaattcctcgggaaattggcattgcgattcccaatggctgggggacagagtcatcaccaccagcacccgaacctgggccctgcccacctacaacaatcacctctacaagcaaatctccaacagcacatctggaggatcttcaaatgacaacgcctacttcggctacagcaccccctgggggtattttgatttcaacagattccactgccatttctcaccacgtgactggcagcgactcatcaacaacaattggggattccggcccaagagactcaacttcaagctcttcaacatccaggtcaaggaggtcacgcagaatgaaggcaccaagaccatcgccaataacctcaccagcaccatccaggtgtttacggactcggagtaccagctgccgtacgttctcggctctgcccaccagggctgcctgcctccgttcccggcggacgtgttcatgattccccagtacggctacctaacactcaacaacggtagtcaggccgtgggacgctcctccttctactgcctggaatactttccttcgcagatgctgagaaccggcaacaacttccagtttacttacaccttcgaggacgtgcctttccacagcagctacgcccacagccagagcttggaccggctgatgaatcctctgattgaccagtacctgtactacttgtctcggactcaaacaacaggaggcacgacaaatacgcagactctgggcttcagccaaggtgggcctaatacaatggccaatcaggcaaagaactggctgccaggaccctgttaccgccagcagcgagtatcaaagacatttgcggataacaacaacagtgaatactcgtggactggagctaccaagtaccacctcaatggcagagactctctggtgaatccgggcccggccatggcaagccacaaggacgatgaagaaaagttttttcctcagagcggggttctcatctttgggaagcaaggctcagagaaaacaaatgtggacattgaaaaggtcatgattacagacgaagaggaaatcaggacaaccaatcccgtggctacggagcagtatggttctgtatctaccaacctccagagaggcaacagacaagcagctaccgcagatgtcaacacacaaggcgttcttccaggcatggtctggcaggacagagatgtgtaccttcaggggcccatctgggcaaagattccacacacggacggacattttcacccctctcccctcatgggtggattcggacttaaacaccctccgcctcagatcctgatcaagaacacgcctgtacccgcggatcctccgaccaccttcaaccagtcaaagctgaactctttcatcacccagtattctactggccaagtcagcgtggagatcgagtgggagctgcagaaggaaaacagcaagcgctggaaccccgagatccagtacacctccaactactacaaatctacaagtgtggactttgctgttaatacagaaggcgtgtactctgaaccccgccccattggcacccgttacctcacccgtaatctgtaa

SEQ ID NO: 371 - protein, 737 aa, Artificial Sequence
  Description of Artificial Sequence: Synthetic polypeptide
MAADGYLPDWLEDNLSEGIREWWDLKPGAPKPKANQQKQDDGRGLVLPGYKYLGPFNGLDKGEPVNAADAAALEHDKAYDQQLKAGDNPYLRYNHADAEFQERLQEDTSFGGNLGRAVFQAKKRVLEPFGLVEEGAKTAPGKKRPVEQSPQEPDSSSGIGKTGQQPARKRLNFGQTGDADSVPDPQPLGQPPAAPSGLGTNTMATGSGAPMADNNEGADGVGNSSGNWHCDSQWLGDRVITTSTRTWALPTYNNHLYKQISNSTSGGSSNDNAYFGYSTPWGYFDFNRFHCHFSPRDWQRLINNNWGFRPKRLNFKLFNIQVKEVTQNEGTKTIANNLTSTIQVFTDSEYQLPYVLGSAHQGCLPPFPADVFMIPQYGYLTLNNGSQAVGRSSFYCLEYFPSQMLRTGNNFQFTYTFEDVPFHSSYAHSQSLDRLMNPLIDQYLYYLSRTQTTGGTTNTQTLGFSQGGPNTMANQAKNWLPGPCYRQQRVSKTFADNNNSEYSWTGATKYHLNGRDSLVNPGPAMASHKDDEEKFFPQSGVLIFGKQGSEKTNVDIEKVMITDEEEIRTTNPVATEQYGSVSTNLQRGNRQAATADVNTQGVLPGMVWQDRDVYLQGPIWAKIPHTDGHFHPSPLMGGFGLKHPPPQILIKNTPVPADPPTTFNQSKLNSFITQYSTGQVSVEIEWELQKENSKRWNPEIQYTSNYYKSTSVDFAVNTEGVYSEPRPIGTRYLTRNL

SEQ ID NO: 372 - DNA, 2217 bp, Artificial Sequence
  Description of Artificial Sequence: Synthetic polynucleotide
atggctgccgatggttatcttccagattggctcgaggacactctctctgaaggaataagacagtggtgggcgctgaaacctggagccccgaagcccaaagccaaccagcaaaagcaggacgacggccggggtctggtgcttcctggctacaagtacctcggacccttcaacggactcgacaagggggagcccgtcaacgcggcggatgcagcggccctcgagcacgacaaggcctacgaccagcagctcaaagcgggtgacaatccgtacctgcggtataaccacgccgacgccgagtttcaggagcgtctgcaagaagatacgtcttttgggggcaacctcgggcgagcagtcttccaggccaagaagcgggttctcgaacctctcggtctggttgaggaaggcgctaagacggctcctggaaagaagagaccggtagagccatcaccccagcgttctccagactcctctacgggcatcggcaagaaaggccaacagcccgccagaaaaagactcaattttggtcagactggcgactcagagtcagttccagaccctcaacctctcggagaaccaccagcagcccccacaagtttgggatctaatacaatggcttcaggcggtggcgcaccaatggcagacaataacgagggtgccgatggagtgggtaattcctcaggaaattggcattgcgattcccaatggctgggcgacagagtcatcaccaccagcacccgcacctgggccttgcccacctacaataaccacctctacaagcaaatctccagtgcttcaacgggggccagcaacgacaaccactacttcggctacagcaccccctgggggtattttgactttaaccgcttccactgccacttctcgccaagagactggcaaagactcatcaacaacaattggggattccggcccaagagactcaacttcaaactcttcaacatccaagtcaaggaggtcacgacgaatgatggcgtcacgaccatcgccaataacctcaccagcaccatccaggtgtttacggactcggagtaccagctgccgtacgttctcggctctgcccaccagggctgcctgcctccgttcccggcggacgtgttcatgattccccagtatggatacctcaccctgaacaacggaagtcaagcggtgggacgctcatccttttactgcctggagtacttcccttcgcagatgctaaggactggaaataacttccaattcagctataccttcgaggatgtaccttttcacagcagctacgctcacagccagagtttggatcgcttgatgaatcctcttattgatcagtatctgtactacctgaacagaacgcaaggaacaacctctggaacaaccaaccaatcacggctgctttttagccaggctgggcctcagtctatgtctttgcaggccagaaattggctacctgggccctgctaccggcaacagagactttcaaagactgctaacgacaacaacaacagtaactttccttggacagcagccagcaaatatcatctcaatggccgcgactcgctggtgaatccaggaccagctatggccagtcacaaggacgatgaagaaaaatttttccctatgcacggcaatctaatatttggcaaagaagggacaacggcaagtaacgcagaattagataatgtaatgattacggatgaagaagagattcgtaccaccaatcctgtggcaacagagcagtatggaactgtggcaaataacttgcagagctcaaatacagctcccacgactagaactgtcaatgatcagggggccttacctggcatggtgtggcaagatcgtgacgtgtaccttcaggggcccatctgggcaaagattccacacacggacggacattttcacccctctcccctcatgggtggattcggacttaaacaccctcctccgcagattctcatcaagaacaccccggtacctgcgaatccttcgaccaccttcagtgcggcaaagtttgcttccttcatcacacagtactccacgggacaggtcagcgtggagatcgagtgggagctgcagaaggaaaacagcaagcgctggaacccggagatccagtacacttccaactattacaagtctaataatgttgaatttgctgttaatactgaaggtgtatatagtgaaccccgccccattggcaccagatacctgactcgtaatctgtaa

SEQ ID NO: 373 - protein, 738 aa, Artificial Sequence
  Description of Artificial Sequence: Synthetic polypeptide
MAADGYLPDWLEDTLSEGIRQWWALKPGAPKPKANQQKQDDGRGLVLPGYKYLGPFNGLDKGEPVNAADAAALEHDKAYDQQLKAGDNPYLRYNHADAEFQERLQEDTSFGGNLGRAVFQAKKRVLEPLGLVEEGAKTAPGKKRPVEPSPQRSPDSSTGIGKKGQQPARKRLNFGQTGDSESVPDPQPLGEPPAAPTSLGSNTMASGGGAPMADNNEGADGVGNSSGNWHCDSQWLGDRVITTSTRTWALPTYNNHLYKQISSASTGASNDNHYFGYSTPWGYFDFNRFHCHFSPRDWQRLINNNWGFRPKRLNFKLFNIQVKEVTTNDGVTTIANNLTSTIQVFTDSEYQLPYVLGSAHQGCLPPFPADVFMIPQYGYLTLNNGSQAVGRSSFYCLEYFPSQMLRTGNNFQFSYTFEDVPFHSSYAHSQSLDRLMNPLIDQYLYYLNRTQGTTSGTTNQSRLLFSQAGPQSMSLQARNWLPGPCYRQQRLSKTANDNNNSNFPWTAASKYHLNGRDSLVNPGPAMASHKDDEEKFFPMHGNLIFGKEGTTASNAELDNVMITDEEEIRTTNPVATEQYGTVANNLQSSNTAPTTRTVNDQGALPGMVWQDRDVYLQGPIWAKIPHTDGHFHPSPLMGGFGLKHPPPQILIKNTPVPANPSTTFSAAKFASFITQYSTGQVSVEIEWELQKENSKRWNPEIQYTSNYYKSNNVEFAVNTEGVYSEPRPIGTRYLTRNL

SEQ ID NO: 374 - DNA, 2208 bp, Artificial Sequence; identical to SEQ ID NO: 10
  Description of Artificial Sequence: Synthetic polynucleotide

SEQ ID NO: 375 - protein, 735 aa, Artificial Sequence [sequence omitted]

SEQ ID NO: 376 - DNA, 2208 bp, Artificial Sequence
  Description of Artificial Sequence: Synthetic polynucleotide
atggctgccgatggttatcttccagattggctcgaggacaacctctctgagggcattcgcgagtggtgggcgctgaaacctggagccccgaagcccaaagccaaccagcaaaagcaggacgacggccggggtctggtgcttcctggctacaagtacctcggacccttcaacggactcgacaagggggagcccgtcaacgcggcggacgccgcggccctcgagcacgacaaggcctacgaccagcagctgcaggcgggtgacaatccgtacctgcggtataaccacgccgacgccgagtttcaggagcgtctgcaagaagatacgtcttttgggggcaacctcgggcgagcagtcttccaggccaaaaagaggcttcttgaacctcttggtctggttgaggaagcagctaaaacggctcctggaaagaagaggcctgtagagcagtctcctcaggaaccggactcctccgcgggtattggcaaatcgggtgcacagcccgccaaaaagagactcaatttcggtcagactggcgactcagagtcagtcccagaccctcaacctctcggagaaccaccagcagcccccacaagtttgggatctaatacaatggcttcaggcggtggcgcaccaatggcagacaataacgaaggcgccgacggagtgggtaatgcctcaggaaattggcattgcgattccacatggctgggcgacagagtcatcaccaccagcacccgcacctgggccttgcccacctacagcaaccatctctacaagcaaatctccagccaatcaggagcttcaaacgacaacgactactttggctacagcaccccttgggggtattttgatttcaacagattccactgccacttttcaccacgtgactggcaaagactcatcaacaacaactggggattccgacccaagagactcaacttcaagctctttaacattcaagtcaaagaggtcacgcagaatgacggtacgacgacgattgccaataaccttaccagcacggttcaggtgtttactgactcggagtaccagctcccgtacgtcctcggctcggcgcatcaaggatgcctcccgccgttcccagcagacgtcttcatggtgccacagtatggatacctcaccctgaacaacgggagtcaggcagtaggacgctcttcattttactgcctggagtactttccttctcagatgctgcgtaccggaaacaactttaccttcagctacacttttgaggacgttcctttccacagcagctacgctcacagccagagtctggaccgtctcatgaatcctctcatcgaccagtacctgtattacttgagcagaacaaacactccaagtggaaccaccacgcagtcaaggcttcagttttctcaggccggagcgagtgacattcgggaccagtctaggaactggcttcctggaccctgttaccgccagcagcgagtatcaaagacatctgaggataacaacaacagtgaatactcgtggactggagctaccaagtaccacctcaatggcagagactctctggtgaatccgggcccggccatggcaagccacaaggacgatgaagaaaagttttttcctcagagcggggttctcatctttgggaagcaaggctcagagaaaacaaatgtggacattgaaaaggtcatgattacagacgaagaggaaatcaggacaaccaatcccgtggctacggagcagtatggttctgtatctaccaacctccagagaggcaacagacaagcagctaccgcagatgtcaacacacaaggcgttcttccaggcatggtctggcaggacagagatgtgtaccttcaggggcccatctgggcaaagattccacacacggacggacattttcacccctctcccctcatgggtggattcggacttaaacaccctcctccacagattctcatcaagaacaccccggtacctgcgaatccttcgaccaccttcagtgcggcaaagtttgcttccttcatcacacagtactccacgggacaggtcagcgtggagatcgagtgggagctgcagaaggaaaacagcaaacgctggaatcccgaaattcagtacacttccaactacaacaagtctgttaatgtggactttactgtggacactaatggcgtgtattcagagcctcgccccattggcaccagatacctgactcgtaatctgtaa

SEQ ID NO: 377 - protein, 735 aa, Artificial Sequence
  Description of Artificial Sequence: Synthetic polypeptide
MAADGYLPDWLEDNLSEGIREWWALKPGAPKPKANQQKQDDGRGLVLPGYKYLGPFNGLDKGEPVNAADAAALEHDKAYDQQLQAGDNPYLRYNHADAEFQERLQEDTSFGGNLGRAVFQAKKRLLEPLGLVEEAAKTAPGKKRPVEQSPQEPDSSAGIGKSGAQPAKKRLNFGQTGDSESVPDPQPLGEPPAAPTSLGSNTMASGGGAPMADNNEGADGVGNASGNWHCDSTWLGDRVITTSTRTWALPTYSNHLYKQISSQSGASNDNDYFGYSTPWGYFDFNRFHCHFSPRDWQRLINNNWGFRPKRLNFKLFNIQVKEVTQNDGTTTIANNLTSTVQVFTDSEYQLPYVLGSAHQGCLPPFPADVFMVPQYGYLTLNNGSQAVGRSSFYCLEYFPSQMLRTGNNFTFSYTFEDVPFHSSYAHSQSLDRLMNPLIDQYLYYLSRTNTPSGTTTQSRLQFSQAGASDIRDQSRNWLPGPCYRQQRVSKTSEDNNNSEYSWTGATKYHLNGRDSLVNPGPAMASHKDDEEKFFPQSGVLIFGKQGSEKTNVDIEKVMITDEEEIRTTNPVATEQYGSVSTNLQRGNRQAATADVNTQGVLPGMVWQDRDVYLQGPIWAKIPHTDGHFHPSPLMGGFGLKHPPPQILIKNTPVPANPSTTFSAAKFASFITQYSTGQVSVEIEWELQKENSKRWNPEIQYTSNYNKSVNVDFTVDTNGVYSEPRPIGTRYLTRNL

SEQ ID NO: 378 - DNA, 2208 bp, Artificial Sequence
  Description of Artificial Sequence: Synthetic polynucleotide
atggctgccgatggttatcttccagattggctcgaggacaacctctctgagggcattcgcgagtggtgggcgctgaaacctggagccccgaagcccaaagccaaccagcaaaagcaggacgacggccggggtctggtgcttcctggctacaagtacctcggacccttcaacggactcgacaagggggagcccgtcaacgcggcggacgcagcggccctcgagcacgacaaggcctacgaccagcagctgcaggcgggtgacaatccgtacctgcggtataaccacgccgacgccgagttccaggagcgtctgcaagaagatacgtcttttgggggcaacctcgggcgagcagtcttccaggccaagaagagggttctcgaaccttttggtctggttgaggaaggtgctaagacggctcctggaaagaaacgtccggtagagcagtcgccacaagagccagactcctcctcgggcattggcaagacaggccagcagcccgctaaaaagagactcaattttggtcagactggcgactcagagtcagtcccagaccctcaacctctcggagaaccaccagcagcccccacaagtttgggatctaatacaatggcttcaggcggtggcgcaccaatggcagacaataacgagggcgccgacggagtgggtaattcctcgggaaattggcattgcgattccacatggatgggcgacagagtcatcaccaccagcacccgaacctgggccctgcccacctacaacaaccacctctacaaacaaatttccagccaatcaggagcttcaaacgacaaccactactttggctacagcaccccttgggggtattttgactttaacagattccactgccacttttcaccacgtgactggcagcgactcattaacaacaactggggattccggcccaagaaactcaacttcaagctctttaacatccaggtcaaggaggtcacgcagaatgaaggcaccaagaccatcgccaataacctcaccagcaccatccaggtgtttacggactcggagtaccagctgccgtacgttctcggctctgcccaccagggctgcctgcctccgttcccggcggacgtgttcatgattccccagtacggctacctaacactcaacaacggtagtcaggccgtgggacgctcctccttctactgcctggaatactttccttcgcagatgctgagaaccggcaacaacttccagtttacttacaccttcgaggacgtgcctttccacagcagctacgcccacagccagagcttggaccggctgatgaatcctctgattgaccagtacctgtattacttgtctcggactcaaacaacaggaggcacgacaaatacgcagactctgggcttcagccaaggtgggcctaatacaatggccaatcaggcaaagaactggctgcctggaccctgttaccgccagcagcgagtatcaaagacatctgcggataacaacaacagtgaatactcgtggactggagctaccaagtaccacctcaatggcagagactctctggtgaatccgggcccggccatggcaagccacaaggacgatgaagaaaagttttttcctcagagcggggttctcatctttgggaagcaaggctcagagaaaacaaatgtggacattgaaaaggttatgattacagacgaagaggaaatcaggacaaccaatcccgtggctacggagcagtatggttctgtatctaccaacctccagagaggcaacagacaagcagctaccgcagatgtcaacacacagggcgttcttccaggcatggtctggcaggacagagatgtgtaccttcagggtcccatttgggccaaaattcctcacacagatggacactttcacccgtcccctcttatgggcggctttggactcaagaacccgcctcctcagatcctcatcaaaaacacgcctgttcctgcgaatcctccggcagagttttcagctacaaagtttgcttcattcatcacccaatactccacaggacaagtgagtgtggaaattgaatgggagctgcagaaagaaaacagcaagcgctggaatcccgaagtgcagtacacatccaattatgcaaaatctgccaacgttgattttactgtggacactaatggcgtgtattcagagcctcgccccattggcaccagatacctcacccgtaatctgtaa

SEQ ID NO: 379 - protein, 735 aa, Artificial Sequence
  Description of Artificial Sequence: Synthetic polypeptide
MAADGYLPDWLEDNLSEGIREWWALKPGAPKPKANQQKQDDGRGLVLPGYKYLGPFNGLDKGEPVNAADAAALEHDKAYDQQLQAGDNPYLRYNHADAEFQERLQEDTSFGGNLGRAVFQAKKRVLEPFGLVEEGAKTAPGKKRPVEQSPQEPDSSSGIGKTGQQPAKKRLNFGQTGDSESVPDPQPLGEPPAAPTSLGSNTMASGGGAPMADNNEGADGVGNSSGNWHCDSTWMGDRVITTSTRTWALPTYNNHLYKQISSQSGASNDNHYFGYSTPWGYFDFNRFHCHFSPRDWQRLINNNWGFRPKKLNFKLFNIQVKEVTQNEGTKTIANNLTSTIQVFTDSEYQLPYVLGSAHQGCLPPFPADVFMIPQYGYLTLNNGSQAVGRSSFYCLEYFPSQMLRTGNNFQFTYTFEDVPFHSSYAHSQSLDRLMNPLIDQYLYYLSRTQTTGGTTNTQTLGFSQGGPNTMANQAKNWLPGPCYRQQRVSKTSADNNNSEYSWTGATKYHLNGRDSLVNPGPAMASHKDDEEKFFPQSGVLIFGKQGSEKTNVDIEKVMITDEEEIRTTNPVATEQYGSVSTNLQRGNRQAATADVNTQGVLPGMVWQDRDVYLQGPIWAKIPHTDGHFHPSPLMGGFGLKNPPPQILIKNTPVPANPPAEFSATKFASFITQYSTGQVSVEIEWELQKENSKRWNPEVQYTSNYAKSANVDFTVDTNGVYSEPRPIGTRYLTRNL

SEQ ID NO: 380 - DNA, 2214 bp, Artificial Sequence; identical to SEQ ID NO: 370
  Description of Artificial Sequence: Synthetic polynucleotide

SEQ ID NO: 381 - protein, 737 aa, Artificial Sequence; identical to SEQ ID NO: 371
  Description of Artificial Sequence: Synthetic polypeptide

SEQ ID NO: 382 - DNA, 2196 bp, Adeno-associated virus
atggctgctgacggttatcttccagattggctcgaggacaacctctctgagggcattcgcgagtggtgggcgctgaaacctggagccccgcaacccaaagccaaccagcaaaagcaggacgacggccggggtctggtgcttcctggctacaagtacctcggacccttcaacggactcgacaagggggagcccgtcaacgaggcggacgccgcggccctcgagcacgacaaggcctacgaccagcagctcaaagcgggtgacaatccgtacctgcggtataatcacgccgacgccgagtttcaagagcgtctgcaagaagatacgtcctttgggggcaacctcgggcgagcagtcttccaggccaaaaagagggtactcgagcctctgggtctggttgaggaaggcgctaagacggctcctggaaagaagcggccagtagaaccggactccagctcgggcatcggcaagtcaggccagcagcccgcgaaaaagagactgaattttgggcagactggcgactcagagtcagtgcctgacccccaacctctctcagaaccacccgcaggtccctctggtctgggatctggtacaatggctgctggcggtggcgctccaatggcagacaataacgaaggcgccgacggagtgggtaatgtctcaggaaattggcattgcgattccacatggctgggcgaccgagtcatcaccaccagcactcggacctgggccctccccacctacaacaaccacctctacaagcaaatctccaacgggacctcgggaggcagcagcaacgacaacacctactttggctacagcaccccctgggggtattttgactttaacagattccactgccacttttcaccacgtgactggcagcgactcatcaacaacaactgggggttccggcccaagaagctcaacttcaagctcttcaacatccaggtcaaggaggtcacccagaatgaaggcaccaagaccatcgccaataacctcaccagcacggtgcaggtctttacggactcggagtaccagctcccgtacgtgctcggctctgcccaccagggctgcctgcctccgttcccggcggacgtgttcatgattccgcagtacgggtacctgacgctgaacaacgggagccaggccgtggggcgatcctccttctactgcctggagtactttccctcgcagatgctgagaacgggcaacaactttaccttcagctacaccttcgaggacgtgcccttccacagcagctacgcgcacagccagagcctggaccggctgatgaacccgctgattgaccagtacctgtactacctgtctcggactcagaccaacgggaccaatgccacgcagactctgttgtttgctcaggccgggcctcagaacatgtcggctcaggccaagaactggctgcctggtccttgctatcggcagcagcgcgtctctacgacagtgtcgcaaaacaacaacagcaactttacctggaccggggcgaccaagtaccacctgaacggccgagactccctggtgagccccggtgtcgccatggcaacgcacaaggacgacgaggagcgcttcttcccgagcagcggggtcctgatgtttggcaagcagggcgctggaaaggacaatgtcgagtacaccaacgtgatgctcaccagcgaggaggagatcaagaccaccaaccctgtggccacggagcagtacggcgtggtggctgacaatctgcagcagaccaactcagctcccattgtgggggcagtcaacagccagggggccttacccggtatggtctggcagaaccgggacgtgtacctgcagggtcccatctgggccaagatcccgcatacggacggcaactttcacccgtctcctctcatgggcggctttggactgaaacacccgcctccccagatcctgatcaaaaacacgccggtacctgcggatcccccggtgaactttacggacgctaagctggcgagtttcatcacgcagtacagcaccgggcaggtcagcgtggagattgagtgggagctgcagaaggagaacagcaagcgctggaatcccgagattcagtacacttccaattattataaatcagctaatgtggactttgccgtcaatgcagatggtgtatatagtgaaccccgccccattggcactcgttacctcacccgtaatctgtaa

SEQ ID NO: 383 - protein, 731 aa, Adeno-associated virus
MAADGYLPDWLEDNLSEGIREWWALKPGAPQPKANQQKQDDGRGLVLPGYKYLGPFNGLDKGEPVNEADAAALEHDKAYDQQLKAGDNPYLRYNHADAEFQERLQEDTSFGGNLGRAVFQAKKRVLEPLGLVEEGAKTAPGKKRPVEPDSSSGIGKSGQQPAKKRLNFGQTGDSESVPDPQPLSEPPAGPSGLGSGTMAAGGGAPMADNNEGADGVGNVSGNWHCDSTWLGDRVITTSTRTWALPTYNNHLYKQISNGTSGGSSNDNTYFGYSTPWGYFDFNRFHCHFSPRDWQRLINNNWGFRPKKLNFKLFNIQVKEVTQNEGTKTIANNLTSTVQVFTDSEYQLPYVLGSAHQGCLPPFPADVFMIPQYGYLTLNNGSQAVGRSSFYCLEYFPSQMLRTGNNFTFSYTFEDVPFHSSYAHSQSLDRLMNPLIDQYLYYLSRTQTNGTNATQTLLFAQAGPQNMSAQAKNWLPGPCYRQQRVSTTVSQNNNSNFTWTGATKYHLNGRDSLVSPGVAMATHKDDEERFFPSSGVLMFGKQGAGKDNVEYTNVMLTSEEEIKTTNPVATEQYGVVADNLQQTNSAPIVGAVNSQGALPGMVWQNRDVYLQGPIWAKIPHTDGNFHPSPLMGGFGLKHPPPQILIKNTPVPADPPVNFTDAKLASFITQYSTGQVSVEIEWELQKENSKRWNPEIQYTSNYYKSANVDFAVNADGVYSEPRPIGTRYLTRNL

SEQ ID NO: 384 - DNA, 2196 bp, Adeno-associated virus
atggctgctgacggttatcttccagattggctcgaggacaacctctctgagggcattcgcgagtggtgggcgctgaaacctggagccccgcaacccaaagccaaccagcaaaagcaggacgacggccggggtctggtgcttcctggctacaagtacctcggacccttcaacggactcgacaagggggagcccgtcaacgaggcggacgccgcggccctcgagcacgacaaggcctacgaccagcagctcaaagcgggtgacaatccgtacctgcggtataatcacgccgacgccgagtttcaagagcgtctgcaagaagatacgtcctttgggggcaacctcgggcgagcagtcttccaggccaaaaagagggtactcgagcctctgggtctggttgaggaaggcgctaagacggctcctggaaagaagcggccagtagaaccggactccagctcgggcatcggcaagtcaggccggcagcccgcgaaaaagagactgaattttgggcagactggcgactcagagtcagtgcctgacccccaacctctctcagaaccacccgcaggtccctctggtctgggatctggtacaatggctgcaggcggtggcgctccaatggcagacaataacgaaggcgccgacggagtgggtaatgcctcaggaaattggcattgcgattccacatggctgggcgaccgagtcatcaccaccagcactcggacctgggccctccccacctacaacaaccacctctacaagcaaatctccaacgggacctcgggaggcagcagcaacgacaacacctactttggctacagcaccccctgggggtattttgactttaacagattccactgccacttttcaccacgtgactggcagcgactcatcaacaacaactggggattccggcccaagaggctcaacttcaagctcttcaacatccaggtcaaggaggtcacccagaatgaaggcaccaagaccatcgccaataacctcaccagcacggtgcaggtctttacggactcgaagtaccagctcccgtacgtgctcggctctgcccaccagggctgcctgcctccgttcccggcggacgtgttcatgattccgcagtacgggtacctgacgctgaacaacgggagccaggccgtggggcgatcctccttctactgcctggagtactttccctcgcagatgctgagaacgggcaacaactttaccttcagctacaccttcgaggacgtgcccttccacagcagctacgcgcacagccagagcctggaccggctgatgaacccgctgattgaccagtacctgtactacctgtctcggactcagaccaacgggaccaatgccacgcagactctgttgtttgctcaggccgggcctcagaacatgtcggctcaggccaagaactggctgcctggtccttgctatcggcagcagcgcgtctctacgacagtgtcgcaaaacaacaacagcaactttacctggaccggggcgaccaagtaccacctgaacggccgagactccctggtgaaccccggtgtcgccatggcaacgcacaaggacgacgaggagcgcttcttcccgagcagcggggtcctgatgtttggcaagcagggcgctggaaaggacaatgtcgagtacaccaacgtgatgctcaccagcgaggaggagatcaagaccaccaaccctgtggccacggagcagtacggtgtggtggctgacaatctgcagcagaccaactcggctcccattgtgggggcagtcaacagccagggggccttacccggtatggtctggcagaaccgggacgtgtacctgcagggtcccatctgggccaagatcccgcatacggacggcaactttcacccgtctcctctcatgggcggctttggactgaaacacccgcctccccagatcctgatcaaaaacacgccggtacctgcggatcccccggtgaactttacggacgctaagctggcgagtttcatcacgcagtacagcaccgggcaggtcagcgtggagattgagtgggagctgcagaaggagaacagcaagcgctggaatcccgagattcagtacacttccaattattataaatcagctaatgtggactttgccgtcaatgcagatggtgtatatagtgaaccccgccccattggcactcgttacctcacccgtaatctgtaa

SEQ ID NO: 385 - protein, 731 aa, Adeno-associated virus
MAADGYLPDWLEDNLSEGIREWWALKPGAPQPKANQQKQDDGRGLVLPGYKYLGPFNGLDKGEPVNEADAAALEHDKAYDQQLKAGDNPYLRYNHADAEFQERLQEDTSFGGNLGRAVFQAKKRVLEPLGLVEEGAKTAPGKKRPVEPDSSSGIGKSGRQPAKKRLNFGQTGDSESVPDPQPLSEPPAGPSGLGSGTMAAGGGAPMADNNEGADGVGNASGNWHCDSTWLGDRVITTSTRTWALPTYNNHLYKQISNGTSGGSSNDNTYFGYSTPWGYFDFNRFHCHFSPRDWQRLINNNWGFRPKRLNFKLFNIQVKEVTQNEGTKTIANNLTSTVQVFTDSKYQLPYVLGSAHQGCLPPFPADVFMIPQYGYLTLNNGSQAVGRSSFYCLEYFPSQMLRTGNNFTFSYTFEDVPFHSSYAHSQSLDRLMNPLIDQYLYYLSRTQTNGTNATQTLLFAQAGPQNMSAQAKNWLPGPCYRQQRVSTTVSQNNNSNFTWTGATKYHLNGRDSLVNPGVAMATHKDDEERFFPSSGVLMFGKQGAGKDNVEYTNVMLTSEEEIKTTNPVATEQYGVVADNLQQTNSAPIVGAVNSQGALPGMVWQNRDVYLQGPIWAKIPHTDGNFHPSPLMGGFGLKHPPPQILIKNTPVPADPPVNFTDAKLASFITQYSTGQVSVEIEWELQKENSKRWNPEIQYTSNYYKSANVDFAVNADGVYSEPRPIGTRYLTRNL

SEQ ID NO: 386 - DNA, 2196 bp, Adeno-associated virus
atggctgctgacggttatcttccagattggctcgaggacaacctctctgagggcattcgcgagtggtgggcgctgaaacctggagccccgcaacccaaagccaaccagcaaaagcaggacgacggccggggtctggtgcttcctggctacaagtacctcggacccttcaacggactcgacaagggggagcccgtcaacgaggcggacgccgcggccctcgagcacgacaaggcctacgaccagcagctcaaagcgggtgacaatccgtacctgcggtataatcacgccgacgccgagtttcaagagcgtctgcaagaagatacgtcctttgggggcaacctcgggcgagcagtcttccaggccaaaaagagggtactcgagcctctgggtctggttgaggaaggcgctaagacggctcctggaaagaagcggccagtagaaccggactccagctcgggcatcggcaagtcaggccagcagcccgcgaaaaagagactgaattttgggccgactggcgactcagagtcagtgcctgacccccaacctctctcagaaccacctgcaggtccctctggtctgggatctggtacaatggctgcaggcggtggcgctccaatggcagacaataacgaaggcgccgacggagtgggtaatgtctcaggaaattggcattgcgattccacatggctgggcgaccgagtcatcaccaccagcactcggacctgggccctccccacctacaacaaccacctctacaagcaaatctccaacgggacctcgggaggcagcagcaacgacaacacctactttggctacagcaccccctgggggtattttgactttaacagattccactgccacttttcaccacgcgactggcagcgactcatcaacaacaactggggattccggcccaagaagctcaacttcaagctcttcaacatccaggtcaaggaggtcacccagaatgaaggcaccaagaccaccgccaataacctcaccagcacggtgcaggtctttacggactcggagtaccagctcccgtacgtgctcggctctgcccaccagggctgcctgcctccgttcccggcggacgtgttcatgattccgcagtacgggtacctgacgctgaacaacgggagccaggccgtggggcgatcctccttctactgcctggagtactttccctcgcagatgctgagaacgggcaacaactttaccttcagctacaccttcgaggacgtgcccttccacagcagctacgcgcacagccagagcctggaccggctgatgaacccgctgattgaccagtacctgtactacctgtctcggactcagaccaacgggaccaatgccacgcagactctgttgtttgctcaggccgggcctcagaacatgtcggctcaggccaagaactggctgcctggtccttgctatcggcagcagcgcgtctctacggcagtgtcgcaaaacaacaacagcaactttacctggaccggggcgaccaagtaccacctgaacggccgagactccctggtgaaccccggtgtcgccatggcaacgcacaaggacgacgaggagcgcttcttcccgagcagcggggtcctgatgtttggcaagcagggcgctggaaaggacaatgtcgagtacaccaacgtgatgctcaccagcgaggaggagatcaagaccaccaaccctgtggccacggagcagtacggtgtggtggctgacaatctgcagcagaccaactcggctcccattgtgggggcagtcaacagccagggggccttacccggtatggtctggcagaaccgggacgtgtacctgcagggtcccatctgggccaagatcccgcatacggacggcaactttcacccgtctcctctcatgggcggctttggactgaaacacccgcctccccagatcctgatcaaaaacacgccggtacctgcggatcccccggtgaactttacggacgctaagctggcgagtttcatcacgcagtacagcaccgggcaggtcagcgtggagattgagtgggagctgcagaaggagaacagcaagcgctggaatcccgagattcagtacacttccaattattataaatcagctaatgtggactttgccgtcaatgcagatggtgtatatagcgaaccccgccccattggcactcgttacctcacccgtaatctgtaa

SEQ ID NO: 387 - protein, 731 aa, Adeno-associated virus
MAADGYLPDWLEDNLSEGIREWWALKPGAPQPKANQQKQDDGRGLVLPGYKYLGPFNGLDKGEPVNEADAAALEHDKAYDQQLKAGDNPYLRYNHADAEFQERLQEDTSFGGNLGRAVFQAKKRVLEPLGLVEEGAKTAPGKKRPVEPDSSSGIGKSGQQPAKKRLNFGPTGDSESVPDPQPLSEPPAGPSGLGSGTMAAGGGAPMADNNEGADGVGNVSGNWHCDSTWLGDRVITTSTRTWALPTYNNHLYKQISNGTSGGSSNDNTYFGYSTPWGYFDFNRFHCHFSPRDWQRLINNNWGFRPKKLNFKLFNIQVKEVTQNEGTKTTANNLTSTVQVFTDSEYQLPYVLGSAHQGCLPPFPADVFMIPQYGYLTLNNGSQAVGRSSFYCLEYFPSQMLRTGNNFTFSYTFEDVPFHSSYAHSQSLDRLMNPLIDQYLYYLSRTQTNGTNATQTLLFAQAGPQNMSAQAKNWLPGPCYRQQRVSTAVSQNNNSNFTWTGATKYHLNGRDSLVNPGVAMATHKDDEERFFPSSGVLMFGKQGAGKDNVEYTNVMLTSEEEIKTTNPVATEQYGVVADNLQQTNSAPIVGAVNSQGALPGMVWQNRDVYLQGPIWAKIPHTDGNFHPSPLMGGFGLKHPPPQILIKNTPVPADPPVNFTDAKLASFITQYSTGQVSVEIEWELQKENSKRWNPEIQYTSNYYKSANVDFAVNADGVYSEPRPIGTRYLTRNL

SEQ ID NO: 388 - DNA, 4404 bp, Adeno-associated virus
atggctgccgatggttatcttccagattggctcgagggcaacctctctgagggcattcgcgagtggtgggacttgaaacctggagccccgaaacccaaagccaaccagcaaaagcaggacgacggccggggtctggtgcttcctggctacaggtacctcggacccttcaacggactcgacaagggagagccggtcaacgaggcagacgccgcggccctcgagcacgacaaggcctacgacaagcagctcgagcagggggacaacccgtacctcaagtacaaccacgccgacgccgagtttcaggagcgtcttcaagaagatacgtcttttgggggcaacctcgggcgagcagtcttccaggccaagaagcgggttctcgaacctctcggtctggttgaggaaggcgctaagacggctcctggaaagaagagacccatagaatcccccgactcctccacgggcatcggcaagaacggccagccgcccgctaaaaagaagctcaactttgggcagactggcgactcagagtcagtgcccgacccccaacctctcggagaacctcccgccgcgccctcaggtctgggatctggtacaatggctgcaggcggtggcgcaccaatggcagacaataacgaaggcgccgacggagtgggtaatgcctccggaaattggcattgcgattccacatggctgggcgacagagtcatcaccaccagcacccgcacctgggccctgcccacctacaacaaccacctctacaagcagatatcaagtcagagcggggctaccaacgacaaccacttcttcggctacagcaccccctggggctattttgacttcaacagattccactgccacttctcaccacgtgactggcagcgactcatcaacaacaactggggattccggcccagaaagctgcggttcaagttgttcaacatccaggtcaaggaggtcacgacgaacgacggcgttacgaccatcgctaataaccttaccagcacgattcaggtcttctcggactcggagtaccaactgccgtacgtcctcggctctgcgcaccagggctgcctccctccgttccctgcggacgtgttcatgattcctcagtacggatatctgactctaaacaacggcagtcagtctgtgggacgttcctccttctactgcctggagtactttccttctcagatgctgagaacgggcgataactttgaattcagctacacctttgaggaagtgcctttccacagcagctatgcgcacagccagagcctggaccggctgatgaatcccctcatcgaccagtacctgtactacctggcccggacccagagcactacggggtccacaagggagctgcagttccatcaggctgggcccaacaccatggccgagcaatcaaagaactggctgcccggaccctgttatcggcagcagagactgtcaaaaaacatagacagcaacaacaacagtaactttgcctggaccggggccactaaataccatctgaatggtagaaattcattaaccaacccgggcgtagccatggccaccaacaaggacgacgaggaccagttctttcccatcaacggagtgctggtttttggcaaaacgggggctgccaacaagacaacgctggaaaacgtgctaatgaccagcgaggaggagatcaaaaccaccaatcccgtggctacagaagaatacggtgtggtctccagcaacctgcaatcgtctacggccggaccccagacacagactgtcaacagccagggggctctgcccggcatggtctggcagaaccgggacgtgtacctgcagggtcccatctgggccaaaattcctcacacggacggcaactttcacccgtctcccctgatgggcggatttggactcaaacacccgcctcctcaaattctcatcaaaaacaccccggtacctgctaatcctccagaggtgtttactcctgccaagtttgcctcatttatcacgcagtacagcaccggccaggtcagcgtggagatcgagtgggaactgcagaaagaaaacagcaaacgctggaatccagagattcagtacacctcaaattatgccaagtctaataatgtggaatttgctgtcaacaacgaaggggtttatactgagcctcgccccattggcacccgttacctcacccgtaacctgtaaatggctgccgatggttatcttccagattggctcgaggacaacctctctgagggcattcgcgagtggtgggacttgaaacctggagccccgaaacccaaagccaaccagcaaaagcaggacgacggccggggtctggtgcttcctggctacaagtacctcggacccttcaacggactcgacaagggggagcccgtcaacgcggcggacgcagcggccctcgagcacgacaaggcctacgaccagcagctcaaagcgggtgacaatccgtacctgcggtataaccacgccgacgccgagtttcaggagcgtctgcaagaagatacgtcttttgggggcaacctcgggcgagcagtcttccaggccaagaagcgggttctcgaacctctcggtctggttgaggaaggcgctaagacggctcctggaaagaagagaccggtagagccatcaccccagcgttctccagactcctctacgggcatcggcaagaaaggccagcagcccgcgaaaaagagactcaactttgggcagactggcgactcagagtcagtgcccgaccctcaaccaatcggagaaccccccgcaggcccctctggtctgggatctggtacaatggctgcaggcggtggcgctccaatggcagacaataacgaaggcgccgacggagtgggtagttcctcaggaaattggcattgcgattccacatggctgggcgacagagtcatcaccaccagcacccgaacctgggccctccccacctacaacaaccacctctacaagcaaatctccaacgggacttcgggaggaagcaccaacgacaacacctacttcggctacagcaccccctgggggtattttgactttaacagattccactgccacttctcaccacgtgactggcagcgactcatcaacaacaactggggattccggcccaagagactcaacttcaagctcttcaacatccaggtcaaggaggtcacgcagaatgaaggcaccaagaccatcgccaataaccttaccagcacgattcaggtctttacggactcggaataccagctcccgtacgtcctcggctctgcgcaccagggctgcctgcctccgttcccggcggacgtcttcatgattcctcagtacgggtacctgactctgaacaatggcagtcaggccgtgggccgttcctccttctactgcctggagtactttccttctcaaatgctgagaacgggcaacaactttgagttcagctaccagtttgaggacgtgccttttcacagcagctacgcgcacagccaaagcctggaccggctgatgaaccccctcatcgaccagtacctgtactacctgtctcggactcagtccacgggaggtaccgcaggaactcagcagttgctattttctcaggccgggcctaataacatgtcggctcaggccaaaaactggctacccgggccctgctaccggcagcaacgcgtctccacgacactgtcgcaaaataacaacagcaactttgcctggaccggtgccaccaagtatcatctgaatggcagagactctctggtaaatcccggtgtcgctatggcaacccacaaggacgacgaagagcgattttttccgtccagcggagtcttaatgtttgggaaacagggagctggaaaagacaacgtggactatagcagcgttatgctaaccagtgaggaagaaattaaaaccaccaacccagtggccacagaacagtacggcgtggtggccgataacctgcaacagcaaaacgccgctcctattgtaggggccgtcaacagtcaaggagccttacctggcatggtctggcagaaccgggacgtgtacctgcagggtcctatctgggccaagattcctcacacggacggaaactttcatccctcgccgctgatgggaggctttggactgaaacacccgcctcctcagatcctgattaagaatacacctgttcccgcggatcctccaactaccttcagtcaagctaagctggcgtcgttcatcacgcagtacagcaccggacaggtcagcgtggaaattgaatgggagctgcagaaagaaaacagcaaacgctggaacccagagattcaatacacttccaactactacaaatctacaaatgtggactttgctgttaacacagatggcacttattctgagcctcgccccatcggcacccgttacctcacccgtaatctgtaa

SEQ ID NO: 389 - protein, 738 aa, Adeno-associated virus; identical to SEQ ID NO: 7

SEQ ID NO: 390 - DNA, 3129 bp, Adeno-associated virus
gaattcgccctttctacggctgcgtcaactggaccaatgagaactttcccttcaacgattgcgtcgacaagatggtgatctggtgggaggagggcaagatgacggccaaggtcgtggagtccgccaaggccattctcggcggcagcaaagtgcgcgtggaccaaaagtgcaagtcgtccgcccagatcgaccccacccccgtgatcgtcacctccaacaccaacatgtgcgccgtgattgacgggaacagcaccaccttcgagcaccagcagccgttgcaggaccggatgttcaagtttgaactcacccgccgtctggagcacgactttggcaaggtgacaaagcaggaagtcagagagttcttccgctgggcgcaggatcacgtgaccgaggtggcgcacgagttctacgtcagaaagggtggagccaacaagagacccgcccccgatgacgcggataaaagcgagcccaagcgggcctgcccctcagtcgcggatccatcgacgtcagacgcggaaggagctccggtggactttgccgacaggtaccaaaacaaatgttctcgtcacgcgggcatgcttcagatgctgtttccctgcaaaacatgcgagagaatgaatcagaatttcaacatttgcttcacgcacgggaccagagactgttcagaatgtttccccggcgtgtcagaatctcaaccggtcgtcagaaaaaagacgtatcggaaactctgtgcgattcatcatctgctgggggcgggcacccgagattgcttgctcggcctgcgatctggtcaacgtggacctagatgactgtgtttctgagcaataaatgacttaaaccaggtatggctgccgatggttatcttccagattggctcgaggacaacctctctgagggcattcgcgagtggtgggacttgaaacctggagccccgaaacccaaagccaaccagcaaaagcaggacgacggccggggtctggtgcttcctggctacaagtacctcggacccttcaacggactcgacaagggggagcccgtcaacgcggcggacgcagcggccctcgagcacgacaaggcctacgaccagcagctcaaagcgggtgacaatccgtacctgcggtataaccacgccgacgccgagtttcaggagcgtctgcaagaagatacgtcttttgggggcaacctcgggcgagcagtcttccaggccaagaagcgggttctcgaacctctcggtctggttgaggaaggcgctaagacggctcctggaaagaagagaccggtagagccatcaccccagcgttctccagactcctctacgggcatcggcaagaaaggccagcagcccgcgaaaaagagactcaactttgggcagactggcgactcagagtcagtgcccgaccctcaaccaatcggagaaccccccgcaggcccctctggtctgggatctggtacaatggctgcaggcggtggcgctccaatggcagacaataacgaaggcgccgacggagtgggtagttcctcaggaaattggcattgcgattccacatggctgggcgacagagtcatcaccaccagcacccgaacctgggccctccccacctacaacaaccacctctacaagcaaatctccaacgggacttcgggaggaagcaccaacgacaacacctacttcggctacagcaccccctgggggtattttgactttaacagattccactgccacttctcaccacgtgactggcagcgactcatcaacaacaactggggattccggcccaagagactcaacttcaagctcttcaacatccaggtcaaggaggtcacgcagaatgaaggcaccaagaccatcgccaataaccttaccagcacgattcaggtctttacggactcggaataccagctcccgtacgtcctcggctctgcgcaccagggctgcctgcctccgttcccggcggacgtcttcatgattcctcagtacgggtacctgactctgaacaatggcagtcaggccgtgggccgttcctccttctactgcctggagtactttccttctcaaatgctgagaacgggcaacaactttgagttcagctaccagtttgaggacgtgccttttcacagcagctacgcgcacagccaaagcctggaccggctgatgaaccccctcatcgaccagtacctgtactacctgtctcggactcagtccacgggaggtaccgcaggaactcagcagttgctattttctcaggccgggcctaataacatgtcggctcaggccaaaaactggctacccgggccctgctaccggcagcaacgcgtctccacgacactgtcgcaaaataacaacagcaactttgcctggaccggtgccaccaagtatcatctgaatggcagagactctctggtaaatcccggtgtcgctatggcaacccacaaggacgacgaagagcgattttttccgtccagcggagtcttaatgtttgggaaacagggagctggaaaagacaacgtggactatagcagcgttatgctaaccagtgaggaagaaattaaaaccaccaacccagtggccacagaacagtacggcgtggtggccgataacctgcaacagcaaaacgccgctcctattgtaggggccgtcaacagtcaaggagccttacctggcatggtctggcagaaccgggacgtgtacctgcagggtcctatctgggccaagattcctcacacggacggaaactttcatccctcgccgctgatgggaggctttggactgaaacacccgcctcctcagatcctgattaagaatacacctgttcccgcggatcctccaactaccttcagtcaagctaagctggcgtcgttcatcacgcagtacagcaccggacaggtcagcgtggaaattgaatgggagctgcagaaagaaaacagcaaacgctggaacccagagattcaatacacttccaactactacaaatctacaaatgtggactttgctgttaacacagatggcacttattctgagcctcgccccatcggcacccgttacctcacccgtaatctgtaattgcttgttaatcaataaaccggttgattcgtttcagttgaactttggtctctgcgaagggcgaattc

SEQ ID NO: 391 - protein, 738 aa, Artificial Sequence; identical to SEQ ID NO: 7
  Description of Artificial Sequence: Synthetic polypeptide

SEQ ID NO: 392 - protein, 733 aa, Artificial Sequence
  Description of Artificial Sequence: Synthetic polypeptide
MAADGYLPDWLEDNLSEGIREWWDLRPGAPKPKANQQKQDDGRGLVLPGYKYLGPFNGLDKGEPVNEADAAALEHDKAYDKQLEQGDNPYLKYNHADAEFQERLQEDTSFGGNLGRAVFQAKKRVLEPLGLVEEGAKTAPGKKRPIESPDSSTGIGKKGQQPAKKRLNFGQTGDSESVPDPQPIGEPPAGPSGLGSGTMAAGGGAPMADNNEGADGVGSSSGNWHCDSTWLGDRVITTSTRTWALPTYNNHLYKQISNGTSGGSTNDNTYFGYSTPWGYFDFNRFHCHFSPRDWQRLINNNWGFRPKRLNFKLFNIQVKEVTQNEGTKTIANNLTSTIQVFTDSEYQLPYVLGSAHQGCLPPFPADVFMIPQYGYLTLNNGSQAVGRSSFYCLEYFPSQMLRTGNNFEFSYQFEDVPFHSSYAHSQSLDRLMNPLIDQYLYYLSRTQSTGGTAGTQQLLFSQAGPNNMSAQAKNWLPGPCYRQQRVSTTVSQNNNSNFAWTGATKYHLNGRDSLVNPGVAMATHKGDEERFFPSSGVLMFGKQGAGKDNVDYSSVMLTSEEEIKTTNPVATEQYGVVADNLQQQNAAPIVGAVNSQGALPGMVWQNRDVYLQGPIWAKIPHTDGNFHPSPLMGGFGLKHPPPQILIKNTPVPADPPTTFSQAKLASFITQYSTGQVSVEIEWELQKENSKRWNPEIQYTSNYYKSTNVDFAVNTEGTYSEPRPIGTRYLTRNL

SEQ ID NO: 393 - DNA, 2501 bp, Adeno-associated virus
gaattcgcccttggctgcgtcaactggaccaatgagaactttcccttcaacgattgcgtcgacaagatggtgatctggtgggaggagggcaagatgacggccaaggtcgtggagtccgccaaggccattcatcatctgctggggcgggctcccgagattgcttgctcggcctgcgatctggtcaacgtggacctggatgactgtgtttctgagcaataaatgacttaaaccaggtatggctgccgatggttatcttccagattggctcgaggacaacctctctgagggcattcgcgagtggtgggacttgagacctggagccccgaaacccaaagccaaccagcaaaagcaggacgacggccggggtctggtgcttcctggctacaagtacctcggacccttcaacggactcgacaagggagagccggtcaacgaggcagacgccgcggccctcgagcacgacaaggcctacgacaagcagctcgagcagggggacaacccgtacctcaagtacaaccacgccgacgccgagtttcaggagcgtcttcaagaagatacgtcttttgggggcaacctcgggcgagcagtcttccaggccaagaagcgggttctcgaacctctcggtctggttgaggaaggcgctaagacggctcctggaaagaagagacccatagaatcccccgactcctccacgggcatcggcaagaaaggccagcagcccgctaaaaagagactcaactttgggcagactggcgactcagagtcagtgcccgaccctcaaccaatcggagaaccccccgcaggcccctctggtctgggatctggcacaatggctgcaggcggtggcgctccaatggcagacaataacgaaggcgccgacggagtgggtagttcctcaggaaattggcattgcgattccacatggctgggcgacagagtcatcaccaccagcacccgaacctgggccctccccacctacaacaaccacctctacaagcaaatctccaacgggacatcgggaggaagcaccaacgacaacacctacttcggctacagcaccccctgggggtattttgactttaacagattccactgccacttctcaccacgtgactggcagcgactcatcaacaacaactggggattccggcccaagagactcaacttcaagctcttcaacatccaggtcaaggaggtcacgcagaatgaaggcaccaagaccatcgccaataaccttaccagcacgattcaggtctttacggactcggaataccagctcccgtacgtcctcggctctgcgcaccagggctgcctgcctccgttcccggcggacgtcttcatgattcctcagtacgggtacctgactctgaacaacggcagtcaggccgtgggccgttcctccttctactgcctggagtactttccttctcaaatgctgagaacgggcaacaactttgagttcagctaccagtttgaggacgtgccttttcacagcagctatgcgcacagccaaagcctggaccggctgatgaaccccctcatcgaccagtacctgtactacctgtctcggactcagtccacgggaggtaccgcaggaactcagcagttgctattttctcaggccgggcctaataacatgtcggctcaggccaaaaactggctacccgggccctgctaccggcagcaacgcgtctccacgacagtgtcgcaaaataacaacagcaactttgcttggaccggtgccaccaagtatcatctgaatggcagagactctctggtaaatcccggtgtcgctatggcaacgcacaagggcgacgaagagcgattttttccatccagcggagtcttgatgtttgggaaacagggagctggaaaagacaacgtagactatagcagcgttatgctaaccagtgaggaagaaatcaaaaccaccaacccagtggccacagaacagtacggcgtggtggccgataacctgcaacagcaaaacgccgctcctattgtaggggccgtcaacagtcaaggagccttacctggcatggtctggcagaaccgggacgtgtacctgcagggtcctatctgggccaagattcctcacacggacggcaactttcatccttcgccgctgatgggaggctttggactgaaacacccgcctcctcagatcctgattaagaatacacctgttcccgcggatcctccaactaccttcagtcaagccaagctggcgtcgttcatcacgcagtacagcaccggacaggtcagcgtggaaattgaatgggagctgcagaaagagaacagcaagcgctggaacccagagattcagtatacttccaactactacaaatctacaaatgtggactttgctgtcaatactgagggtacttattcagagcctcgccccattggcacccgttacctcacccgtaacctgtaattgcctgttaatcaataaaccggttgattcgtttcagttgaactttggtctcaagggcgaattc

SEQ ID NO: 394 - DNA, 2187 bp, Adeno-associated virus
atggctgccgatggttatcttccagattggctcgaggacaacctctctgagggcattcgcgagtggtgggacttgaaacctggagccccgaaacccaaagccaaccagcaaaagcaggacgacggccggggtctggtgcttcctggctacaagtacctcggacccttcaacggactcgacaagggagagccggtcaacgaggcagacgccgcggccctcgagcacgacaaggcctacgacaagcagctcgagcagggggacaacccgtacctcaagtacaaccacgccgacgccgagtttcaggagcgtcttcaagaagatacgtcttttgggggcaacctcgggcgagcagtcttccaggccaagaagcgggttctcgaacctctcggtctggttgaggaaggcgctaagacggctcctggaaagaagagacccatagaatcccccgactcctccacgggcatcggcaagaaaggccagcagcccgctaaaaagaagctcaactttgggcagactggcgactcagagtcagtgcccgacccccaacctctcggagaacctcccgccgcgccctcaggtctgggatctggtacaatggctgcaggcggtggcgcaccaatggcagacaataacgaaggcgccgacggagtgggtaatgcctccggaaattggcattgcgattccacatggctgggcgacagagtcatcaccaccagcacccgcacctgggccctgcccacctacaacaaccacctctacaagcagatatcaagtcagagcggggctaccaacgacaaccacttcttcggctacagcaccccctggggctattttgacttcaacagattccactgccacttctcaccacgtgactggcagcgactcatcaacaacaactggggattccggcccagaaagctgcggttcaagttgttcaacatccaggtcaaggaggtcacgacgaacgacggcgttacgaccatcgctaataaccttaccagcacgattcaggtcttctcggactcggagtaccaactgccgtacgtcctcggctctgcgcaccagggctgcctccctccgttccctgcggacgtgttcatgattcctcagtacggatatctgactctaaacaacggcagtcagtctgtgggacgttcctccttctactgcctggagtactttccttctcagatgctgagaacgggcaataactttgaattcagctacacctttgaggaagtgcctttccacagcagctatgcgcacagccagagcctggaccggctgatgaatcccctcatcgaccagtacctgtactacctggcccggacccagagcactacggggtccacaagggagctgcagttccatcaggctgggcccaacaccatggccgagcaatcaaagaactggctgcccggaccctgttatcggcagcagagactgtcaaaaaacatagacagcaacaacaacagtaactttgcctggaccggggccactaaataccatctgaatggtagaaattcattaaccaacccgggcgtagccatggccaccaacaaggacgacgaggaccagttctttcccatcaacggagtgctggtttttggcgaaacgggggctgccaacaagacaacgctggaaaacgtgctaatgaccagcgaggaggagatcaaaaccaccaatcccgtggctacagaagaatacggtgtggtctccagcaacctgcaatcgtctacggccggaccccagacacagactgtcaacagccagggggctctgcccggcatggtctggcagaaccgggacgtgtacctgcagggtcccatctgggccaaaattcctcacacggacggcaactttcacccgtctcccctgatgggcggatttggactcaaacacccgcctcctcaaattctcatcaaaaacaccccggtacctgctaatcctccagaggtgtttactcctgccaagtttgcctcatttatcacgcagtacagcaccggccaggtcagcgtggagatcgagtgggaactgcagaaagaaaacagcaaacgctggaatccagagattcagtacacctcaaattatgccaagtctaataatgtggaatttgctgtcaacaacgaaggggtttatactgagcctcgccccattggcacccgttacctcacccgtaacctgtaa

SEQ ID NO: 395 - protein, 728 aa, Adeno-associated virus; identical to SEQ ID NO: 63

SEQ ID NO: 396 - protein, 728 aa, Adeno-associated virus; identical to SEQ ID NO: 155

SEQ ID NO: 397 - protein, 728 aa, Adeno-associated virus; identical to SEQ ID NO: 155

SEQ ID NO: 398 - protein, 733 aa, Artificial Sequence
  Description of Artificial Sequence: Synthetic polypeptide
MAADGHLPDWLEDNLSEGIREWWDLKPGAPKPKANQQKQDDGRGLVLPGYKYLGPFNGLDKGEPVNAADAAALEHDKAYDQQLKAGDNPYLRYNHADAEFQERLQEDTSFGGNLGRAVFQAKKRVLEPLGLVEEGAKTAPGKKRPIESPDSSTGIGKKGQQPAKKKLNFGQTGDSESVPDPQPIGEPPAGPSGLGSGTMAAGGGAPMADNNEGADGVGSSSGNWHCDSTWLGDRVITTSTRTWALPTYNNHLYKQISNGTSGGSTNDNTYFGYSTPWGYFDFNRFHCHFSPRDWQRLINNSWGFRPKRLNFKLFNIQVKEVTQNEGTKTIANNLTSTIQVFTDSEYQLPYVLGSAHQGCLPPFPADVFMIPQYGYLTLNNGSQAVGRSSFYCLEYFPSQMLRTGNNFEFSYQFEDVPFHSSYAHSQSLDRLMNPLIDQYLYYLSRTQSTGGTAGTQQLLFSQAGPNNMSAQAKNWLPGPCYRQQRVSTTLSQNNNSNFAWTGATKYHLNGRDSLVNPGVAMATHKDDEERFFPSSGVLMFGKQGAGKDNVDYSSVMLTSEEEIKTTNPVATEQYGVVADNLQQQNAAPIVGAVNSQGALPGMVWQNRDVYLQGPIWAKIPHTDGNFHPSPLMGGFGLKHPPPQILIKNTPVPADPPTTFSQAKLASFITQYSTGQVSVEIEWELQKENSKRWNPEIQYTSNYYKSTNVDFAVNTEGTYSEPRPIGTRYLTRNL

SEQ ID NO: 399 - DNA, 3113 bp, Adeno-associated virus
gaattcgccctttctacggctgcgtcaactggaccaatgagaactttcccttcaacgattgcgtcgacaagatggtgatctggtgggaggagggcaagatgacggccaaggtcgtggagtccgccaaggccattctcggcggcagcaaggtgcgcgtggaccaaaagtgcaagtcgtccgcccagatcgatcccacccccgtgatcgtcacttccaacaccaacatgtgcgccgtgattgacgggaacagcaccaccttcgagcaccagcagccgttacaagaccggatgttcaaatttgaactcacccgccgtctggagcatgactttggcaaggtgacaaagcaggaagtcaaagagttcttccgctgggcgcaggatcacgtgaccgaggtggcgcatgagttctacgtcagaaagggtggagccaacaagagacccgcccccgatgacgcggataaaagcgagcccaagcgggcctgcccctcagtcgcggatccatcgacgtcagacgcggaaggagctccggtggactttgccgacaggtaccaaaacaaatgttctcgtcacgcgggcatgcttcagatgctgcttccctgcaagacatgcgagagaatgaatcagaatttcagcatttgcttcacgcacgggaccagagactgttcagaatgtttccccggcgtgtcagaatctcaaccggtcgtcagaaagaggacgtatcggaaactctgtgccattcatcatctgctggggcgggctcccgagattgcttgctcggcctgcgatctggtcaacgtggacctggatgactgtgtttctgagcaataaatgacttaaaccaggtatggctgccgatggtcatcttccagattggctcgaggacaacctctctgagggcattcgcgagtggtgggacttgaaacctggagccccgaaacccaaagccaaccagcaaaagcaggacgacggccggggtctggtgcttcctggctacaagtacctcggacccttcaacggactcgacaagggggagcccgtcaacgcggcggacgcagcggccctcgagcacgacaaggcctacgaccagcagctcaaagcgggtgacaatccgtacctgcggtataaccacgccgacgccgagtttcaggagcgtcttcaagaagatacgtcttttgggggcaacctcgggcgagcagtcttccaggccaagaagcgggttctcgaacctctcggtctggttgaggaaggcgctaagacggctcctggaaagaagagacccatagaatcccccgactcctccacgggcatcggcaagaaaggccagcagcccgctaaaaagaagctcaactttgggcagactggcgactcagagtcagtgcccgaccctcaaccaatcggagaaccccccgcaggcccctctggtctgggatctggtacaatggctgcaggcggtggcgctccaatggcagacaataacgaaggcgccgacggagtgggtagttcctcaggaaattggcattgcgattccacatagctgggcgacagagtcatcaccaccagcacccgaacctgggccctccccacctacaacaaccacctctacaagcaaatctccaacgggacatcgggaggaagcaccaacgacaacacctacttcggctacagcaccccctgggggtattttgactttaacagattccactgccacttctcaccacgtgactggcagcgactcatcaacaacagctggggattccggcccaagagactcaacttcaagctcttcaacatccaggtcaaggaggtcacgcagaatgaaggcaccaagaccatcgccaataaccttaccagcacgattcaggtctttacggactcggaataccagctcccgtacgtcctcggctctgcgcaccagggctgcctgcctccgttcccggcggacgtcttcatgattcctcagtacgggtacctgactctgaacaacggcagtcaggccgtgggccgttcctccttctactgcctggagtactttccttctcaaatgctgagaacgggcaacaactttgagttcagctaccagtttgaggacgtgccttttcacagcagctacgcgcacagccaaagcctggaccggctgatgaaccccctcatcgaccagtacctgtactacctgtctcggactcagtccacgggaggtaccgcaggaactcagcagttgctattttctcaggccgggcctaataacatgtcggctcaggccaaaaactggctacccgggccctgctaccggcagcaacgcgtctccacgacactgtcgcaaaataacaacagcaactttgcttggaccggtgccaccaagtatcatctgaatggcagagactctctggtaaatcccggtgtcgctatggcaacgcacaaggacgacgaagagcgattttttccatccagcggagtcttgatgtttgggaaacagggagctggaaaagacaacgtggactatagcagcgttatgctaaccagtgaggaagaaatcaaaaccaccaacccagtggccacagaacagtacggcgtggtggccgataacctgcaacagcaaaacgccgctcctattgtaggggccgtcaacagtcaaggagccttacctggcatggtctggcagaaccgggacgtgtacctgcagggtcctatctgggccaagattcctcacacggacggcaactttcatccttcgccgctgatgggaggctttggactgaaacacccgcctcctcagatcctgattaagaatacacctgttcccgcggatcctccaactaccttcagtcaagccaagctggcgtcgttcatcacgcagtacagcaccggacaggtcagcgtggaaattgaatgggagctgcagaaagagaacagcaagcgctggaacccagagattcagtatacttccaactactacaaatctacaaatgtggactttgctgtcaatactgagggtacttattcagagcctcgccccattggcacccgttacctcacccgtaacctgtaattgcctgttaatcaataaaccggttaattcgtttcagttgaactttggtctctgcgaagggcgaattc

SEQ ID NO: 400 - protein, 731 aa, Artificial Sequence
  Description of Artificial Sequence: Synthetic polypeptide
MAADGYLPDWLEDNLSEGIREWWDLKPGAPKPKANQQKQDDGRGLVLPGYKYLGPFNGLDKGEPVNEADAAALEHDKAYDKQLEQGDNPYLKYNHADAEFQERLQEDTSFGGNLGRAVFRAKKRVLEPLGLVEEGAKTAPGKKRPIESPDSSTGIGKKGQQPAKKKLNFGQTGDSESVPDPQPLGEPPAAPSGLGSGTMAAGGGAPMADNNEGADGVGNASGNWHCDSTWLGDRVITTSTRTWALPTYNNHLYKQISSQSGATNDNHFFGYSTPWGYFDFNRFHCHFSPRDWQRLINNNRGFRPRKLRFKLFNIQVKEVTTNDGVTTIANNLTSTIQVFSDSEYQLPYVLGSAHQGCLPPFPADVFMIPQYGYLTLNNGSQSVGRSSFYCLEYFPSQMLRTGNNFEFSYQFEDVPFHSSYAHSQSLDRLMNPLIDQYLYYLSRTQSTGGTAGTQQLLFSQAGPNNMSAQAKNWLPGPCYRQQRVSTTLSQNNNSNFAWTGATKYHLNGRDSLVNPGVAMATHKDDEERFFPSSGVLMFGKQGAGKDNVDYSSVMLTSEEEIKTTNPVATEQYGVVADNLQQQNAAPIVGAVNSQGALPGMAWQNRDVYLQGPIWAKIPHTDGNFHPSPLMGGFGLKHPPPQILIKNTPVPADPPTTFSQAKLASFITQYSTGQVSVEIEWELQKENSKRWNPEIQYTSNYYKSTNVDFAVNTEGTYSEPRPIGTRYLTRNL

SEQ ID NO: 401 - DNA, 3106 bp, Adeno-associated virus
gaattcgcccttctacggctgcgtcaactggaccaatgagaactttcccttcaacgattgcgtcgacaagatggtgatctggtgggaggagggcaagatgacggccaaggtcgtggagtccgccaaggccattctcggcggcagcaaggtgcgcgtggaccaaaagtgcaagtcgtccgcccagatcgaccccacccccgtgatcgtcacctccaacaccaacatgtgcgccgtgattgacgggaacagcaccaccttcgagcaccagcagccgttgcaggaccggatgttcaaatttgaactcacccgccgtctggagcatgactttggcaaggcgacaaagcaggaagtcaaagagttcttccgctgggcgcaggatcacgtgaccgaggtggcgcatgagttctacgtcagaaagggtggagccaacaagagacccgcccccgatgacgcggataaaagcgagcccaagcgggcccgcccctcagtcgcggatccatcgacgtcagacgcggaaggagctccggtggactttgccgacaggtaccaaaacaaatgttctcgtcacgcgggcatgcttcagatgctgtttccctgcaaaacatgcgagagaatgaatcagaatttcaacatttgcttcacgcacgggaccagagactgttcagaatgtttccccggcgtgtcagaatctcaaccggtcgtcagaaagaggacgtatcggaaactctgtgccattcatcatctgctggggcgggctcccgagattgcttgctcggcctgcgatctggtcaacgtggacctggatgactgtgtttctgagcaataaatgacttaaaccaggtatggctgccgatggttatcttccagattggctcgaggacaacctctctgagggcattcgcgagtggtgggacttgaaacctggagccccgaaacccaaagccaaccagcaaaagcaggacgacggccggggtctggtgcttcctggctacaagtacctcggacccttcaacggactcgacaagggagagccggtcaacgaggcagacgccgcggccctcgagcacgacaaggcctacgacaagcagctcgagcagggggacaacccgtacctcaagtacaaccacgccgacgccgagtttcaggagcgtcttcaagaagatacgtcttttgggggcaacctcgggcgagcagtcttccgggccaagaagcgggttctcgaacctctcggtctggttgaggaaggcgctaagacggctcctggaaagaagagacccatagaatcccccgactcctccacgggcatcggcaagaaaggccagcagcccgctaaaaagaagctcaactttgggcagactggcgactcagagtcagtgcccgacccccaacctctcggagaacctcccgccgcgccctcaggtctgggatctggtacaatggctgcaggcggtggcgcaccaatggcagacaataacgaaggcgccgacggagtgggtaatgcctccggaaattggcattgcgattccacatggctgggcgacagagtcatcaccaccagcacccgcacctgggccctgcccacctacaacaaccacctctacaagcagatatcaagtcagagcggggctaccaacgacaaccacttcttcggctacagcaccccctggggctattttgacttcaacagattccactgccacttctcaccacgtgactggcagcgactcatcaacaacaaccggggattccggcccagaaagctgcggttcaagttgttcaacatccaggtcaaggaggtcacgacgaacgacggcgttacgaccatcgctaataaccttaccagcacgattcaggtcttctcggactcggagtaccaactgccgtacgtcctcggctctgcgcaccagggctgcctccctccgttccctgcggacgtgttcatgattcctcagtacggatatctgactctaaacaacggcagtcagtctgtgggacgttcctccttctactgcctggagtactttccttctcagatgctgagaacgggcaataactttgaattcagctaccagtttgaggacgtgccctttcacagcagctacgcgcacagccaaagcctggaccggctgatgaaccccctcatcgaccagtacctgtactacctgtctcggactcagtccacgggaggtaccgcaggaactcagcagttgctattttctcaggccgggcctaataacatgtcggctcaggccaaaaactggctacccgggccctgctaccggcagcaacgcgtctccacgacactgtcgcaaaataacaacagcaactttgcttggaccggtgccaccaagtatcatctgaatggcagagactctctggtaaatcccggtgtcgctatggcaacgcacaaggacgacgaagagcgattttttccatccagcggagtcttgatgtttgggaaacagggagctggaaaagacaacgtggactatagcagcgttatgctaaccagtgaggaagaaatcaaaaccaccaacccagtggccacagaacagtacggcgtggtggccgataacctgcaacagcaaaacgccgctcctattgtaggggccgtcaacagtcaaggagccttacctggcatggcctggcagaaccgggacgtgtacctgcagggtcctatctgggccaagattcctcacacggacggcaactttcatccttcgccgctgatgggaggctttggactgaaacacccgcctcctcagatcctgattaagaatacacctgttcccgcggatcctccaactaccttcagtcaagccaagctggcgtcgttcatcacgcagtacagcaccggacaggtcagcgtggaaattgaatgggagctgcagaaagagaacagcaagcgctggaacccagagattcagtatacttccaactactacaaatctacaaatgtggactttgctgtcaatactgagggtacttattcagagcctcgccccattggcacccgttacctcacccgtaacctgtaattgcctgttaatcaataaaccggttaattcgtttcagttgaactttggtctctgcgaagggcgaattc

SEQ ID NO: 402 - protein, 738 aa, Artificial Sequence
  Description of Artificial Sequence: Synthetic polypeptide
MAADGYLPDWLEDNLSEGIREWWDLKPGAPKPKANQQKQDDGRGLVLPGYKYLGPFNGLDKGEPVNEADAAALEHDKAYDKQLEQGDNPYLKYNHADAEFQERLQEDTSFGGNLGRAVFQAKKRVLEPLGLVEEGAKTAPGKKRPVEPSPQRSPDSSTGIGKTGQQPAKKRLNFGQTGDSESVPDPQPIGEPPAGPSGLGSGTMAAGGGAPMADNNEGADGVGSSSGNWHCDSTWLGDRVITTSTRTWALPTYNNHLYKQISNGTSGGSTNDNTYFGYSTPWGYFDFNRFHCHFSPRDWQRLINNNWGFRPKRLNFKLFNIQVKEVTQNEGTKTIANNLTSTIQVFTDSEYQLPYVLGSAHQGCLPPFPADVFMIPQYGYLTLNNGSQAVGRSSFYCLEYFPSQMLRTGNNFEFSYQFEDVPFHSSYAHSQSLDRLMNPLIDQYLYYLSRTQSTGGTAGTQQLLFSQAGPNNMSAQAKNWLPGPCYRQQRVSTTLSQNNNSNFAWTGATKYHLNGRDSLVNPGVAMATHKDDEERFFPSSGVLMFGKQGAGKDNVDYSSVMLTSEEEIKTTNPVATEQYGVVADNLQQQNAAPIVGAVNSQGALPGMVWQNRDVYLQGPIWAKIPHTDGNFHPSPLMGGFGLKHPPPQILIKNTPVPADPPTTFSQAKLASFITQYSTGQVSVEIEWELQKENSKRWNPEIQYTSNYYKSTNVDFAVNTEGTYSEPRPIGTRYLTRNL

SEQ ID NO: 403 - DNA, 3197 bp, Adeno-associated virus
gaattcgccctttctacggctgcgtcaactggaccaatgagaactttcccttcaacgattgcgtcgacaagatggtgatctggtgggaggagggcaagatgacggccaaggtcgtggagtccgccaaggccattctcggcggcagcaaggtgcgcgtggaccaaaagtgcaagtcgtccgcccagatcgaccccacccccgtgatcgtcacctccaacaccaacatgtgcgccgtgattgacgggaacagcaccaccttcgagcaccagcagccgttacaagaccggatgttcaaatttgaactcacccgccgtctggagcacgactttggcaaggtgacaaagcaggaagtcaaagagttcttccgctgggcgcaggatcacgtgaccgaggtggcgcatgagttctacgtcagaaagggtggagccaacaagagacccgcccccgatgacgcggataaaagcgagcccaagcgggcctgcccctcagtcgcggatccatcgacgtcagacgcggaaggagctccggtggactttgccgacaggtaccaaaacaaatgttctcgtcacgcgggcatgcttcagatgctgtttccctgcaagacatgcgagagaatgaatcagaatttcaacatttgcttcacgcacgggaccagagactgttcagaatgtttccccggcgtgtcagaatctcaaccggtcgtcagaaagaggacgtatcggaaactctgtgccattcatcatctgctggggcgggctcccgagattgcttgctcggcctgcgatctggtcaacgtggacctggatgactgtgtttctgagcaataaatgacttaaaccaggtatggctgccgatggttatcttccagattggctcgaggacaacctctctgagggcattcgcgagtggtgggacttgaaacctggagccccgaaacccaaagccaaccagcaaaagcaggacgacggccggggtctggtgcttcctggctacaagtacctcggacccttcaacggactcgacaagggagagccggtcaacgaggcagacgccgcggccctcgagcacgacaaggcctacgacaagcagctcgagcagggggacaacccgtacctcaagtacaaccacgccgacgccgagtttcaggagcgtcttcaagaagatacgtcttttgggggcaacctcgggcgagcagtcttccaggccaagaagcgggttctcgaacctctcggtctggttgaggaaggcgctaagacggctcctggaaagaagagaccggtagagccatcaccccagcgttctccagactcctctacgggcatcggcaagacaggccagcagcccgcgaaaaagagactcaactttgggcagactggcgactcagagtcagtgcccgaccctcaaccaatcggagaaccccccgcaggcccctctggtctgggatctggtacaatggctgcaggcggtggcgctccaatggcagacaataacgaaggcgccgacggagtgggtagttcctcaggaaattggcattgcgattccacatggctgggcgacagagtcatcaccaccagcacccgaacctgggccctccccacctacaacaaccacctctacaagcaaatctccaacgggacatcgggaggaagcaccaacgacaacacctacttcggctacagcaccccctgggggtattttgactttaacagattccactgccacttctcaccacgtgactggcagcgactcatcaacaacaactggggattccggcccaagagactcaacttcaagctcttcaacatccaggtcaaggaggtcacgcagaatgaaggcaccaagaccatcgccaataaccttaccagcacgattcaggtctttacggactcggaataccagctcccgtacgtcctcggctctgcgcaccagggctgcctgcctccgttcccggcggacgtcttcatgattcctcagtacgggtacctgactctgaacaacggcagtcaggccgtgggccgttcctccttctactgcctggagtactttccttctcaaatgctgagaacgggcaacaactttgagttcagctaccagtttgaggacgtgccttttcacagcagctacgcgcacagccaaagcctggaccggctgatgaaccccctcatcgaccagtacctgtactacctgtctcggactcagtccacgggaggtaccgcaggaactcagcagttgctattttctcaggccgggcctaataacatgtcggctcaggccaaaaactggctacccgggccctgctaccggcagcaacgcgtctccacgacactgtcgcaaaataacaacagcaactttgcttggaccggtgccaccaagtatcatctgaatggcagagactctctggtaaatcccggtgtcgctatggcaacgcacaaggacgacgaagagcgattttttccatccagcggagtcttgatgtttgggaaacagggagctggaaaagacaacgtggactatagcagcgttatgctaaccagtgaggaagaaatcaaaaccaccaacccagtggccacagaacagtacggcgtggtggccgataacctgcaacagcaaaacgccgctcctattgtaggggccgtcaacagtcaaggagccttacctggcatggtctggcagaaccgggacgtgtacctgcagggtcctatctgggccaagattcctcacacggacggcaactttcatccttcgccgctgatgggaggctttggactgaaacacccgcctcctcagatcctgattaagaatacacctgttcccgcggatcctccaactaccttcagtcaagccaagctggcgtcgttcatcacgcagtacagcaccggacaggtcagcgtggaaattgaatgggagctgcagaaagagaacagcaagcgctggaacccagagattcagtatacttccaactactacaaatctacaaatgtggactttgctgtcaatactgagggtacttattcagagcctcgccccattggcacccgttacctcacccgtaacctgtaattgcctgttaatcaataaaccggttaattcgtttcagttgaactttggtctctgcgaagggcgaattcgtttaaacctgcaggactagtccctttagtgagggttaattctgagcttggcgtaatcatgggtcatag

SEQ ID NO: 404 - protein, 735 aa, Artificial Sequence
  Description of Artificial Sequence: Synthetic polypeptide
MAADGYLPDWLEDNLSEGIREWWDLKPGAPKPKANQQKQDDGRGLVLPGYKYLGPFNGLDKGEPVNEADAAALEHDKAYDKQLEQGDNPYLKYNHADAEFQERLQEDTSFGGNLGRAVFQAKKRVLEPLGLVEEGAKTAPGKKRPVEPSPQRSPDSSTGIGKTGQQPAKKRLNFGQTGDSESVPDPQPIGEPPAGPSGLGSGTMAAGGGAPMADNNEGADGVGSSSGNWHCDSTWLGDRVITTSTRTWALPTYNNHLYKQISNGTSGGSTNDNTYFGYSTPWGYFDFNRFHCHFSPRDWQRLINNNWGFRPRKLRFKLFNIQVKEVTTDDGVTTIANNLTSTIQVFSDSEYQLPYVLGSAHQGCLPPFPADVFMIPQYGYLTLNNGSQSVGRSSFYCLEYFPSQMLRTGNNFEFSYTFEEVPFHSSYAHSQSLDRLMNPLIDQYLYYLARTQSTTGSTRELQFHQAGPNTMAEQSKNWLPGPCYRQQRLSKNIDSNNNSNFAWTGATKYHLNGRNSLTNPGVAMATNKDDEDQFFPINGVLVFGKTGAANKTTLENVLMTSEEEIKTTNPVATEEYGVVSSNLQSSTAGPQTQTVNSQGALPGMVWQNRDVYLQGPIWAKIPHTDGNFHPSPLMDGFGLKHPPPQILIKNTPVPANPPEVFTPAKFASFITQYSTGQVSVEIEWELQKENSKRWNPEIQYTSNYAKSNNVEFAVNNEGVYTEPRPIGTRYLTRNL

SEQ ID NO: 405 - DNA, 3276 bp, Adeno-associated virus
gaattcgcccttcgcagagaccaaagttcaactgaaacgaattaaccggtttattgattaacaggcaattacaggttacgggtgaggtaacgggtgccaatggggcgaggctcagtataaaccccttcgttgttgacagcaaattccacattattagacttggcataatttgaggtgtactgaatctctggattccagcgtttgctgttttctttctgcagttcccactcgatctccacgctgacctggccggtgctgtactgcgtgataaatgaggcaaacttggcaggagtaaacacctctggaggattagcaggtaccggggtgtttttgatgagaatttgaggaggcgggtgtttgagtccaaatccgtccatcaggggagacgggtgaaagttgccgtccgtgtgaggaattttggcccagatgggaccctgcaggtacacgtcccggttctgccagaccatgccgggcagagccccctggctgttgacagtctgtgtctggggtccggccgtagacgattgcaggttgctggagaccacaccgtattcttctgtagccacgggattggtggttttgatctcctcctcgctggtcattagcacgttttccagcgttgtcttgttggcagcccccgttttgccaaaaaccagcactccgttgatgggaaagaactggtcctcgtcgtccttgttggtggccatggctacgcccgggttggttaatgaatttctaccattcagatggtatttagtggccccggtccaggcaaagttactgttgttgttgctgtctatgttttttgacagtctctgctgccgataacagggtccgggcagccagttctttgattgctcggccatggtgttgggcccagcctgatggaactgcagctcccttgtggaccccgtagtgctctgggtccgggccaggtagtacaggtactggtcgatgaggggattcatcagccggtccaggctctggctatgcgcatagctgctgtggaaaggcacttcctcaaaggtgtagctgaattcaaagttattgcccgttctcagcatctgagaaggaaagtactccaggcagtagaaggaggaacgtcccacagactgactgccgttgtttagagtcagatatccgtactgaggaatcatgaacacgtccgcagggaacggagggaggcagccctggtgcgcagagccgaggacgtacggcagttggtactccgagtccgagaagacctgaatcgtgctggtaaggttattagcgatggtcgtaacgccgtcgtccgtcgtgacctccttgacctggatgttgaacaacttgaaccgcagctttctgggccggaatccccagttgttgttgatgagtcgctgccagtcacgtggtgagaagtggcagtggaatctgttaaagtcaaaatacccccagggggtgctgtagccgaagtaggtgttgtcgttggtgcttcctcccgatgtcccgttggagatttgcttgtagaggtggttgttgtaggtggggagggcccaggttcgggtgctggtggtgatgactctgtcgcccagccatgtggaatcgcaatgccaatttcctgaggaactacccactccgtcggcgccttcgttattgtctgccattggagcgccaccgcctgcagccattgtaccagatcccagaccagaggggcctgcggggggttctccgattggttgagggtcgggcactgactctgagtcgccagtctgcccaaagttgagtctctttttcgcgggctgctggcctgtcttgccgatgcccgtagaggagtctggagaacgctggggtgatggctctaccggtctcttctttccaggagccgtcttagcgccttcctcaaccagaccgagaggttcgagaacccgcttcttggcctggaagactgctcgcccgaggttgcccccaaaagacgtatcttcttgaagacgctcctgaaactcggcgtcggcgtggttgtacttgaggtacgggttgtccccctgctcgagctgcttgtcgtaggccttgtcgtgctcgagggccgcggcgtctgcctcgttgaccggctctcccttgtcgagtccgttgaagggtccgaggtacttgtagccaggaagcaccagaccccggccgtcgtcctgcttttgctggttggctttgggtttcggggctccaggtttcaagtcccaccactcgcgaatgccctcagagaggttgtcctcgagccaatctggaagataaccatcggcagccatacctggtttaagtcatttattgctcagaaacacagtcatccaggtccacgttgaccagatcgcaggccgagcaagcaatctcgggagcccgccccagcagatgatgaatggcacagagtttccgatacgtcctctttctgacgaccggttgagattctgacacgccggggaaacattctgaacagtctctggtcccgtgcgtgaagcaaatgttgaaattctgattcattctctcgcatgtcttgcagggaaacagcatctgaagcatgcccgcgtgacgagaacacttgttttggtacctgtcggcaaagtccaccggagctccttccgcgtctgacgtcgatggatgcaaaatgtcgcaaaagcactcacgtgacagctaatacaggaccactcccctatgacgtgatttacgtcagcgctatgcccgcgtgacgagaacatttgttttggtacctgtcggcaaagtccaccggagctccttccgcgtctgacgtcgatggatccgcgactgaggggcaggcccgcttgggctcgcttttatccgcgtcatcgggggcgggtctcttgttggctccaccctttctgacgtagaactcatgcgccacctcggtcacgtgatcctgcgcccagcggaagaactctttgacttcctgctttgtcaccttgccaaagtcatgctccagacggcgggtgagttcaaatttgaacatccggtcctgcaacggctgctggtgctcgaaggtggtgctgttcccgtcaatcacggcgcacatgttggtgttggaagtgacgatcacgggggtgggatcgatctgggcggaagacttgcacttttggtccacgcgcaccttgctgccgccgagaatggccttggcggactccacgaccttggccgtcatcttgccctcctcccaccagatcaccatcttgtcgacgcaatcgttgaagggaaagttctcattggtccagttgacgcagccgtagaaagggcgaattc

SEQ ID NO: 406 - protein, 738 aa, Adeno-associated virus; identical to SEQ ID NO: 71

SEQ ID NO: 407 - protein, 738 aa, Adeno-associated virus
MAADGYLPDWLEDNLSEGIREWWDLKPGAPKPKANQQKQDDGRGLVLPGYKYLGPFNGLDKGEPVNAADAAALEHDKAYDQQLKAGDNPYLRYNHADAEFQERLQEDTSFGGNLGRAVFQAKKRVLEPLGLVEEGAKTAPGKKRPVEPSPQRSPDSSTGIGKKGHQPARKRLNFGQTGDSESVPDPQPIGEPPAGPSGLGSGTMAAGGGAPMADNNEGADGVGSSSGNWHCDSTWLGDRVITTSTRTWALPTYNNHLYKQISNGTSGGSTNDNTYFGYSTPWGYFDFNRFHCHFSPRDWQRLINNNWGFRPKRLNFKLFNIQVKEVTQNEGTKTIANNLTSTIQVFTDSEYQLPYVPGSAHQGCLPPFPADVFMIPQYGYLTLNNGSQAVGRSSFYCLEYFPSQMLRTGNNFEFSYTFEDVPFHSSYAHSQSLDRLMNPLIDQYLYYLSRTQSTGGTQGTQQLLFSQAGPANMSAQAKNWLPGPCYRQQRVSTTLSQNNNSNFAWTGATKYHLNGRDSLVNPGVAMATHKDDEERFFPSSGVLMFGKQGAGKDNVDYSSVMLTSEEEIKTTNPVATEQYGVVADNLQQTNGAPIVGTVNSQGALPGMVWQNRDVYLQGPIWAKIPHTDGNFHPSPLMGGFGLKHPPPQILIKNTPVPADPPTTFSQAKLASFITQYSTGQVSVEIEWELQKENSKRWNPEIQYTSNYYKSTNVDFAVNTEGTYSEPRPIGTRYLTRNL

SEQ ID NO: 408 - protein, 738 aa, Adeno-associated virus; identical to SEQ ID NO: 69

SEQ ID NO: 409 - protein, 728 aa, Artificial Sequence
  Description of Artificial Sequence: Synthetic polypeptide
MAADGYLPDWLEDNLSEGIREWWDLKPGAPKPKANQQKQDDGRGLVLPGYKYLGPFNGLDKGEPVNEADAAALEHDKAYDKQLEQGDNPYLKYNHADAEFQERLQEDTSFGGNLGRAVFQAKKRVLEPLGLVEEGAKTAPGKKRPIESPDSSTGIGRKGQQPAKKKLNFGQTGDSESVPDPQPIGEPPAGPSGLGSGTMAAGGGAPMADNNEGADGVGNASGNWHCDSTWLGDRVITTSTRTWALPTYNNHLYKQISSQSGATNDNHFFGYSTPWGYFDFNRFHCHFSPRDWQRLINNNWGFRPRKLRFKLFNIQVKEVTTNDGVTTIANNLTSTIQVFSDSEYQLPYVLGSAHQGCLPPFPADVFMIPQYGYLTLNNGSQSVGRSSFYCLEYFPSQMLRTGNNFEFSYTFEEVPFHSSYAHSQSLDRLMNPLIDQYLYYLARTQSTTGSTRELQFHQAGPNTMAEQSKNWLPGPCYRQQRLSKNIDSNNNSNFAWTGATKYHLNGRNSLTNPGVAMATNKDDEDQFFPINGVLVFGKTGAANKTTLENVLMTSEEEIKTTNPVATEEYGVVSSNLQSSTAGPQTQTVNSQGALPGMVWQNRDVYLQGPIWAKIPHTDGNFHPSPLMGGFGLKHPPPQILIKNTPVPANPPEVFTPAKFASFITQYSTGQVSVEIEWELQKENSKRWNPEIQYTSNYAKSNNVEFAVNNEGVYTEPRPIGTRYLTRNL

SEQ ID NO: 410 - DNA, 2489 bp, Adeno-associated virus
gaattcgccctttctacggctgcgtcaactggaccaatgagaactttcccttcaacgattgcgtcgacaagatggtgatctggtgggaggagggcaagatgacggccaaggtcgtgaagtccgccaaggccattcatcatctgctggggcgggctcccgagattgcttgctcggcctgcgatctggtcaacgtggacctggatgactgtgtttctgagcaataaatgacttaaaccaggtatggctgccgatggttatcttccagattggctcgaggacaacctctctgagggcattcgcgagtggtgggacttgaaacctggagccccgaaacccaaagccaaccagcaaaagcaggacgacggccggggtctggtgcttcctggctacaagtacctcggacccttcaacggactcgacaagggagagccggtcaacgaggcagacgccgcggccctcgagcacgacaaggcctacgacaagcagctcgagcagggggacaacccgtacctcaagtacaaccacgccgacgccgagtttcaggagcgtcttcaagaagatacgtcttttgggggcaacctcgggcgagcagtcttccaggccaagaagcgggttctcgaacctctcggtctggttgaggaaggcgctaagacggctcctggaaagaagagacccatagaatcccccgactcctccacgggcatcggcaggaaaggccagcagcccgctaaaaagaagctcaactttgggcagactggcgactcagagtcagtgcccgaccctcaaccaatcggagaaccccccgcaggcccctctggtctgggatctggtacaatggctgcaggcggtggcgctccaatggcagacaataacgaaggcgccgacggagtgggtaatgcctccggaaattggcattgcgattccacatggctgggcgacagagtcatcaccaccagcacccgcacctgggccctgcccacctacaacaaccacctctacaagcagatatcaagtcagagcggggctaccaacgacaaccacttcttcggctacagcaccccctggggctattttgacttcaacagattccactgccacttctcaccacgtgactggcagcgactcatcaacaacaactggggattccggcccagaaagctgcggttcaagttgttcaacatccaggtcaaggaggtcacgacgaacgacggcgttacgaccatcgccaataaccttaccagcacgattcaggtcttctcggactcggagtaccaactgccgtacgtcctcggctctgcgcaccagggctgcctccctccgttccctgcggacgtgttcatgattcctcagtacggatatctgactctaaacaacggcagtcagtctgtgggacgttcctccttctactgcctggagtactttccttctcagatgctgagaacgggcaataactttgaattcagctacacctttgaggaagtgcctttccacagcagctatgcgcacagccagagcctggaccggctgatgaatcccctcatcgaccagtacctgtactacctggcccggacccagagcactacggggtccacaagggagctgcagttccatcaggctgggcccaacaccatggccgagcaatcaaagaactggctgcccggaccctgttatcggcagcagagactgtcaaaaaacatagacagcaacaacaacagtaactttgcctggaccggggccactaaataccatctgaatggtagaaattcattaaccaacccgggcgtagccatggccaccaacaaggacgacgaggaccagttctttcccatcaacggagtgctggtttttggcaaaacgggggctgccaacaagacaacgctggaaaacgtgctaatgaccagcgaggaggagatcaaaaccaccaatcccgtggctacagaagaatacggtgtggtctccagcaacctgcaatcgtctacggccggaccccagacacagactgtcaacagccagggggctctgcccggcatggtctggcagaaccgggacgtgtacctgcagggtcccatctgggccaaaattcctcacacggacggcaactttcacccgtctcccctgatgggcggatttggactcaaacacccgcctcctcaaattctcatcaaaaacaccccggtacctgctaatcctccagaggtgtttactcctgccaagtttgcctcatttatcacgcagtacagcaccggccaggtcagcgtggagatcgagtgggaactgcagaaagaaaacagcaaacgctggaatccagagattcagtacacctcaaattatgccaagtctaataatgtggaatttgctgtcaacaacgaaggggtttatactgagcctcgccccattggcacccgttacctcacccgtaacctgtaattgcctgttaatcaataaaccggttaattcgtttcagttgaactttggtcaagggcgaattc

SEQ ID NO: 411 - protein, 728 aa, Artificial Sequence
  Description of Artificial Sequence: Synthetic polypeptide
MAADGYLPDWLEDNLSEGIREWWDLKPGAPKPKANQQKQDDGRGLVLPGYKYLGPFNGLDKGEPVNAADAAALEHDKAYDQQLKAGDNPYLRYNHADAEFQERLQEDTSFGGNLGRAVFQAKKRVLEPLGLVEEGAKTAPGKKRPIESPDSSTGIGKKGQQPAKKKLNFGQTGDSESVPDPQPIGEPPAGPSGLGSGTMAAGGGAPMADNNEGADGVGNASGNWHCDSTWLGDRVITTSTRTWALPTYNNHLYKQISSQSGATNDNHFFGYSTPWGYFDFNRFHCHFSPRDWQRLINNNWGFRPRKLRFKLFNIQVKEVTTNDGVTTIANNLTSTIQVFSDSEYQLPYVLGSAHQGCLPPFPADVFMIPQYGYLTLNNGSQSVGRSSFYCLEYFPSQMLRTGNNFEFSYTFEEVPFHSSYAHSQSLDRLMNPLIDQYLYYLARTQSTTGSTRELQFHQAGPNTMAEQSKNWLPGPCYRRQRLSKDIDSNNNSNFAWTGATKYHLNGRNSLTNPGVAMATNKDDEDQFFPINGVLVFGKTGAANKTTLENVLMTSEEEIKTTNPVATEEYGVVSSNLQSSTAGPQTQTVNSQGALPGMVWQNRDVYLQGPIWAKIPHTDGNFHPSPLMGGFGLKHPPPQILIKNTPVPANPPEVFTPAKFASFITQYSTGQVSVEIEWELQKENSKRWNPEIQYTSNYAKSNNVEFAVNNEGVYTEPRPIGTRYLTRNL

SEQ ID NO: 412 - DNA, 3098 bp, Adeno-associated virus
gaattcgccctttctacggctgcgtcaactggaccaatgagaactttcccttcaacgattgcgtcgacaagatggtgatctggtgggaggagggcaagatgacggccaaggtcgtggagtccgccaaggccattctcggcggcagcaaggtgcgcgtggaccaaaagtgcaagtcttccgcccagatcgatcccacccccgtgatcgtcacttccaacaccaacatgtgcgccgtgattgacgggaacagcaccaccttcgagcaccagcagccgttacaagaccggatgttcaaatttgaactcacccgccgtctggagcacgactttggcaaggtgacaaagcaggaagtcaaagagttcttccgctgggcgcaggatcacgtgaccgaggtggcgcatgagttctacgtcagaaagggtggagccaacaagagacccgcccccgatgacgcggataaaagcgagcccaagcgggcctgcccctcagtcgcggatccatcgacgtcagacgcggaaggagctccggtggactttgccgacaggtaccaaaacaaatgttctcgtcacgcgggcatgcttcagatgctgtttccctgcaagacatgcgagagaatgaatcagaatttcaacatttgcttcacgcacgggaccggagactgttcagaatgtttccccggcgtgtcagaatctcaaccggtcgtcagaaagaggacgtatcggaaactctgtgccattcatcatctgctggggcgggctcccgagattgcttgctcggcctgcgatctggtcaacgtggacctggatgactgtgtttctgagcaataaatgacttaaaccaggtatggctgccgatggttatcttccagattggctcgaggacaacctctctgagggcattcgcgagtggtgggacttgaaacctggagccccgaaacccaaagccaaccagcaaaagcaggacgacggccggggtctggtgcttcctggctacaagtacctcggacccttcaacggactcgacaagggagagccggtcaacgcggcggacgcagcggccctcgagcacgacaaggcctacgaccagcagctcaaagcgggtgacaatccgtacctgcggtataaccacgccgacgccgagtttcaggagcgtcttcaagaagatacgtcttttgggggcaacctcgggcgagcagtcttccaggccaagaagcgggttctcgaacctctcggtctggttgaggaaggcgctaagacggctcctggaaagaagagacccatagaatcccccgactcctccacgggcatcggcaagaaaggccagcagcccgctaaaaagaagctcaactttgggcagactggcgactcagagtcagtgcccgaccctcaaccaatcggagaaccccccgcaggcccctctggtctgggatctggtacaatggctgcaggcggtggcgctccaatggcagacaataacgaaggcgccgacggagtgggtaatgcctccggaaattggcattgcgattccacatggctgggcgacagagtcatcaccaccagcacccgcacctgggccctgcccacctacaacaaccacctctacaagcagatatcaagtcagagcggggctaccaacgacaaccacttcttcggctacagcaccccctggggctattttgacttcaacagattccactgccacttctcaccacgtgactggcagcgactcatcaacaacaactggggattccggcccagaaagctgcggttcaagttgttcaacatccaggtcaaggaggtcacgacgaacgacggcgttacgaccatcgctaataaccttaccagcacgattcaggtcttctcggactcggagtaccaactgccgtacgtcctcggctctgcgcaccagggctgcctccctccgttccctgcggacgtgttcatgattcctcagtacggatatctgactctaaacaacggcagtcagtctgtgggacgttcctccttctactgcctggagtactttccttctcagatgctgagaacgggcaataactttgaattcagctacacctttgaggaagtgcctttccacagcagctatgcgcacagccagagcctggaccggctgatgaatcccctcatcgaccagtacctgtactacctggcccggacccagagcactacggggtccacaagggagctgcagttccatcaggctgggcccaacaccatggccgagcaatcaaagaactggctgcccggaccctgttatcggcggcagagactgtcaaaagacatagacagcaacaacaacagtaactttgcctggaccggggccactaaataccatctgaatggtagaaattcattaaccaacccgggcgtagccatggccaccaacaaggacgacgaggaccagttctttcccatcaacggagtgctggtttttggcaaaacgggggctgccaacaagacaacgctggaaaacgtgctaatgaccagcgaggaggagatcaaaaccaccaatcccgtggctacagaagaatacggtgtggtctccagcaacctgcaatcgtctacggccggaccccagacacagactgtcaacagccagggggctctgcccggcatggtctggcagaaccgggacgtgtacctgcagggtcccatctgggccaaaattcctcacacggacggcaactttcacccgtctcccctgatgggcggatttggactcaaacacccgcctcctcaaattctcatcaaaaacaccccggtacctgctaatcctccagaggtgtttactcctgccaagtttgcctcatttatcacgcagtacagcaccggccaggtcagcgtggagatcgagtgggaactgcagaaagagaacagcaaacgctggaatccagagattcagtacacctcaaattatgccaagtctaataatgtggaatttgctgtcaacaacgaaggggtttatactgagcctcgccccattggcacccgttacctcacccgtaacctgtaattacttgttaatcaataaaccggttgattcgtttcagttgaactttggtctctgcgaagggcgaattc

SEQ ID NO: 413 - protein, 685 aa, Artificial Sequence
  Description of Artificial Sequence: Synthetic polypeptide
MAADGYLPDWLEDNLSEGIREWWDLKPGAPKPKANQQKQDDGRGLVLPGYKYLGPFNGLDKGEPVNEADAAALEHDKAYDKQLEQGDNPYLKYNHADAEFQERLQEDTSFGGNLGRAVFQAKKRVLEPLGLVEEGAKTAPGKKRPVEPSPQRSPDSSTGIGKTGQQPAKKRLNFGQTGDSESVPDPQPIGEPPAGPSGLGSGTMAAGGGAPMADNNEGADGVGSSSGNWHCDSTWLGDRVITTSTRTWALPTYNNHLYKQISNGTSGGSTNDNTYFGYSTPWGYFDFNRFHCHFSPRDWQRLINNNWGFRPKRLNFKLFNIQVKEVTQNEGTKTIANNLTSTIQVFTDSEYQLPYVLGSAHQGCLPPFPADVFMIPQYGYLTLNNGSQAVGRSSFYCLEYFPSQMLRTGNNFEFSYQFEDVPFHSSYAHSQSLDRLTNPLIDQYLYYLARTQSTTGSTRGLQFHQAGPNTMAEQSKNWLPGPCYRQQRLSKNIDSNNNSNFAWTGATKYHLNGRNSLTNPGVAMATNKDDEDQFFPINGVLVFGKTGAANKTTLENVLMTSEEEIKTTNPVATEEYGVVSSNLQSSTAGPQTQTVNSQGALPGMVWQNRDVYLQGPIWAKIPHTDGNFHPSPLMGGFGLKHPPPQILIKYTSNYYKSTNVDFAVNTEGTYSEPRPIGTRYLTRNL

SEQ ID NO: 414 - DNA, 2969 bp, Adeno-associated virus
gaattcgccctttctacggctgcgtcaactggaccaatgagaactttcccttcaacgattgcgtcgacaagatggtgatctggtgggaggagggcaagatgacggccaaggtcgtggagtccgccaaggccattctcggcggcagcaaggtgcgcgtggaccaaaagtgcaagtcgtccgcccagatcgaccccacccccgtgatcgtcacctccaacaccaacatgtgcgccgtgattgacgggaacagcaccaccttcgagcaccagcagccgttacaagaccggatgttcaaatttgaactcacccgccgtctggagcacgactttggcaaggtgacaaagcaggaagtcaaagagttcttccgctgggcgcaggatcacgtgaccgaggtggcgcatgagttctacgtcagaaagggtggagccaacaagagacccgcccccgatgacgcggataaaagcgagcccaagcgggcctgcccctcagtcgcggatccatcgacgtcagacgcggaaggagctccggtggactttgccgacaggtaccaaaacaaatgttctcgtcacgcgggcatgcttcagatgctgtttccctgcaagacatgcgagagaatgaatcagaatttcaacatttgcttcacgcacgggaccagagactgttcagaatgtttccccggcgtgtcagaatctcaaccggtcgtcagaaagaggacgtatcggaaactctgtgccattcatcatctgctggggcgggctcccgagattgcttgctcggcctgcgatctggtcaacgtggacctggatgactgtgtttctgagcaataaatgacttaaaccaggtatggctgccgatggttatcttccagattggctcgaggacaacctctctgagggcatccgcgagtggtgggacttgaaacctggagccccgaaacccaaagccaaccagcaaaagcaggacgacggccggggtctggtgcttcctggctacaagtacctcggacccttcaacggactcgacaagggagagccggtcaacgaggcagacgccgcggccctcgagcacgacaaggcctacgacaagcagctcgagcagggggacaacccgtacctcaagtacaaccacgccgacgccgagtttcaggagcgtcttcaagaagatacgtcttttgggggcaacctcgggcgagcagtcttccaggccaagaagcgggttctcgaacctctcggtctggttgaggaaggcgctaagacggctcctggaaagaagagaccggtagagccatcaccccagcgttctccagactcctctacgggcatcggcaagacaggccagcagcccgcgaaaaagagactcaactttgggcagactggcgactcagagtcagtgcccgaccctcaaccaatcggagaaccccccgcaggcccctctggtctgggatctggtacaatggctgcaggcggtggcgctccaatggcagacaataacgaaggcgccgacggagtgggtagttcctcaggaaattggcattgcgattccacatggctgggcgacagagtcatcaccaccagcacccgaacctgggccctccccacctacaacaaccacctctacaagcaaatctccaacgggacatcgggaggaagcaccaacgacaacacctacttcggctacagcaccccctgggggtattttgactttaacagattccactgccacttctcaccacgtgactggcagcgactcatcaacaacaactggggattccggcccaagagactcaacttcaagctcttcaacatccaggtcaaggaggtcacgcagaatgaaggcaccaagaccatcgccaataaccttaccagcacgattcaggtctttacggactcggaataccagctcccgtacgtcctcggctctgcgcaccagggctgcctgcctccgttcccggcggacgtcttcatgattcctcagtacgggtacctgactctgaacaacggcagtcaggccgtgggccgttcctccttctactgcctggagtactttccttctcaaatgctgagaacgggcaacaactttgagttcagctaccagtttgaggacgtgccttttcacagcagctacgcgcacagccaaagcctggaccggctgacgaaccccctcatcgaccagtacctgtactacctggcccggacccagagcactacggggtccacaagggggctgcagttccatcaggctgggcccaacaccatggccgagcaatcaaagaactggctgcccggaccctgttatcggcagcagagactgtcaaaaaacatagacagcaacaacaacagtaactttgcctggaccggggccactaaataccatctgaatggtagaaattcattaaccaacccgggcgtagccatggccaccaacaaggacgacgaggaccagttctttcccatcaacggagtgctggtttttggcaaaacgggggctgccaacaagacaacgctggaaaacgtgctaatgaccagcgaggaggagatcaaaaccaccaatcccgtggctacagaagaatacggtgtggtctccagcaacctgcaatcgtctacggccggaccccagacacagactgtcaacagccagggggctctgcccggcatggtctggcagaaccgggacgtgtacctgcagggtcccatctgggccaaaattcctcacacggacggcaactttcacccgtctcccctgatgggcggatttggactcaaacacccgcctcctcaaattctcatcaagtatacttccaactactacaaatctacaaatgtggactttgctgtcaatactgagggtacttattcagagcctcgccccattggcacccgttacctcacccgtaacctgtaattgcctgttaatcaataaaccggttaattcgtttcagttgaactttggtctctgcgaagggcgaattc

SEQ ID NO: 415 - protein, 733 aa, Artificial Sequence
  Description of Artificial Sequence: Synthetic polypeptide
MAADGYLPDWLEDNLSEGIREWWDLKPGAPKPKANQQKQDDGRGLVLPGYKYLGPFNGLDKGEPVNAADAAALEHDKAYDQQLKAGDNPYLRYNHADAEFQERLQEDTSFGGNLGRAVFQAKKRVLEPLGLVEEGAKTAPGKKRPIESPDSSTGIGKKGQQPAKKKLNFGQTGDSESVPDPQPIGEPPAGPSGLGSGTMAAGGGAPMADNNEGADGVGSSSGNWHCDSTWLGDRVITTSTRTWALPTYNNHLYKQISNGTSGGSTNDNTYFGYSTPWGYFDFNRFHCHFSPRDWQRLINNNWGFRPKRLNFKLFNIQVKEVTQNEGTKTIANNLTSTIQVFTDSEYQLPYVLGSAHQGCLPPFPADVFMIPQYGYLTLNNGSQAVGRSSFYCLEYFPSQMLRTGNNFEFSYQFEDVPFHSSYAHSQSLDRLMNPLIDQYLYYLSRTQSTGGTAGTQQLLFSQAGPNNMSAQAKNWLPGPCYRQQRVSTTVSQNNNSNFAWTGATKYHLNGRDSLVNPGVAMATHKGDEERFFPSSGVLMFGKQGAGKDNVDYSSVMLTSEEEIKTTNPVATEQYGVVADNLQQQNAAPIVGAVNSQGALPGMVWQNRDVYLQGPIWAKIPHTDGNFHPSPLMGGFGLKHPPPQILIKNTPVPADPPTTFSQAKLASFITQYSTGQVSVEIEWELQKENSKRWNPEIQYTSNYYKSTNVDFAVNTEGTYSEPRPIGTRYLTRSL

SEQ ID NO: 416 - DNA, 3113 bp, Adeno-associated virus
gaattcgccctttctacggctgcgtcaactggaccaatgagaactttcccttcaacgattgcgtcgacaagatggtgatctggtgggaggagggcaagatgacggccaaggtcgtggagtccgccaaggccattctcggcggcagcaaggtgcgcgtggaccaaaagtgcaagtcgtccgcccagatcgatcccacccccgtgatcgtcacttccaacaccaacatgtgcgccgtgattgacgggaacagcaccaccttcgagcaccagcagccgttacaagaccggatgttcaaatttgaactcacccgccgtctggagcatgactttggcaaggtgacaaagcaggaagtcaaagagttcttccgctgggcgcaggatcacgtgaccgaggtggcgcatgagttctacgtcagaaagggtggagccaacaagagacccgcccccgatgacgcggataaaagcgagcccaagcgggcctgcccctcagtcgcggatccatcgacgtcagacgcggaaggagctccggtggactttgccgacaggtaccaaaacaaatgttctcgtcacgcgggcatgcttcagatgctgtttccctgcaagacatgcgagagaatgaatcagaatttcaacatttgcttcacgcacgggaccagagactgttcagaatgtttccccggcgtgtcagaatctcaaccggtcgtcagaaagaggacgtatcggaaactctgtgccattcatcatctgctggggcgggctcccgagattgcttgctcggcctgcgatctggtcaacgtggacctggatgactgtgtttctgagcaataaatgacttaaaccaggtatggctgccgatggttatcttccagattggctcgaggacaacctctctgagggcattcgcgagtggtgggacttgaaacctggagccccgaaacccaaagccaaccagcaaaagcaggacgacggccggggtctggtgcttcctggctacaagtacctcggacccttcaacggactcgacaagggggagcccgtcaacgcggcggacgcagcggccctcgagcacgacaaggcctacgaccagcagctcaaagcgggtgacaatccgtacctgcggtataaccacgccgacgccgagtttcaggagcgtcttcaagaagatacgtcttttgggggcaacctcgggcgagcagtcttccaggccaagaagcgggttctcgaacctctcggtctggttgaggaaggcgctaagacggctcctggaaagaagagacccatagaatcccccgactcctccacgggcatcggcaagaaaggccagcagcccgctaaaaagaagctcaactttgggcagactggcgactcagagtcagtgcccgaccctcaaccaatcggagaaccccccgcaggcccctctggtctgggatctggtacaatggctgcaggcggtggcgctccaatggcagacaataacgaaggcgccgacggagtgggtagttcctcaggaaattggcattgcgattccacatggctgggcgacagagtcatcaccaccagcacccgaacctgggccctccccacctacaacaaccacctctacaagcaaatctccaacgggacatcgggaggaagcaccaacgacaacacctacttcggctacagcaccccctgggggtattttgactttaacagattccactgccacttctcaccacgtgactggcagcgactcatcaacaacaactggggattccggcccaagagactcaacttcaagctcttcaacatccaggtcaaggaggtcacgcagaatgaaggcaccaagaccatcgccaataaccttaccagcacgattcaggtctttacggactcggaataccagctcccgtacgtcctcggctctgcgcaccagggctgcctgcctccgttcccggcggacgtcttcatgattcctcagtacgggtacctgactctgaacaacggcagtcaggccgtgggccgttcctccttctactgcctggagtactttccttctcaaatgctgagaacgggcaacaactttgagttcagctaccagtttgaggacgtgccttttcacagcagctatgcgcacagccaaagcctggaccggctgatgaaccccctcatcgaccagtacctgtactacctgtctcggactcagtccacgggaggtaccgcaggaactcagcagttgctattttctcaggccgggcctaataacatgtcggctcaggccaaaaactggctacccgggccctgctaccggcagcaacgcgtctccacgacagtgtcgcaaaataacaacagcaactttgcttggaccggtgccaccaagtatcatctgaatggcagagactctctggtaaatcccggtgtcgctatggcaacgcacaagggcgacgaagagcgattttttccatccagcggagtcttgatgtttgggaaacagggagctggaaaagacaacgtggactatagcagcgttatgctaaccagtgaggaagaaatcaaaaccaccaacccagtggccacagaacagtacggcgtggtggccgataacctgcaacagcaaaacgccgctcctattgtaggggccgtcaacagtcaaggagccttacctggcatggtctggcagaaccgggacgtgtacctgcagggtcctatctgggccaagattcctcacacggacggcaactttcatccttcgccgctgatgggaggctttggactgaaacacccgcctcctcagatcctgattaagaatacacctgttcccgcggatcctccaactaccttcagtcaagccaagctggcgtcgttcatcacgcagtacagcaccggacaggtcagcgtggaaattgaatgggagctgcagaaagagaacagcaagcgctggaacccagagattcagtatacttccaactactacaaatctacaaatgtggactttgctgtcaatactgagggtacttattcagagcctcgccccattggcacccgttacctcacccgtagcctgtaattgcctgttaatcaataaaccggttgattcgtttcagttgaactttggtctctgcgaagggcgaattc

SEQ ID NO: 417 - protein, 738 aa, Artificial Sequence
  Description of Artificial Sequence: Synthetic polypeptide
MAADGYLPDWLEDNLSEGIREWWDLKPGAPKPKANQQKQDDGRGLVLPGYKYLGPFNGLDKGEPVNAADAAALEHDKAYDQQLKAGDNPYLRYNHADAEFQERLQEDTSFGGNLGRAVFQAKKRVLEPLGLVEEGAKTAPGKKRPVEPSPQRSPDSSTGIGKTGQQPAKKRLNFGQTGDSESVPDPQPIGEPPAGPSGLGSGTMAAGGGAPMADNNEGADGVGSSSGNWHCDSTWLGDRVITTSTRTWALPTYNNHLYKQISNGTSGGSTNDNTYFGYSTPWGYFDFNRFHCHFSPRDWQRLINNNWGFRPKRLNFKLFNIQVKEVTQNEGTKTIANNLTSTIQVFTDSEYQLPYVLGSAHQGCPPPFPADVFMIPQYGYLTLNNGSQAVGRSSFYCLEYFPSQMRRTGNNFEFSYQFEDVPFHSSYAHSQSLDRLMNPLIDQYLYYLSRTQSTGGTAGTQQLLFSQAGPNNMSAQAKNWLPGPCYRQQRVSTTLSQNNNSNFAWTGATKYHLNGRDSLVNPGVAMATHKDDEERFFPSSGVLMFGKQGAGKDNVDYSSVMLTSEEEIKTTNPVATEQYGVVADNLQQQNAAPIVGAVNSQGALPGMVWQNRDVYLQGPIWAKIPHTDGNFHPSPLMGGFGLKHPPPQILIKNTPVPADPPTTFSQAKLASFITQYSTGQVSVEIEWELQKENSKRWNPEIQYTSNYYKSTNVDFAVNTEGTYSEPRPIGTRYLTRNL

SEQ ID NO: 418 - DNA, 3128 bp, Adeno-associated virus
gaattcgccctttctacggctgcgtcaactggaccaatgagaactttcccttcaacgattgcgtcgacaagatggtgatctggtgggaggagggcaagatgacggccaaggtcgtggagtccgccaaggccattctcggcggcagcaaggtgcgcgtggaccaaaagtgcaagtcgtccgcccagatcgaccccacccccgtgatcgtcacctccaacaccaacatgtgcgccgtgattgacgggaacagcaccaccttcgagcaccagcagccgttgcaggaccggatgttcaaatttgaactcacccgccgtctggagcatgactttggcaaggtgacaaagcaggaagtcaaagagttcttccgctgggcgcaggatcacgtgaccgaggtggcgcatgagttctacgtcagaaagggtggagccaacaagagacccgcccccgatgacgcggataaaagcgagcccaagcgggcctgcccctcagtcgcggatccatcgacgtcagacgcggaaggagctccggtggactttgccgacaggtaccaaaacaaatgttctcgtcacgcgggcatgcttcagatgctgtttccctgcaagacatgcgagagaatgaatcagaatttcaacatttgcttcacgcgcgggaccagagactgttcagaatgtttcccgggcgtgtcagaatctcaaccggtcgtcagaaagaggacgtatcggaaactctgtgccattcatcatctgctggggcgggctcccgagattgcttgctcggcctgcgatctggtcaacgtggacctggatgactgtgtttctgagcaataaatgacttaaaccaggtatggctgccgatggttatcttccagattggctcgaggacaacctctctgagggcattcgcgagtggtgggacttgaaacctggagccccgaaacccaaagccaaccagcaaaagcaggacgacggccggggtctggtgcttcctggctacaagtacctcggacccttcaacggactcgacaagggggagcccgtcaacgcggcggacgcagcggccctcgagcacgacaaggcctacgaccagcagctcaaagcgggtgacaatccgtacctgcggtataaccacgccgacgccgagtttcaggagcgtctgcaagaagatacgtcttttgggggcaacctcgggcgagcagtcttccaggccaagaagcgggttctcgaacctctcggtctggttgaggaaggcgctaagacggctcctggaaagaagagaccggtagagccatcaccccagcgttctccagactcctctacgggcatcggcaagacaggccagcagcccgcgaaaaagagactcaactttgggcagactggcgactcagagtcagtgcccgaccctcaaccaatcggagaaccccccgcaggcccctctggtctgggatctggtacaatggctgcaggcggtggcgctccaatggcagacaataacgaaggcgccgacggagtgggtagttcctcaggaaattggcattgcgattccacatggctgggcgacagagtcatcaccaccagcacccgaacctgggccctccccacctacaacaaccacctctacaagcaaatctccaacgggacatcgggaggaagcaccaacgacaacacctacttcggctacagcaccccctgggggtattttgactttaacagattccactgccacttctcaccacgtgactggcagcgactcatcaacaacaactggggattccggcccaagagactcaacttcaagctcttcaacatccaggtcaaggaggtcacgcagaatgaaggcaccaagaccatcgccaataaccttaccagcacgattcaggtctttacggactcggaataccagctcccgtacgtcctcggctctgcgcaccagggctgcccgcctccgttcccggcggacgtcttcatgattcctcagtacgggtacctgactctgaacaacggcagtcaggccgtgggccgttcctccttctactgcctggagtactttccttctcaaatgcggagaacgggcaacaactttgagttcagctaccagtttgaggacgtgccttttcacagcagctacgcgcatagccaaagcctggaccggctgatgaaccccctcatcgaccagtacctgtactacctgtctcggactcagtccacgggaggtaccgcaggaactcagcagttgctattttctcaggccgggcctaataacatgtcggctcaggccaaaaactggctacccgggccctgctaccggcagcaacgcgtctccacgacactgtcgcaaaataacaacagcaactttgcttggaccggtgccaccaagtatcatctgaatggcagagactctctggtaaatcccggtgtcgctatggcaacgcacaaggacgacgaagagcgattttttccatccagcggagtcttgatgtttgggaaacagggagctggaaaagacaacgtggactatagcagcgttatgctaaccagtgaggaagaaatcaaaaccaccaacccagtggccacagaacagtacggcgtggtggccgataacctgcaacagcaaaacgccgctcctattgtaggggccgtcaacagtcaaggagccttacctggcatggtctggcagaaccgggacgtgtacctgcagggtcctatctgggccaagattcctcacacggacggcaactttcatccttcgccgctgatgggaggctttggactgaaacacccgcctcctcagatcctgattaagaatacacctgttcccgcggatcctccaactaccttcagtcaagccaagctggcgtcgttcatcacgcagtacagcaccggacaggtcagcgtggaaattgaatgggagctgcagaaagagaacagcaagcgctggaacccagagattcagtatacttccaactactacaaatctacaaatgtggactttgctgtcaatactgagggtacttattcagagcctcgccccattggcacccgttacctcacccgtaacctgtaattgcctgttaatcaataaaccggttaattcgtttcagttgaactttggtctctgcgaagggcgaattc

SEQ ID NO: 419 - protein, 738 aa, Adeno-associated virus; identical to SEQ ID NO: 407

SEQ ID NO: 420 - DNA, 1933 bp, Adeno-associated virus
  misc_feature (1302)..(1302): n is a, c, t, or g
caaggcctacgaccagcagctcaaagcgggtgacaatccgtacctgcggtataaccacgccgacgccgagtttcaggagcgtcttcaagaagatacgtcttttgggggcaacctcgggcgagcagtcttccaggccaaaaagcgggttctcgaacctcttggtctggttgagacgccagctaagacggcacctggaaagaagcgaccggtagactcgccagactccacctcgggcatcggcaagaaaggccagcagcccgcgaaaaagagactcaactttgggcagactggcgactcagagtcagtccccgaccctcaaccaatcggagaaccaccagcaggcccctctggtctgggatctggtacaatggctgcaggcggtggcgcaccaatggctgacaataacgagggcgccgacggagtgggtaatgcctcaggaaattggcattgcgattccacatggctgggcgacagagtcatcaccaccagcacccgaacctgggccctgcccacctacaacaaccacctctacaagcaaatctccagtcagtcagcagggagcaccaacgataacgtctatttcggctacagcaccccctgggggtattttgacttcaacagattccattgccacttctcaccacgtgactggcagcgacttatcaacaacaactggggattccggcccaagaagctcaacttcaagctcttcaacatccaggtcaaggaggtcacgacgaatgacggtgtcacaaccatcgctaataaccttaccagcacggttcaggtcttttcggactcggaatatcaactgccgtacgtcctcggctccgcgcaccagggctgcctgcctccgttcccggcagacgtgttcatgattccgcagtacggatacctgactctgaacaatggcagccaatcggtaggccgttcctccttctactgcctggagtactttccttctcagatgctgagaacgggcaacaacttcacctttagctacaccttcgaggacgtgcctttccacagcagctacgcgcacagccagagtctggaccggctgatgaatcccctcatcgaccagtacctgtactacttggccagaacacagagcaacgcaggaggtactgctggcaatcgggaactgcagttttatcagggcggacctaccaccatggccgaacaagcaaagaactggctgcccggaccttgcttccggcaacagagagtatccaagacgctggatcaaaataacaacagcaactttgcctggactggtgccacaaaataccatttaaatgnaagaaattcattggttaatcccggtgtcgccatggcaacccacaaggacgacgaggaacgcttcttcccttcgagcggagttctaatttttggcaaaactggagcagctaataaaactacattagaaaacgtgctcatgacaaatgaagaagaaattcgtcctaccaacccggtagctaccgaggaatacgggattgtaagcagcaacttgcaggcggctagcaccgcagcccagacacaagttgttaacaaccagggagccttacctggcatggtctggcagaaccgggacgtgtacctgcaaggtcccatttgggccaagattcctcacacggacggcaactttcacccgtctcctctaatgggtggctttggactgaaacacccgcctccccagatcctgatcaaaaacacaccggtacctgctaatcctccagaagtgtttactcctgccaagtttgcttccttcatcacgcagtacagcaccgggcaagtcagcgttgagatcgagtgggagctgcagaaagagaacagcaagcgctggaacccagagattcagtacacctccaactttgacaaacagactggagtggactttgctgttgacagccagggtgtttactctgagcct

SEQ ID NO: 421 - protein, 733 aa, Artificial Sequence
  Description of Artificial Sequence: Synthetic polypeptide
MAADGYLPDWLEDNLSEGIREWWDLKPGAPKPKANQQKQDDGRGLVLPGYKYLGPFNGLDKGEPVNAADAAALEHDKAYDQQLKAGDNPYLRYNHADAEFQERLQEDTSFGGNLGRAVFQAKKRVLEPLGLVEEGAKTAPGKKRPLESPQEPDSSSGIGKKGKQPAKKRLNFEEDTGAGDGPPEGSDTSAMSSDIEMRAAPGGNAVDAGQGSDGVGNASGDWHCDSTWSEGKVTTTSTRTWVLPTYNNHLYLRLGTTSNSNTYNGFSTPWGYFDFNRFHCHFSPRDWQRLINNNWGLRPKAMRVKIFNIQVKEVTTSNGETTVANNLTSTVQIFADSSYELPYVMDAGQEGSLSPFPNDVFMVPQYGYCGIVTGENQNQTDRNAFYCLEYFPSQMLRTGNNFEMAYNFGKVPFHSMYAYSQSPDRLMNPLLDQYLWHLQSTTSGETLNQGNAATTFGKIRSGDFAFYRKNWLPGPCVKQQRLSKTASQNYKIPASGGNALLKYDTHYTLNNRWSNIAPGPPMATAGPSDGDFSNAQLIFPGPSVTGNTTTSANNLLFTSEEEIAATNPRDTDMFGQIADNNQNATTAPITGNVTAMGVLPGMVWQNRDIYYQGPIWAKIPHADGHFHPSPLIGGFGLKHPPPQIFIKNTPVPANPATTFTAARVDSFITQYSTGQVAVQIEWEIEKERSKRWNPEVQFTSNYGNQSSMLWAPDTTGKYTEPRVIGSRYLTNHL

SEQ ID NO: 422 - DNA, 3105 bp, Adeno-associated virus
gaattcgcccttgctgcgtcaactggaccaatgagaactttcccttcaacgattgcgtcgacaagatggtgatctggtgggaggagggcaagatgaccgccaaggtcgtggagtccgccaaggccattctgggcggaagcaaggtgcgcgtggaccaaaagtgcaagtcatcggcccagatcgaccccacgcccgtgatcgtcacctccaacaccaacatgtgcgccgtgatcgacgggaacagcaccaccttcgagcaccagcagccgctgcaggaccgcatgttcaagttcgagctcacccgccgtctggagcacgactttggcaaggtgaccaagcaggaagtcaaagagttcttccgctgggctcaggatcacgtgactgaggtggcgcatgagttctacgtcagaaagggcggagccaccaaaagacccgcccccagtgacgcggatataagcgagcccaagcgggcctgcccctcagttgcggagccatcgacgtcagacgcggaagcaccggtggactttgcggacaggtaccaaaacaaatgttctcgtcacgcgggcatgcttcagatgctgtttccctgcaagacatgcgagagaatgaatcagaatttcaacgtctgcttcacgcacggggtcagagactgctcagagtgcttccccggcgcgtcagaatctcaacccgtcgtcagaaaaaagacgtatcagaaactgtgcgcgattcatcatctgctggggcgggcacccgagattgcgtgttcggcccgcgatctcgtcaacgtggacttggatgactgtgtttctgagcaataaatgacttaaaccaggtatggctgctgacggttatcttccagattggctcgaggacaacctctctgagggcattcgcgagtggtgggacctgaaacctggagcccccaagcccaaggccaaccagcagaagcaggacgacggccggggtctggtgcttcctggctacaagtacctcggacccttcaacggactcgacaagggggagcccgtcaacgcggcggacgcagcggccctcgagcacgacaaggcctacgaccagcagctcaaagcgggtgacaatccgtacctgcggtataaccacgccgacgccgagtttcaggagcgtctgcaagaagatacgtcttttgggggcaacctcgggcgagcagtcttccaggccaagaagagggtactcgaacctctgggcctggttgaagaaggtgctaagacggctcctggaaagaagagaccgttagagtcaccacaagagcccgactcctcctcaggaatcggcaaaaaaggcaaacaaccagccaaaaagagactcaactttgaagaggacactggagccggagacggaccccctgaaggatcagataccagcgccatgtcttcagacattgaaatgcgtgcagcaccgggcggaaatgctgtcgatgcgggacaaggttccgatggagtgggtaatgcctcgggtgattggcattgcgattccacctggtctgagggcaaggtcacaacaacctcgaccagaacctgggtcttgcccacctacaacaaccacttgtacctgcggctcggaacaacatcaaacagcaacacctacaacggattctccaccccctggggatactttgactttaacagattccactgtcacttctcaccacgtgactggcaaagactcatcaacaacaactggggactacgaccaaaagccatgcgcgttaaaatcttcaatatccaagttaaggaggtcacaacgtcgaacggcgagactacggtcgctaataaccttaccagcacggttcagatatttgcggactcgtcgtatgagctcccgtacgtgatggacgctggacaagagggaagtctgtctcctttccccaatgacgtcttcatggtgcctcaatatggctactgtggcattgtgactggcgaaaatcagaaccagacggacagaaatgctttctactgcctggagtattttccttcacaaatgctgagaactggcaataactttgaaatggcttacaactttgggaaggtgccgttccactcaatgtatgcttacagccagagcccggacagactgatgaatcccctcctggaccagtacctgtggcacttacagtcgaccacctctggagagactctgaatcaaggcaatgcagcaaccacatttggaaaaatcaggagtggagactttgccttttacagaaagaactggctgcctgggccttgtgttaaacagcagagactctcaaaaactgccagtcaaaattacaagattcctgccagcgggggcaacgctctgttaaagtatgacacccactataccttaaacaaccgctggagcaacatagcgcctggacctccaatggcaacagctggaccttcagatggggacttcagcaacgcccagctcatcttccctggaccatcagtcaccggaaacacaacaacctcagcaaacaatctgttgtttacatcagaagaagaaattgctgccaccaacccaagagacacggacatgtttggtcagattgctgacaataatcagaatgctacaactgctcccataaccggcaacgtgactgctatgggagtgcttcctggcatggtgtggcaaaacagagacatttactaccaagggccaatttgggccaagatcccacacgcggacggacattttcatccttcaccgctaattggcggttttggactgaaacatccgcctccccagatatttatcaaaaacacccccgtacctgccaatcctgcgacaaccttcactgcagccagagtggactctttcatcacacaatacagcaccggccaggtcgctgttcagattgaatgggaaatcgaaaaggaacgctccaaacgctggaatcctgaagtgcagtttacttcaaactatgggaaccagtcttctatgttgtgggctcccgatacaactgggaagtatacagagccgcgggttattggctctcgttatttgactaatcatttgtaactgcctagttaatcaataaaccgtgtgattcgtttcagttgaactttggtctctgcgaagggcgaattc

SEQ ID NO: 423 - protein, 733 aa, Adeno-associated virus
MAADGYLPDWLEDNLSEGIREWWDLKPGAPKPKANQQKQDDGRGLVLPGYKYLGPFNGLDKGEPVNAADAAALEHDKAYDQQLKAGDNPYLRYNHADAEFQERLQEDTSFGGNLGRAVFQAKKRVLEPLGLVEEGAKTAPGKKRPLESPQEPDSSSGIGKKGKQPAKKRLNFEEDTGAGDGPPEGSDTSAMSSDIEMRAAPGGNAVDAGQGSDGVGNASGDWHCDSTWSEGKVTTTSTRTWVLPTYNNHLYLRLGTTSNSNTYNGFSTPWGYFDFNRFHCHFSPRDWQRLINNNWGLRPKAMRVKIFNIQVKEVTTSNGETTVANNLTSTVQIFADSSYELPYVMDAGQEGSLPPFPNDVFMVPQYGYCGIVTGENQNQTDRNAFYCLEYFPSQMLRTGNNFEMAYNFEKVPFHSMYAHSQSLDRLMNPLLDQYLWHLQSTTSGETLNQGNAATTFGKIRSGDFAFYRKNWLPGPCVKQQRFSKTASQNYKIPASGGNALLKYDTHYTLNNRWSNIAPGPPMATAGPSDGDFSNAQLIFPGPSVTGNTTTSANNLLFTSEEEIAATNPRDTDMFGQIADNNQNATTAPITGNVTAMGVLPGMVWQNRDIYYQGPIWAKIPHADGHFHPSPLIGGFGLKHPPPQIFIKNTPVPANPATTFTAARVDSFITQYSTGQVAVQIEWEIEKERSKRWNPEVQFTSNYGNQSSMLWAPDTTGKYTEPRVIGSRYLTNHL

SEQ ID NO: 424 - DNA, 3105 bp, Adeno-associated virus
gaattcgcccttgctgcgtcaactggaccaatgagaactttcccttcaacgattgcgtcgacaagatggtgatctggtgggaggagggcaagatgaccgccaaggtcgtggagtccgccaaggccattctgggcggaagcaaggtgcgcgtggaccaaaagtgcaagtcatcggcccagatcgaccccacgcccgtgatcgtcacctccaacaccaacatgtgcgccgtgatcgacgggaacagcaccaccttcgagcaccagcagccgctgcaggaccgcatgttcaagttcgagctcacccgccgtctggagcacgactttggcaaggtgaccaagcaggaagtcaaagagttcttccgctgggctcaggatcacgtgactgaggtggcgcatgagttctacgtcagaaagggcggagccaccaaaagacccgcccccagtgacgcggatataagcgagcccaagcgggcctgcccctcagttgcggagccatcgacgtcagacgcggaagcaccggtggactttgcggacaggtaccaaaacaaatgttctcgtcacgcgggcatgcttcagatgctgtttccctgcaagacatgcgagagaatgaatcagaatttcaacgtctgcttcacgcacggggtcagagactgctcagagtgcttccccggcgcgtcagaatctcaacccgtcgtcagaaaaaagacgtatcagaaactgtgcgcgattcatcatctgctggggcgggcacccgagattgcgtgttcggcctgcgatctcgtcaacgtggacttggatgactgtgtttctgagcaataaatgacttaaaccaggtatggctgctgacggttatcttccagattggctcgaggacaacctctctgagggcattcgcgagtggtgggacctgaaacctggagcccccaagctcaaggccaaccagcagaagcaggacgacggccggggtctggtgcttcctggctacaagtacctcggacccttccacggactcgacaagggggagcccgtcaacgcggcggacgcagcggccctcgagcacgacaaggcctacgaccagcagctcaaagcgggtgacaatccgtacctgcggtataaccacgccgacgccgagtttcaggagcgtctgcaagaagatacgtcttttgggggcaacctcgggcgagcagtcttccaggccaagaagagggtactcgaaccactgggcctggttgaagaaggtgctaagacggctcctggaaagaagagaccgttagagtcaccacaagagcccgactcctcctcaggaatcggcaaaaaaggcaaacaaccagccaaaaagagactcaactttgaagaggacactggagccggagacggaccccctgaaggatcagataccagcgccatgtcttcagacattgaaatgcgtgcagcaccgggcggaaatgctgtcgatgcgggacaaggttccgatggagtgggtaatgcctcgggtgattggcattgcgattccacctggtctgagggcaaggtcacaacaacctcgaccagaacctgggtcttgcccacctacaacaaccacttgtacctgcggctcggaacaacatcaaacagcaacacctacaacggattctccaccccctggggatactttgactttaacagattccactgtcacttctcaccacgtgactggcaaagactcatcaacaacaactggggactacgaccaaaagccatgcgcgttaaaatcttcaatatccaagttaaggaggtcacaacgtcgaacggcgagactacggtcgctaataaccttaccagcacggttcagatatttgcggactcgtcgtatgagctcccgtacgtgatggacgctggacaagagggaagtctgcctcctttccccaatgacgtcttcatggtgcctcaatatggctactgtggcattgtgactggcgaaaatcagaaccagacggacagaaatgctttctactgcctggagtattttccttcacaaatgctgagaactggcaataactttgaaatggcttacaactttgagaaggtgccgttccactcaatgtatgctcacagccagagcctggacagactgatgaatcccctcctggaccagtacctgtggcacttacagtcgaccacctctggagagactctgaatcaaggcaatgcagcaaccacatttggaaaaatcaggagtggagactttgccttttacagaaagaactggctgcctgggccttgtgttaaacagcagagattctcaaaaactgccagtcaaaattacaagattcctgccagcgggggcaacgctctgttaaagtatgacacccactataccttaaacaaccgctggagcaacatagcgcctggacctccaatggcaacagctggaccttcagatggggacttcagcaacgcccagctcatcttccctggaccatcagtcaccggaaacacaacaacctcagcaaacaatctgttgtttacatcagaaggagaaattgctgccaccaacccaagagacacggacatgtttggtcagattgctgacaataatcagaatgctacaactgctcccataaccggcaacgtgactgctatgggagtgcttcctggcatggtgtggcaaaacagagacatttactaccaagggccaatttgggccaagatcccacacgcggacggacattttcatccttcaccgctaattggcggttttggactgaaacatccgcctccccagatatttatcaaaaacacccccgtacctgccaatcctgcgacaaccttcactgcagccagagtggactctttcatcacacaatacagcaccggccaggtcgctgttcagattgaatgggaaatcgaaaaggaacgctccaaacgccggaatcctgaagtgcagtttacttcaaactatgggaaccagtcttctatgttgtgggctcccgatacaactgggaagtatacagagccgcgggttattggctctcgttatttgactaatcatttgtaactgcctagttaatcaataaaccgtgtgattcgtttcagttgaactttggtctctgcgaagggcgaattc

SEQ ID NO: 425 - protein, 733 aa, Artificial Sequence
  Description of Artificial Sequence: Synthetic polypeptide
MAADGYLPDWLEDNLSEGIREWWDLKPGAPKPKANQQKQDDGRGLVLPGYEYLGPFNGLDKGEPVNAADAAALEHDKAYDQQLKAGDNPYLRYNHADAEFQERLQEDTSFGGNLGRAVFQAKKRVLEPLGLVEEGAKTAPGKKRPLESPQEPDSSSGIGKKGKQPAKKRLNFEEDTGAGDGPPEGSDTSAMSSDIEMRAAPGGNAVDAGQGSDGVGNASGDWHCDSTWSEGKVTTTSTRTWVLPTYNNHLYLRLGTTSNSNTYNGFSTPWGYFDFNRFHCHFSPRDWQRLINNNWGLRPKAMRVKIFNIQVKEVTTSNGETTVANNLTSTVQIFADSSYELPYVMDAGQEGSLPPFPNDVFMVPQYGYCGIVTGENQNQTDRNAFYCLEYFPSQMLRTGNNFETAYNFEKVPFHSMYAHSQSLDGLMNPLLDQYLWHLQSTTSGETLNQGNAATTFGKIRSGDFAFYRKNWLPGPCVKQQRFSKTASQNYKIPASGGNALLKYDTHYTLNNRWSNIAPGPPMATAGPSDGDFSNAQLIFPGPSVTGNTTTSANNLLFTSEEEIAATNPRDTDMFGQIADNNQNATTAPITGNVTAMGVLPGMVWQNRDIYYQGPIWAKIPHADGHFHPSPLIGGFGLKHPPPQIFIKNTPVPAYPATTFTAARVDSFITQYSTGQVAVQIEWEIEKERSKRWNPEVQFTSNCGNQSSMLWAPDTTGKYTEPRVIGSRYLTNHL

SEQ ID NO: 426 - DNA, 3105 bp, Adeno-associated virus
gaattcgcccttcgcagagaccaaagttcaactgaaacgaatcacacggtttattgattaactaggcagttacaaatgattagtcaaataacgagagccaataacccgcggctctgtatacttcccagttgtatcgggagcccacaacatagaagactggttcccacagtttgaagtaaactgcacttcaggattccagcgtttggagcgttccttttcgatttcccattcaatctgaacagcgacctggccggtgctgtattgtgtgatgaaagagtccactctggctgcagtgaaggttgtcgcaggataggcaggtacgggggtgtttttgataaatatctggggaggcggatgtttcagtccaaaaccgccaattagcggtgaaggatgaaaatgtccgtccgcgtgtgggatcttggcccaaattggcccttggtagtaaatgtctctgttttgccacaccatgccaggaagcactcccatagcagtcacgttgccggttatgggagcagttgtagcattctgattattgtcagcaatctgaccaaacatgtccgtgtctcttgggttggtggcagcaatttcttcttctgatgtaaacaacagattgtttgctgaggttgttgtgtttccggtgactgatggtccagggaagatgagctgggcgttgctgaagtccccatctgaaggtccagctgttgccattggaggtccaggcgctatgttgctccagcggttgtttaaggtatagtgggtgtcatactttaacagagcgttgcccccgctggcaggaatcttgtaattttgactggcagtttttgagaatctctgctgtttaacacaaggcccaggcagccagttctttctgtaaaaggcaaagtctccactcctgatttttccaaatgtggttgctgcattgccttgattcagagtctctccagaggtggtcgactgtaagtgccacaggtactggtccaggaggggattcatcagtccgtccaggctctggctgtgagcatacattgagtggaacggcaccttctcaaagttgtaagccgtttcaaagttattgccagttctcagcatttgtgaaggaaaatactccaggcagtagaaagcatttctgtccgtctggttctgattttcgccagtcacaatgccacagtagccatattgaggcaccatgaagacgtcattggggaaaggaggcagacttccctcttgtccagcgtccatcacgtacgggagctcatacgacgagtccgcaaatatctgaaccgtgctggtaaggttattagcgaccgtagtctcgccgttcgacgttgtgacctccttaacttggatattgaagattttaacgcgcatggcttttggtcgtagtccccagttgttgttgatgagtctttgccagtcacgtggtgagaagtgacagtggaatctgttaaagtcaaagtatccccagggggtggagaatccgttgtaggtgttgctgtttgatgttgttccgagccgcaggtacaagtggttgttgtaggtgggcaagacccaggttctggtcgaggttgttgtgaccttgccctcagaccaggtggaatcgcaatgccaatcacccgaggcattacccactccatcggaaccttgtcccgcatcgacagcatttccgcccggtgctgcacgcatttcaatgtctgaagacatggcgctggtatctgatccttcagggggtccgtctccggctccagtgtcctcttcaaagttgagtctctttttggctggttgtttgccttttttgccgattcctgaggaggagtcgggctcttgtggtgactctaacggtctcttctttccaggagccgtcttagcaccttcttcaaccaggcccagaggttcgagtaccctcttcttggcctggaagactgctcgcccgaggttgcccccaaaagacgtatcttcttgcagacgctcctgaaactcggcgtcggcgtggttataccgcaggtacggattgtcacccgctttgagctgctggtcgtaggccttgtcgtgctcgagggccgctgcgtccgccgcgttgacgggctcccccttgtcgagtccgttgaagggtccgaggtactcgtagccaggaagcaccagaccccggccgtcgtcctgcttctgctggttggccttgggcttgggggctccaggtttcaggtcccaccactcgcgaatgccctcagagaggttgtcctcgagccaatctggaagataaccgtcagcagccatacctggtttaagtcatttattgctcagaaacacagtcatccaagtccacgttgacgagatcgcaggccgaacacgcaatctcgggtgcccgccccagcagatgatgaatcgcgcacagtttctgatacgtcttttttctgacgacgggttgagattctgacgcgccggggaagcactctgagcagtctctgaccccgtgcgtgaagcagacgttgaaattctgattcattctctcgcatgtcttgcagggaaacagcatctgaagcatgcccgcgtgacgagaacatttgttttggtacctgtccgcaaggtccaccggtgcttccgcgtctgacgtcgatggctccgcaactgaggggcaggcccgcttgggctcgcttatatccgcgtcactgggggcgggtcttttggtggctccgccctttctgacgtagaactcatgcgccacctcagtcacgtgatcctgagcccagcggaagaactctttgacttcctgcttggtcaccttgccaaagtcgtgctccagacggcgggtgagctcgaacttgaacatgcggtcctgcagcggctgctggtgctcgaaggtggtgctgttcccgtcgatcacggcgcacatgttggtgttggaggtgacgatcacgggcgtggggtcgatctgggccgatgacttgcacttttggtccacgcgcaccttgcttccgcccagaatggccttggcggactccacgaccttggcggtcatcttgccctcctcccaccagatcaccatcttgtcgacgcaatcgttgaagggaaagttctcattggtccagttgacgcagcaagggcgaattc

SEQ ID NO: 427 - protein, 729 aa, Artificial Sequence
  Description of Artificial Sequence: Synthetic polypeptide
MAADGYLPDWLEDNLSEGIREWWDLKPGAPKPKANQQKQDDGRGLVLPGYKYLGPFNGLDKGEPVNAADAAALEHDKAYDQQLKAGDNPYLRYNHADAEFQERLQEDTSFGGNLGRAVFQAKKRVLEPLGLVEEGAKTAPGKKRPIDSPDSSTGIGKKGQQPAKKKLNFGQTGDSESVPDPQPLGEPPAAPSSVGSGTMAAGGGAPMADNNEGADGVGNASGNWHCDSTWLGDRVITTSTRTWALPTYNNHLYKQISSSSSGATNDNHYFGYSTPWGYFDFNRFHCHFSPRDWQRLINNNWGFRPKKLRFKLFNIQVKEVTTNDGVTTIANNLTSTVQVFSDSEYQLPYVLGSAHQGCLPPFPADVFMIPQYGYLTLNNGSQSVGRSSFYCLEYFPSQMLRTGNNFEFSYSFEDVPFHSSYAHSQSLDRLMNPLIDQYLYYLARTQSTTGSTRELQFHQAGPNTMAEQSKNWLPGPCYRQQGLSKNLDFNNNSNFAWTAATKYHLNGRNSLTNPGIPMATNKDDEDQFFPINGVLVFGKTGAANKTTLENVLMTSEEEIKTTNPVATEEYGVVSSNLQPSTAGPQSQTINSQGALPGMVWQNRDVYLQGPIWAKIPHTDGNFHPSPLMGGFGLKHPPPQILIKNTPVPANPPEVFTPAKFASFITQYSTGQVSVEIEWELQKENSKRWNPEIQYTSNYAKSNNVEFAVNPDGVYTEPRPIGTRYLPRNL

SEQ ID NO: 428 - DNA, 3094 bp, Adeno-associated virus
gaattcgcccttgctgcgtcaactggaccaagagaactttcccttcaacgattgcgtcgacaagatggtgatctggtgggaggagggcaagatgacggccaaggtcgtggagtccgccaaagccattctgggcggaagcaaggtgcgcgtcgaccaaaagtgcaagtcctcggcccagatcgatcccacccccgtgatcgtcacctccaacaccaacatgtgcgccgtgatcgacgggaacagcaccaccttcgagcaccagcagccgttgcaggaccggatgttcaaatttgaactcacccgccgtctggaacacgactttggcaaggtgaccaagcaggaagtcaaagagttcttccgctgggctagtgatcacgtgactgaggtgacgcatgagttctacgtcagaaagggcggagccagcaaaagacccgcccccgatgacgcggatataagcgagcccaagcgggcctgtccctcagtcacggacccatcgacgtcagacgcggaaggagctccggtggactttgccgacaggtaccaaaacaaatgttctcgtcacgcgggcatgcttcagatgctgtttccctgcaaaacgtgcgagagaatgaatcagaatttcaacatttgcttcacgcacggggtcagagactgtttagaatgtttccccggcgtgtcagaatctcaaccggtcgtcagaaaaaagacgtatcggaagctgtgtgcgattcatcatctgctggggcgggcacccgagattgcttgctcggcctgcgacctggtcaacgtggacctggacgactgtgtttctgagcaataaatgacttaaaccgggtatggctgccgatggttatcttccagattggctcgaggacaacctctctgagggcattcgcgagtggtgggacctgaaacctggagccccgaaacccaaagccaaccagcaaaagcaggacgacggccggggtctggtgcttcctggctacaagtacctcggacccttcaacggactcgacaagggggagcccgtcaacgcggcggacgcagcggccctcgagcacgacaaggcctacgaccagcagctcaaagcgggtgacaatccgtacctgcggtataaccacgccgacgccgagtttcaggagcgtctgcaagaagatacgtcatttgggggcaacctcgggcgagcagtcttccaggccaagaagcgggttctcgaacctctcggtctggttgaggaaggcgctaagacggctcctggaaagaagagacccatagactctccagactcctccacgggcatcggcaaaaaaggccagcagcccgctaaaaagaagctcaattttggtcagactggcgactcagagtcagtccccgaccctcaacctcttggagaacctccagcagcgccctctagtgtgggatctggtacaatggctgcaggcggtggcgcaccaatggcagacaataacgaaggtgccgacggagtgggtaatgcctcaggaaattggcattgcgattccacatggctgggcgacagagtcatcaccaccagcaccagaacctgggccctccccacctacaacaaccacctctacaagcaaatctccagcagcagctcaggagccaccaatgacaaccactacttcggctacagcaccccctgggggtattttgactttaacagattccactgccacttctcaccacgtgactggcagcgactcatcaacaacaactggggattccggcccaagaagctgcggttcaagctcttcaacatccaggtcaaggaggtcacaacgaatgacggcgtcacgaccatcgctaataaccttaccagcacggttcaggtcttctcggactcggaataccagctgccgtacgtcctcggctctgcgcaccagggctgcctgcctccgttcccggcggacgtcttcatgattcctcagtacggctacctgactctgaacaacggcagccaatcggtgggccgttcctccttctactgcctggaatatttcccctctcaaatgctgagaacgggcaacaactttgagttcagttacagcttcgaggacgtgcctttccacagcagctacgcgcacagccagagcctagaccggctgatgaaccctctcatcgaccagtacctgtactacctggcccggacccagagcaccacgggttccaccagggaactgcaatttcatcaagctgggcccaatactatggccgagcagtcaaagaactggctgcctggaccctgctataggcaacagggactgtcaaagaacttggactttaacaacaacagcaattttgcctggactgctgccactaaatatcatctgaatggcagaaactctttgaccaatcctggcattcccatggcaaccaacaaggatgatgaggaccagttctttcccatcaacggggtactggtttttggcaagacgggagctgccaacaaaactacgctggaaaacgttctgatgaccagcgaggaggagatcaagaccactaaccctgtggctacagaagaatacggtgtggtctccagcaacctgcagccgtctacagccgggcctcaatcacagactatcaacagccagggagcactgcctggcatggtctggcagaaccgggacgtgtatctgcagggtcccatctgggccaaaattcctcacacggatggcaactttcacccgtctcctctgatgggcggttttggactcaaacacccgcctccacagatcctgatcaaaaacacacctgtacctgctaatcctccggaggtgtttactcctgccaagtttgcctccttcatcacgcagtacagcaccggacaagtcagcgtggaaatcgagtgggagctgcagaaagaaaacagcaagcgctggaacccagaaattcagtatacttccaattatgccaagtctaataatgttgaatttgctgtgaaccctgatggtgtttatactgagcctcgccccattggcactcgttacctcccccgtaatctgtaattgcttgttaatcaataaaccggttgattcgtttcagttgaactttggtctctgcgaagggcgaattc

SEQ ID NO: 429 - protein, 1458 aa, Artificial Sequence
  Description of Artificial Sequence: Synthetic polypeptide
MAADGYLPDWLEDNLSEGIREWWDLKPGAPKPKANQQKQDDGRGLVLPGYKYLGPFNGLDKGEPVNAADAAALEHDKAYDQQLKAGDNPYLRYNHADAEFQERLQEDTSFGGNLGRAVFQAKKRVLEPLGLVEEGAKTAPGKKRPIDSPDSSTGIGKKGQQPAKKKLNFGQTGDSESVPDPQPLGEPPAAPSSVGSGTMAAGGGAPTADNNEGADGVGNASGNWHCDSTWLGDRVITTSTRTWALPTYNNHLYKQISSSSSGATNDNHYFGYSTPWGYFDFNRFHCHFSPRDWQRLINNNWGFRPKKLRFKLFNIQVKEVTTNDGVTTIANNLTSTVQVFSDSEYQLPYVLGSAHQGCLPPFPADVFMIPQYGYLTLNNGSQSVGRSSFYCLEYFPSQMLRTGNNFEFSYSFEDVPFHSSYAHSQSLDRLMNPLIDQYLYYLARTQSTTGSTRELQFHQAGPNTMAEQSKNWLPGPCYRQQRLSKNLDFNNNSNFAWTAATKYHLNGRNSLTNPGIPMATNKDDEDQFFPINGVLVFGKTGAANKTTLENVLMTSEEEIKTTNPVATEEYGVVSSNLQSSTAGPQSQTINSQGALPGMVWQNRDVYLQGPIWAKIPHTDGNFHPSPLMGGFGLEHPPPQILIKNTPVPANPPEVFTPAKFASFITQYSTGQVSVEIEWELQKENSKRWNPEIQYTSNYAKSNNVEFAVNPDGVYTEPRPIGTRYLTRNLMAADGYLPDWLEDNLSEGIREWWDLKPGAPKPKANQQKQDDGRGLVLPGYKYLGPFNGLDKGEPVNAADAAALEHDKAYDQQLKAGDNPYLRYNHADAEFQERLQEDTSFGGNLGRAVFQAKKRVLEPLGLVEEGAKTAPGKKRPIGSPDSSTGIGKKGQQPAKKKLNFGQTGDSESVPDPQPLGEPPAAPSSVGSGTMAAGGGAPMADNNEGADGVGNASGNWHCDSTWLGDRVITTSTRTWALPTYNNHLYKQISSSSSGATNDNHYFGYSTPWGYFDFNRFHCHFSPRDWQRLINNNWGFRPKKLRFKLLNIQVKEVTTNDGVTTIANNLTSTVQVFSDSEYQLPYVLGSAHQGCLPPFPADVFMIPQYGYLTLDNGSQSVGRSSFYCLEYFPSQMLRTGNNFEFSYSFEDVPFHSSYAHSQSLDRLMNPLIDQYLYYLARTQSTTGSTRELQFHQAGPNTMAEQSKNWLPGPCYRQQRLSKNLDFNNNSNFAWTAATKYHLNGRNSLTNPGIPMATNKDDEDQFFPINGVLVFGKTGAANKTTLENVLMTSEEEIKTTNPVATEEYGVVSSNLQSSTAGPQSQTINSQGALPGMVWQNRDVYLQGPIWAKIPHTDGNFHPSPLMGGFGLKHPPPQILIKNTPVPANPPEVFTPAKFASFITQYSTGQVSVEIEWELQKENSKRWNPEIQYTSNYAKSNNVEFAVNPDGVYTEPRPIGTRYLTRNL

SEQ ID NO: 430 - DNA, 3095 bp, Adeno-associated virus
gaattcgcccttcgcagagaccaaagttcaactgaaacgaatcaaccggtttattgattaacaagcaattacagattacgggtgaggtaacgagtgccaatggggcgaggctcagtataaacaccatcagggttcacagcaaattcaacattattagacttggcataattggaagtatactgaatttctgggttccagcgcttgctgttttctttctgcagctcccactcgatttccacgctgacttgtccggtgctgtactgcgtgatgaaggaggcaaacttggcaggagtaaacacctccggaggattagcaggtacaggtgtgtttttgatcaggatctgtggaggcgggtgtttgagtccaaaaccgcccatcagaggagacgggtgaaagttgccatccgtgtgaggaattttggcccagatgggaccctgcagatacacgtcccggttctgccagaccatgccaggcagtgctccctggctgttgatagtctgtgattgaggcccggctgtagacgactgcaggttgctggagaccacaccgtattcttctgtagccacagggttagtggtcttgatctcctcctcgctggtcatcagaacgttttccagcgtagttttgttggcagctcccgtcttgccaaaaaccagtaccccgttgatgggaaagaactggtcctcatcatccttgttggttgccatgggaatgccaggattggtcaaagagtttctgccattcagatgatatttagtggcagcagtccaggcaaaattgctgttgttgttaaagtccaagttctttgacagtctctgttgcctatagcagggtccaggcagccagttctttgactgctcggccatagtattgggcccagcttgatgaaattgcagttccctggtggaacccgtggtgctctgggtccgggccaggtagtacaggtactggtcgatgagagggttcatcagccggtctaggctctggctgtgcgcgtagctgctgtggaaaggcacgtcctcgaagctgtaactgaactcaaagttgttgcccgttctcagcatttgagaggggaaatattccaggcagtagaaggaggaacggcccaccgattggctgccgttgtccagagtcaggtagccgtactgaggaatcatgaagacgtccgccgggaacggaggcaggcagccctggtgcgcagagccgaggacgtacggcagctggtattccgagtccgagaagacctgaaccgtgctggtaaggttattagcgatggtcgtgacgccgtcattcgttgtgacctccttgacctggatgttgaggagcttgaaccgcagcttcttgggccggaatccccagttgttgttgatgagtcgctgccagtcacgtggtgagaagtggcagtggaatctgttaaagtcaaaatacccccagggggtgctgtagccgaagtagtggttgtcattggtggctcctgagctgctgctggagatttgcttgtagaggtggttgttgtaggtggggagggcccaggttctggtgctggtggtgatgactctgtcgcccagccatgtggaatcgcaatgccaatttcctgaggcattacccactccgtcggcaccttcgttattgtctgccattggtgcgccaccgcctgcagccattgtaccagatcccacactagagggcgctgctggaggttctccaagaggttgagggtcggggactgactctgagtcgccagtctgaccaaaattgagcttctttttagcgggctgctggccttttttgccgatgcccgtggaggagtctggagagcctatgggtctcttctttccaggagccgtcttagcgccttcctcaaccagaccgagaggttcgagaacccgcttcttggcctggaagactgctcgcccgaggttgcccccaaatgacgtatcttcttgcagacgctcctgaaactcggcgtcggcgtggttataccgcaggtacggattgtcacccgctttgagctgctggtcgtaggccttgtcgtgctcgagggccgctgcgtccgccgcgttgacgggctcccccttgtcgagtccgttgaagggtccgaggtacttgtagccaggaagcaccagaccccggccgtcgtcctgcttttgctggttggctttgggtttcggggctccaggtttcaggtcccaccactcgcgaatgccctcagagaggttgtcctcgagccaatctggaagataaccatcggcagccatacctggtttaagtcatttattgctcagaaacacagtcgtccaggtccacgttgaccaggtcgcaggccgagcaagcaatctcgggtgcccgccccagcagatgatgaatcgcacacagcttccgatacgtcttttttctgacgaccggttgagattctgacacgccggggaaacattctaaacagtctctgaccccgtgcgtgaagcaaatgttgaaattctgattcattctctcgcacgttttgcagggaaacagcacctgaagcatgcccgcgtgacgagaacatttgttttggtacctgtcggcaaagtccaccggagctccttccgcgtctgacgtcgatgggtccgtgactgagggacgggcccgcttgggctcgcttatatccgcgtcatcgggggcgggtcttttgctggctccgccctttctgacgtagaactcatgcgtcacctcagtcacgtgatcactagcccagcggaagaactctttgacttcctgctttgtcaccttgccaaagtcgtgttccagacggcgggtgagttcaaatttgaacatccggtcctgcaacggttgctggtgctcgaaggtggtgctgttcccgtcgatcacggcgcacatgttggtgttggaggtgacgatcacgggggtgggatcgatctgggcggacgacttgcacttttggtccacgcgcaccttgctgccgccgagaatggccttggcggactccacgaccttggccgtcatcttgccctcctcccaccagatcaccatcttgtcgacgcaatcgttgaagggaaagttctcattggtccagttgacgcagcaagggcgaattc

SEQ ID NO: 431 - DNA, 3095 bp, Adeno-associated virus
gaattcgcccttcgcagagaccaaagttcaactgaaacgaatcaaccggtttattgattaacaagcaattacagattacgggtgaggtaacgagtgccaatggggcgaggctcagtataaacaccatcagggttcacagcaaattcaacattattagacttggcataattggaagtatactgaatttctgggttccagcgcttgctgttttctttctgcagctcccactcgatttccacgctgacttgtccggtgctgtactgcgtgatgaaggaggcaaacttggcaggagtaaacacctccggaggattagcaggtacaggtgtgtttttgatcaggatctgtggaggcgggtgttcgagtccaaaaccgcccatcagaggagacgggtgaaagttgccatccgtgtgaggaattttggcccagatgggaccctgcagatacacgtcccggttctgccagaccatgccaggcagtgctccctggctgttgatagtctgtgattgaggcccggctgtagacgactgcaggttgctggagaccacaccgtattcttctgtagccacagggttagtggtcttgatctcctcctcgctggtcatcagaacgttttccagcgtagttttgttggcagctcccgtcttgccaaaaaccagtaccccgttgatgggaaagaactggtcctcatcatccttgttggttgccatgggaatgccaggattggtcaaagagtttctgccattcagatgatatttagtggcagcagtccaggcaaaattgctgttgttgttaaagtccaagttctttgacagtctctgttgcctatagcagggtccaggcagccagttctttgactgctcggccatagtattgggcccagcttgatgaaattgcagttccctggtggaacccgtggtgctctgggtccgggccaggtagtacaggtactggtcgatgagagggttcatcagccggtctaggctctggctgtgcgcgtagctgctgtggaaaggcacgtcctcgaagctgtaactgaactcaaagttgttgcccgttctcagcatttgagaggggaaatattccaggcagtagaaggaggaacggcccaccgattggctgccgttgttcagagtcaggtagccgtactgaggaatcatgaagacgtccgccgggaacggaggcaggcagccctggtgcgcagagccgaggacgtacggcagctggtattccgagtccgagaagacctgaaccgtgctggtaaggttattagcgatggtcgtgacgccgtcattcgttgtgacctccttgacctggatgttgaagagcttgaaccgcagcttcttgggccggaatccccagttgttgttgatgagtcgctgccagtcacgtggtgagaagtggcagtggaatctgttaaagtcaaaatacccccagggggtgctgtagccgaagtagtggttgtcattggtggctcctgagctgctgctggagatttgcttgtagaggtggttgttgtaggtggggagggcccaggttctggtgctggtggtgatgactctgtcgcccagccatgtggaatcgcaatgccaatttcctgaggcattacccactccgtcggcaccttcgttattgtctgccgttggtgcgccaccgcctgcagccattgtaccagatcccacactagagggcgctgctggaggttctccaagaggttgagggtcggggactgactctgagtcgccagtctgaccaaaattgagcttctttttagcgggctgctggccttttttgccgatgcccgtggaggagtctggagagtctatgggtctcttctttccaggagccgtcttagcgccttcctcaaccagaccgagaggttcgagaacccgcttcttggcctggaagactgctcgcccgaggttgcccccaaatgacgtatcttcttgcaggcgctcctgaaactcggcgtcggcgtggttataccgcaggtacggattgtcacccgctttgagctgctggtcgtaggccttgtcgtgctcgagggccgctgcgtccgccgcgttgacgggctcccccttgtcgagtccgttgaagggtccgaggtacttgtagccaggaagcaccagaccccggccgtcgtcctgcttttgctggttggctttgggtttcggggctccaggtttcaggtcccaccactcgcgaatgccctcagagaggttgtcctcgagccaatctggaagataaccatcggcagccatacctggtttaagccatttattgctcagaaacacagtcgtccaggtccacgttgaccaggtcgcaggccgagcaggcaatctcgggtgcccgccccagcagatgatgaatcgcacacagcttccgatacgtcttttttctgacgaccggttgagattctgacacgccggggaaacattctaaacagtctctgaccccgtgcgtgaagcaaatgttgaaattctgattcattctctcgcacgttttgcagggaaacagcatctgaagcatgcccgcgtggcgagaacatttgttttggtacctgtcggcaaagtccaccggagctccttccgcgtctgacgtcgatgggtccgtgactgagggacaggcccgcttgggctcgcttatatccgcgtcatcgggggcgggtcttttgctggctccgccctttctgacgtagaactcatgcgtcacctcagtcacgtgatcactagcccagcggaagaactctttgacttcctgctttgtcaccttgccaaagtcgtgttccagacggcgggtgagttcaaatttgaacatccggtcctgcaacggctgctggtgctcgaaggtggtgctgttcccgtcgatcacggcgcgcatgttggtgttggaggtgacgatcacgggggtgggatcgatctgggcggacgacttgcacttttggtccacgcgcaccttgctgccgccgagaatggccttggcggactccacgaccttggccgtcatcttgccctcctcccaccagatcaccatcttgtcgacgcaatcgttgaagggaaagttctcattggtccagttgacgcagcaagggcgaattc

SEQ ID NO: 432 - protein, 729 aa, Adeno-associated virus; identical to SEQ ID NO: 160

SEQ ID NO: 433 - protein, 729 aa, Adeno-associated virus
MAADGYLPDWLEDNLSEGIREWWDLKPGAPKPKANQQKQDDGRGLVLPGYKYLGPFNGLDKGEPVNAADAAALEHDKAYDQQLKAGDNPYLRYNHADAEFQERLQEDTSFGGNLGRAVFQAKKRVLEPLGLVEEGAKTAPGKKRPIDSPDSSTGIGKKGQQPAKKKLNFGQTGDSESVPDPQPLGEPPAAPSSVGSGTMAAGGGAPTADNNEGADGVGNASGNWHCDSTWLGDRVITTSTRTWALPTYNNHLYKQISSSSSGATNDNHYFGYSTPWGYFDFNRFHCHFSPRDWQRLINNNWGFRPKKLRFKLFNIQVKEVTTNDGVTTIANNLTSTVQVFSDSEYQLPYVLGSAHQGCLPPFPADVFMIPQYGYLTLNNGSQSVGRSSFYCLEYFPSQMLRTGNNFEFSYSFEDVPFHSSYAHSQSLDRLMNPLIDQYLYYLARTQSTTGSTRELQFHQAGPNTMAEQSKNWLPGPCYRQQRLSKNLDFNNNSNFAWTAATKYHLNGRNSLTNPGIPMATNKDDEDQFFPINGVLVFGKTGAANKTTLENVLMTSEEEIKTTNPVATEEYGVVSSNLQSSTAGPQSQTINSQGALPGMVWQNRDVYLQGPIWAKIPHTDGNFHPSPLMGGFGLKHPPPQILIKNTPVPANPPEVFTPAKFASFITQYSTGQVSVEIEWELQKENSKRWNPEIQYTSNYAKSNNVEFAVNPDGVYTEPRPIGTRYLTRNL

SEQ ID NO: 434 - protein, 729 aa, Adeno-associated virus
MAADGYLPDWLEDNLSEGIREWWDLKPGAPKPKANQQKQDDGRGLVLPGYKYLGPFNGLDKGEPVNAADAAALEHDKAYDQQLKAGDNPYLRYNHADAEFQERLQEDTSFGGNLGRAVFQAKKRVLEPLGLVEEGAKTAPGKKRPIDSPDSSTGIGKKGQQPAKKKLNFGQTGDSESVPDPQPLGEPPAAPSSVGSGTMAAGGGAPMADNNEGADGVGNASGNWHCDSTWLGDRVITTSTRTWALPTYNNHLYKQISSSSSGATNDNHYFGYSTPWGYFDFNRFHCHFSPRDWQRLINNNWGFRPKKLRFKLFNIQVKEVTTNDGVTTIANNLTSTVQVFSDSEYQLPYVLGSAHQGCLPPFPADVFMIPQYGYLTLNNGSQSVGRSSFYCLEYFPSQMLRTGNNFEFSYSFEDVPFHSSYAHSQSLDRLMNPLIDQYLYYLARTQSTTGSTRELQFHQAGPNTMAEQSKNWLPGPCYRQQRLSKNLDFNNNSNFAWTAATKYHLNGRNSLTNPGIPMATNKDDEDQFFPINGVLVFGKTGAANKTTLENVLMTSEEEIKTTNPVATEEYGVVSSNLQSSTAGPQSQTINSQGALPGMVWQNRDVYLQGPIWAKIPHTDGNFHPSPLMGGFGLKHPPPQILIKNTPVPANPPEVFTPAKFASFITQYSTGQVSVEIEWELQKENSKRWNPEIQYTSNYAKSNNVEFAVNPDGVYTEPRPIGTRYLTRNL

SEQ ID NO: 435 - DNA, 2217 bp, Adeno-associated virus
atggctgctgacggttatcttccagattggctcgaggacaacctctctgagggcattcgcgagtggtgggacctgaaacctggagcccccaagcccaaggccaaccagcagaagcaggacgacggccggggtctggtgcttcctggctacaagtacctcggacccttcaacggactcgacaagggggagcccgtcaacgcggcggacgcagcggccctcgagcacgacaaggcctacgaccagcagctcaaagcgggtgacaatccgtacctgcggtataaccacgccgacgccgagtttcaggagcgtctacaagaagatacgtcttttgggggcaacctcgggcgagcagtcttccaggccaagaagcgggttctcgaacctctcggtctggttgaggaagctgctaagacggctcctggaaagaagagaccggtagaaccgtcacctcagcgttcccccgactcctccacgggcatcggcaagaaaggccagcggcccgctaaaaagagactgaactttggtcagactggcgactcagagtcagtccccgaccctcaaccaatcggagaaccaccagcaggcccctctggtctgggatctggtacaatggctgcaggcggtggcgctccaatggcagacaataacgaaggcgccgacggagtgggtagttcctcaggaaattggcattgcgattccacatggctgggcgacagagtcatcaccaccagcacccgaacctgggccctgcccacctacaacaaccacctctacaagcaaatatccaatgggacatcgggaggaagcaccaacgacaacacctacttcggctacagcaccccctgggggtattttgacttcaacagattccactgccacttctcaccacgtgactggcagcgactcatcaacaacaactggggattccggccaaaaagactcagcttcaagcccttcaacatccaggtcaaggaggtcacgcagaatgaaggcaccaagaccatcgccaataaccttaccagcacgattcaggtatttacggactcggaataccagctgccgtacgtcctcggctccgcgcaccagggctgcctgcctccgttcccggcggacgtcttcatgattccccagtacggctaccttacactgaacaatggaagtcaagccgtaggccgttcctccttctactgcctggaatattttccatctcaaatgctgcgaactggaaacaattttgaattcagctacaccttcgaggacgtgcctttccacagcagctacgcacacagccagagcttggaccgactgatgaatcctctcatcgaccagtacctgcactacttatccagaactcagtccacaggaggaactcaaggtacccagcaattgttattttctcaagctgggcctgcaaacatgtcggctcaggctaagaactggctacctggaccttgctaccggcagcagcgagtctctacgacactgtcgcaaaacaacaacagcaactttgcttggactggtgccaccaaatatcacctgaacggaagagactctttggtaaatcccggtgtcgccatggcaacccacaaggacgacgaggaacgcttcttcccgtcgagtggagtcctgatgtttggaaaacagggtgctggaagagacaatgtggactacagcagcgttatgctaaccagcgaagaagaaattaaaaccactaaccctgtagccacagaacaatacggtgtggtggctgacaacttgcagcaaaccaatacagggcctattgtgggaaatgtcaacagccaaggagccttacctggcatggtctggcagaaccgagacgtgtacctgcagggtcccatctgggccaagattcctcacacggacggcaacttccacccttcaccgctaatgggaggatttggactgaagcacccacctcctcagatcctgatcaagaacacgccggtacctgcggatcctccaacaacgttcagccaggcgaaattggcttccttcattacgcagtacagcaccggacaggtcagcgtggaaatcgagtgggagctgcagaaggagaacagcaaacgctggaacccagagattcagtacacttcaaactactacaaatctacaaatgtggactttgctgtcaatacagagggaacttattctgagcctcgccccattggtactcgctacctcacccgtaatctgtaa

SEQ ID NO: 436 - protein, 738 aa, Adeno-associated virus
MAADGYLPDWLEDNLSEGIREWWDLKPGAPKPKANQQKQDDGRGLVLPGYKYLGPFNGLDKGEPVNAADAAALEHDKAYDQQLKAGDNPYLRYNHADAEFQERLQEDTSFGGNLGRAVFQAKKRVLEPLGLVEEAAKTAPGKKRPVEPSPQRSPDSSTGIGKKGQRPAKKRLNFGQTGDSESVPDPQPIGEPPAGPSGLGSGTMAAGGGAPMADNNEGADGVGSSSGNWHCDSTWLGDRVITTSTRTWALPTYNNHLYKQISNGTSGGSTNDNTYFGYSTPWGYFDFNRFHCHFSPRDWQRLINNNWGFRPKRLSFKPFNIQVKEVTQNEGTKTIANNLTSTIQVFTDSEYQLPYVLGSAHQGCLPPFPADVFMIPQYGYLTLNNGSQAVGRSSFYCLEYFPSQMLRTGNNFEFSYTFEDVPFHSSYAHSQSLDRLMNPLIDQYLHYLSRTQSTGGTQGTQQLLFSQAGPANMSAQAKNWLPGPCYRQQRVSTTLSQNNNSNFAWTGATKYHLNGRDSLVNPGVAMATHKDDEERFFPSSGVLMFGKQGAGRDNVDYSSVMLTSEEEIKTTNPVATEQYGVVADNLQQTNTGPIVGNVNSQGALPGMVWQNRDVYLQGPIWAKIPHTDGNFHPSPLMGGFGLKHPPPQILIKNTPVPADPPTTFSQAKLASFITQYSTGQVSVEIEWELQKENSKRWNPEIQYTSNYYKSTNVDFAVNTEGTYSEPRPIGTRYLTRNL

SEQ ID NO: 437 - DNA, 2217 bp, Adeno-associated virus
atggctgctgacggttatcttccagattggctcgaggacaacctctctgagggcattcgcgagtggtgggacctgaaacctggagcccccaagcccaaggccaaccagcagaagcaggacgacggccggggtctggtgcttcctggctacaagtacctcggacccttcaacggactcgacaagggggagcccgtcaacgcggcggacgcagcggccctcgagcacgacaaggcctacgaccagcagctcaaagcgggtgacaatccgtacctgcggtataaccacgccgacgccgagtttcaggagcgtctgcaagaagatacgtcttttgggggcaacctcgggcgagcagtcttccaggccaagaagcgggttctcgaacctctcggtctggttgaggaagctgctaagacggctcctggaaagaagagaccggtagaaccgtcacctcagcgttcccccgactcctccacgggcatcggcaagaaaggccagcagcccgctaaaaagagactgaactttggtcagactggcgactcagagtcagtccccgaccctcaaccaatcggagaaccaccagcaggcccctctggtctgggatctggtacaatggctgcaggcggtggcgctccaatggcagacaataacgaaggcgccgacggagtgggtagttcctcaggaaattggcattgcgattccacatggctgggcgacagagtcatcaccaccagcacccgaacctgggccctgcccacctacaacaaccacctctacaagcaaatatccaatgggacatcgggaggaagcaccaacgacaacacctacttcggctacagcaccccctgggggtattttgacttcaacagattccactgccacttctcaccacgtgactggcagcgactcatcaacaacaactggggattccggccaaaaagactcagcttcaagctcttcaacatccaggtcaaggaggtcacgcagaatgaaggcaccaagaccatcgccaataaccttaccagcacgattcaggtatttacggactcggaataccagctgccgtacgtcctcggctccgcgcaccagggctgcctgcctccgttcccggcggacgtcttcatgattccccagtacggctaccttacactgaacaatggaagtcaagccgtaggccgttcctccttctactgcctggaatattttccatctcaaatgctgcgaactggaaacaattttgaattcagctacaccttcgaggacgtgcctttccacagcagctacgcacacagccagagcttggaccgactgatgaatcctctcatcgaccagtacctgtactacttatccagaactcagtccacaggaggaactcaaggtacccagcaattgttattttctcaagctgggcctgcaaacatgtcggctcaggctaagaactggctacctggaccttgctaccggcagcagcgagtctctacgacactgtcgcaaaacaacaacagcaactttgcttggactggtgccaccaaatatcacctgaacggaagagactctttggtaaatcccggtgtcgccatggcaacccacaaggacgacgaggaacgcttcttcccgtcgagtggagtcctgatgtttggaaaacagggtgctggaagagacaatgtggactacagcagcgttatgctaaccagcgaagaagaaattaaaaccactaaccctgtagccacagaacaatacggtgtggtggctgataacttgcagcaaaccaatacggggcctattgtgggaaatgtcaacagccaaggagccttacctggcatggtctggcagaaccgagacgtgtacctgcagggtcccatctgggccaagattcctcacacggacggcaacttccacccttcaccgctaatgggaggatttggactgaagcacccacctcctcagatcctgatcaagaacacgccggtacctgcggatcctccaacaacgttcagccaggcgaaattggcttccttcattacgcagtacagcaccggacaggtcagcgtggaaatcgagtgggagctgcagaaggagaacagcaaacgctggaacccagagattcagtacacttcaaactactacaaatctacaaatgtggactttgctgtcaatacagagggaacttattctgagcctcgccccattggtactcgttacctcacccgtaatctgtaa

SEQ ID NO: 438 - protein, 738 aa, Adeno-associated virus; identical to SEQ ID NO: 90

SEQ ID NO: 439 - protein, 738 aa, Adeno-associated virus
MAADGYLPDWLEDNLSEGIREWWDLKPGAPKPKANQQKQDDGRGLVLPGYKYLGPFNGLDKGEPVNAADAAALEHDKAYDQQLKAGDNPYLRYNHADAEFQERLQEDTSFGGNLGRAVFQAKKRVLEPLGLVEEAAKTAPGKKRPVEPSPQRSPDSSTGIGKKGQQPAKKRLNFGQTGDSESVPDPQPIGEPPAGPSGLGSGTMAAGGGAPMADNNEGADGVGSSSGNWHCDSTWLGDRVITTSTRTWALPTYNNHLYKQISNGTSGGSTNDNTYFGYSTPWGYFDFNRFHCHFSPRDWQRLINNNWGFRPKRLSFKLFNIQVKEVTQDEGTKTIANNLTSTIQVFTDSEYQLPYVLGSAHQGCLPPFPADVFMIPQYGYLTLNNGSQAVGRSSFYCLEYFPSQMLRTGNNFEFSYTFEDVPFHSSYAHSQSLDRLMNPLIDQYLYYLSRTQSTGGTQGTQQLLFSQAGPANMSARAKNWLPGPCYRQQRVSTTLSQNNNSNFAWTGATKYHLNGRDSLVNPGVAMATHKDDEERFFPSSGVLMFGKQGAGRDNVDYSSVMLTSEEEIKTTNPVATEQYGVVADNLQQANTGPIVGNVNSQGALPGMVWQNRDVYLQGPIWAKIPHTDGNFHPSPLMGGFGLKHPPPQILIKNTPVPADPPTTFSQAKLASFITQYSTGQVSVEIEWELQKENSKRWNPEIQYTSNYYKSTNVDFAVNSEGTYSEPRPIGTRYLTRNL

SEQ ID NO: 440 - DNA, 2217 bp, Adeno-associated virus
atggctgctgacggttatcttccagattggctcgaggacaacctctctgagggcattcgcgagtggtgggacctgaaacctggagcccccaagcccaaggccaaccagcagaagcaggacgacggccggggtctggtgcttcctggctacaagtacctcggacccttcaacggactcgacaagggggagcccgtcaacgcggcggacgcagcggccctcgagcacgacaaggcctacgaccagcagctcaaagcgggtgacaatccgtacctgcggtataaccacgccgacgccgagtttcaggagcgtctgcaagaagatacgtcttttgggggcaacctcgggcgagcagtcttccaggccaagaagcgggttctcgaacctctcggtctggttgaggaagctgctaagacggctcctggaaagaagagaccggtagaaccgtcacctcagcgttcccccgactcctccacgggcatcggcaagaaaggccagcagcccgctaaaaagagactgaactttggtcagactggcgactcagagtcagtccccgaccctcaaccaatcggagaaccaccagcaggcccctctggtctgggatctggtacaatggctgcaggcggtggcgctccaatggcagacaataacgaaggcgccgacggagtgggtagttcctcaggaaattggcattgcgattccacatggctgggcgacagagtcatcaccaccagcacccgaacctgggccctgcccacctacaacaaccacctctacaagcaaatatccaatgggacatcgggaggaagcaccaacgacaacacctacttcggctacagcaccccctgggggtattttgacttcaacagattccactgccacttctcaccacgtgactggcagcgactcatcaacaacaactggggattccggccaaaaagactcagcttcaagctcttcaacatccaggtcaaggaggtcacgcaggatgaaggcaccaagaccatcgccaataaccttaccagcacgattcaggtatttacggactcggaataccagctgccgtacgtcctcggctccgcgcaccagggctgcctgcctccgttcccggcggacgtcttcatgattccccagtacggctaccttacactgaacaatggaagtcaagccgtaggccgttcctccttctactgcctggaatattttccatctcaaatgctgcgaactggaaacaattttgaattcagctacaccttcgaggacgtgcctttccacagcagctacgcacacagccagagcttggaccgactgatgaatcctctcatcgaccagtacctgtactacttatccagaactcagtccacaggaggaactcaaggtacccagcaattgttattttctcaagctgggcctgcaaacatgtcggctcgggctaagaactggctacctggaccttgctaccggcagcagcgagtctctacgacactgtcgcaaaacaacaacagcaactttgcttggactggtgccaccaaatatcacctgaacggaagagactctttggtaaatcccggtgttgctatggcaacgcataaggacgacgaggaacgtttctttccatcgagcggagtcctgatgtttggaaaacagggtgctggaagagacaatgtggactatagcagcgttatgctaaccagcgaggaagaaattaaaaccactaaccctgtagccacagaacaatacggtgtggtggctgacaacttgcagcaagccaatacagggcctattgtgggaaatgtcaacagccaaggagccttacctggcatggtctggcagaaccgagacgtgtacctgcagggtcccatctgggccaaaattcctcacacggacggcaattttcacccgtctcctctgatgggcggctttggactgaagcacccacctccccagatcctgatcaagaatacgccggtacctgcggatcctccaacgacgttcagccaggcaaaattggcttccttcatcacgcagtacagcaccggccaggtcagcgtggagatcgagtgggagctgcagaaggagaacagcaagcgatggaacccagaaattcagtacacttccaactactacaaatctacaaatgtggactttgctgtcaattctgagggtacatattcagagcctcgccccattggtactcgttatctgacacgtaatctgtaa

SEQ ID NO: 441 - DNA, 2211 bp, Adeno-associated virus
atggctgccgatggttatcttccagattggctcgaggacaacctctctgagggcattcgcgagtggtgggacttgaaacctggagccccgaaacccaaagccaaccagcaaaagcaggacgacggccggggcctggtgcttcctggctacaagtacctcggacccttcaacggactcgacaagggggagcccgtcaacgcggcggacgcagcggccctcgagcacgacaaggcctacgaccagcagctcgaagcgggtgacaatccgtacctgcggtataaccacgccgacgccgagtttcaggagcgtctgcaagaagatacgtcttttgggggcaacctcgggcgagcagtcttccaggccaagaagcgggttctcgaacctctcggtctggttgaggaaggcgctaagacggctcctggaaagaagagaccagtagagcagtcaccccaagaaccagactcctcctcgggcatcggcaagaaaggccaacagcccgccagaaaaagactcaattttggccagactggcgactcagagtcagttccagaccctcaacctctcggagaacctccagcagcgccctctggtgtgggacctaatacaatggctgcaggcggtggcgcaccaatggcagacaataacgaaggcgccgacggagtgggtagttcctcgggaaattggcattgcgattccacatggctgggcgacagagtcatcaccaccagcacccgaacctgggccctgcccacctacaacaaccacctctacaagcaaatctccaacgggacatcgggaggagccaccaacgacaacacctacttcggctacagcaccccctgggggtattttgactttaacagattccactgccacttttcaccacgtgactggcagcgactcatcaacaacaactggggattccggcccaagagactcagcttcaagctcttcaacatccaggtcaaggaggtcacgcagaatgaaggcaccaagaccatcgccaataacctcaccagcaccatccaggtgtttacggactcggagtaccagctgccgtacgttctcggctctgcccaccagggctgcctgcctccgttcccggcggacgtgttcatgattccccagtacggctacctaacactcaacaacggtagtcaggccgtgggacgctcctccttctactgcctggaatactttccttcgcagatgctgagaaccggcaacaacttccagtttacttacaccttcgaggacgtgcctttccacagcagctacgcccacagccagagcttggaccggctgatgaatcctctgattgaccagtacctgtactacttgtctcggactcaaacaacaggaggcacggcaaatacgcagactctgggcttcagccaaggtgggcctaatacaatggccaatcaggcaaagaactggctgccaggaccctgttaccgccaacaacgcgtctcaacgacaaccgggcaaaacaacaatagcaactttgcctggactgctgggaccaaataccatctgaatggaagaaattcattggctaatcctggcatcgctatggcaacacacaaagacgacgaggagcgttttttcccagtaacgggatcctgtttttggcaacaaaatgctgccagagacaatgcggattacagcgatgtcatgctcaccagcgaggaagaaatcaaaaccactaaccctgtggctacagaggaatacggtatcgtggcagataacttgcagcagcaaaacacggctcctcaaattggaactgtcaacagccagggggccttacccggtatggtctggcagaaccgggacgtgtacctgcagggtcccatctgggccaagattcctcacacggacggcaacttccacccgtctccgctgatgggcggctttggcctgaaacatcctccgcctcagatcctgatcaagaacacgcctgtacctgcggatcctccgaccaccttcaaccagtcaaagctgaactctttcatcacgcaatacagcaccggacaggtcagcgtggaaattgaatgggagctacagaaggaaaacagcaagcgctggaaccccgagatccagtacacctccaactactacaaatctacaagtgtggactttgctgttaatacagaaggcgtgtactctgaaccccgccccattggcacccgttacctcacccgtaatctgtaa

SEQ ID NO: 442 - protein, 736 aa, Adeno-associated virus
MAADGYLPDWLEDNLSEGIREWWDLKPGAPKPKANQQKQDDGRGLVLPGYKYLGPFNGLDKGEPVNAADAAALEHDKAYDQQLEAGDNPYLRYNHADAEFQERLQEDTSFGGNLGRAVFQAKKRVLEPLGLVEEGAKTAPGKKRPVEQSPQEPDSSSGIGKKGQQPARKRLNFGQTGDSESVPDPQPLGEPPAAPSGVGPNTMAAGGGAPMADNNEGADGVGSSSGNWHCDSTWLGDRVITTSTRTWALPTYNNHLYKQISNGTSGGATNDNTYFGYSTPWGYFDFNRFHCHFSPRDWQRLINNNWGFRPKRLSFKLFNIQVKEVTQNEGTKTIANNLTSTIQVFTDSEYQLPYVLGSAHQGCLPPFPADVFMIPQYGYLTLNNGSQAVGRSSFYCLEYFPSQMLRTGNNFQFTYTFEDVPFHSSYAHSQSLDRLMNPLIDQYLYYLSRTQTTGGTANTQTLGFSQGGPNTMANQAKNWLPGPCYRQQRVSTTTGQNNNSNFAWTAGTKYHLNGRNSLANPGIAMATHKDDEERFFPVTGSCFWQQNAARDNADYSDVMLTSEEEIKTTNPVATEEYGIVADNLQQQNTAPQIGTVNSQGALPGMVWQNRDVYLQGPIWAKIPHTDGNFHPSPLMGGFGLKHPPPQILIKNTPVPADPPTTFNQSKLNSFITQYSTGQVSVEIEWELQKENSKRWNPEIQYTSNYYKSTSVDFAVNTEGVYSEPRPIGTRYLTRNL

SEQ ID NO: 443 - DNA, 2214 bp, Adeno-associated virus
atggctgctgacggttatcttccagattggctcgaggacaacctctctgagggcattcgcgagtggtgggacctgaaacctggagcccccaagcccaaggccaaccagcagaagcaggacgacggccggggtctggtgcttcctggctacaagtacctcggacccttcaacggactcgacaagggggagcccgtcagcgcggcggacgcagcggccctcgagcacgacaaggcctgcgaccagcggctcaaagcgggtgacaatccgtacctgcggtataaccacgccgacgccgagtttcaggagcgtctgcaagaagatacgtcttttgggggcaacctcgggcgagcagtcttccaggccaagaagcgggttctcgaacctctcggtctggttgaggaagctgctaagacggctcctggaaagaagggaccggtagaaccgtcacctcagcgttcccccgactcctccacgggcatcggcaagaaaggccagcagcccgctagaaagagactgaactttgggcagactggcgactcagagtcagtccccgaccctcaaccaatcggagaaccaccagcaggcccctctggtctgggatctggtacaatggctgcaggcggtggcgcaccaatggctgacaataacgagggcgccgacggagtgggtaatgcctcaggaaattggcattgcgattccacatggctgggcgacagagtcatcaccaccagcacccgaacctgggctttgcccacctacaacaatcacctctacaagcaaatctccagtcagtcagcaggtagcaccaacgacaacgtctacttcggctacagcaccccctgggggtattttgacttcaacagattccactgtcacttctcaccacgtgactggcagcggctcatcaacaacaactggggattccggcccaagaagctcaacttcaagctgttcaacatccaggtcaaggaggtcacaacgaatgacggcgtcacgaccatcgccaataaccttaccagcacggttcaggtcttttcggactcggaataccagctgccctacgtcctcggctccgcacaccagggctgcctgcctccgttcccggcggacgtcttcatgattccccagtacggctacctgactctgaacaatggcagccaatcggtgggtcgttcctctttctactgcctggaatatttcccttctcaaatgctgagaacgggcaacaacttcaccttcagctacaccttcgaggacgttcccttccacagcagctacgcacacagccagagcctggaccggctgatgaatcctcttatcgaccagtacctgtattacctggccagaacacagagcaacgcaggaggcacagctggcaatcgggaactgcagttttatcagggcgggcctaccaccatggccgaacaagccaaaaactggctgcctggaccttgcttccggcaacaaagagtctccaagacgctggatcaaaacaacaacagcaactttgcttggactggtgccaccaaataccatctaaatggaagaaattcattggttaatcccggtgtcgccatggcaacccacaaggacgacgaggaacgcttcttcccttcgagcggagtcctgatttttggaaaaactggagcagctaataagactacactggaaaatgtgttaatgacaaatgaagaggaaattcgtcctaccaacccggtagccaccgaggaatacgggactgttagcagcaacctgcaggcggctaacactgcagcccagacacaagttgtcaacaaccagggagccttacctggtatggtctggcagaaccgggacgtgtacctgcagggtcccatctgggccaagattcctcacacggacggcaactttcacccgtctccgctgatgggcggctttggactgaagcatccgcctcctcagatcctgatcaaaaacactcctgttcctgctaatcccccggaggtgtttacgcctgccaagtttgcttctttcatcacacagtacagcaccggccaggtcagcgtggagatcgagtgggagctgcagaaggagaacagcaagcgctggaacccagagattcagtatacctccaattttgacgaacagactggtgtggactttgccgttgacagccagggtgtttattctgagcctcgccccattggtactcgttacctcacccgtaatctgtaa

SEQ ID NO: 444 - protein, 737 aa, Adeno-associated virus
MAADGYLPDWLEDNLSEGIREWWDLKPGAPKPKANQQKQDDGRGLVLPGYKYLGPFNGLDKGEPVSAADAAALEHDKACDQRLKAGDNPYLRYNHADAEFQERLQEDTSFGGNLGRAVFQAKKRVLEPLGLVEEAAKTAPGKKGPVEPSPQRSPDSSTGIGKKGQQPARKRLNFGQTGDSESVPDPQPIGEPPAGPSGLGSGTMAAGGGAPMADNNEGADGVGNASGNWHCDSTWLGDRVITTSTRTWALPTYNNHLYKQISSQSAGSTNDNVYFGYSTPWGYFDFNRFHCHFSPRDWQRLINNNWGFRPKKLNFKLFNIQVKEVTTNDGVTTIANNLTSTVQVFSDSEYQLPYVLGSAHQGCLPPFPADVFMIPQYGYLTLNNGSQSVGRSSFYCLEYFPSQMLRTGNNFTFSYTFEDVPFHSSYAHSQSLDRLMNPLIDQYLYYLARTQSNAGGTAGNRELQFYQGGPTTMAEQAKNWLPGPCFRQQRVSKTLDQNNNSNFAWTGATKYHLNGRNSLVNPGVAMATHKDDEERFFPSSGVLIFGKTGAANKTTLENVLMTNEEEIRPTNPVATEEYGTVSSNLQAANTAAQTQVVNNQGALPGMVWQNRDVYLQGPIWAKIPHTDGNFHPSPLMGGFGLKHPPPQILIKNTPVPANPPEVFTPAKFASFITQYSTGQVSVEIEWELQKENSKRWNPEIQYTSNFDEQTGVDFAVDSQGVYSEPRPIGTRYLTRNL

SEQ ID NO: 445 - DNA, 2214 bp, Adeno-associated virus
atggctgccgatggttatcttccagattggctcgaggacaacctctctgagggcattcgcgagtggtgggacctgaaacctggagccccgaaacccaaagccaaccagcaaaagcaggacgacggccggggtctggtgcttcctggctacaagtacctcggacccttcaacggactcgacaagggggagcccgtcaacgcggcggacgcagcggccctcgagcacgacaaggcctacgaccagcagctcaaagcgggtgacaatccgtacctgcggtataaccacgccgacgccgagtttcaggagcgtctgcaagaagatacgtcttttgggggcaacctcgggcgagcagtcttccaggccaagaagcgggttctcgaacctctcggtctggttgaggaagctgctaagacggctcctggaaagaagagaccggtagaaccgtcacctcagcgttcccccgactcctccacgggcatcggcaagaaaggccagcagcccgctagaaagagactgaactttgggcagactggcgactcagagtcagtccccgaccctcaaccaatcggagaaccaccagcaggcccctctggtctgggatctggtacaatggctgcaggcggtggcgctccaatggcagacaataacgaaggcgccgacggagtgggtaatgcctcaggaaattggcattgcgattccacatggctgggcgacagagtcatcaccaccagcacccgaacctgggctttgcccacctacaacaaccacctctacaagcaaatctccagtcagtcagcaggtagcaccaacgacaacgtctacttcggctacagcaccccctgggggtattttgacttcaacagattccactgtcacttctcaccacgtgactggcagcggctcatcaacaacaactggggattccggcccaagaagctcaacttcaagctgttcaacatccaggtcaaggaggtcacaacgaatgacggcgtcacgaccatcgccaataaccttaccagcacggttcaggtcttttcggactcggaataccagctgccctacgtcctcggctccgcacaccagggctgcctgcctccgttcccggcggacgtcttcatgattcctcagtacggctacctgactctcaacaacggtagtcaggccgtgggacgttcctccttctactgcctggagtacttcccctctcagatgctgagaacgggcaacaacttttccttcagctacactttcgaggacgtgcctttccacagcagctacgcgcacagccagagtttggacaggctgatgaatcctctcatcgaccagtacctgtactacctgtcaagaacccagtctacgggaggcacagcgggaacccagcagttgctgttttctcaggccgggcctagcaacatgtcgactcaggccagaaactggctgcctggaccctgctacagacagcagcgcgtctccacgacactgtcgcaaaacaacaacagcaactttgcctggactggtgccaccaagtatcatctgaacggcagagactctctggtgaatccgggcgtcgccatggcaaccaacaaggacgacgaggaccgcttcttcccatccagcggcatcctcatgtttggcaagcagggagctggaaaagacaacgtggactatagcaacgtgatgctaaccagcgaggaagaaatcaagaccaccaaccccgtggccacagaacagtatggcgtggtggctgataacctacagcagcaaaacaccgctcctattgtgggggccgtcaacagccagggagccttacctggcatggtctggcagaaccgggacgtgtacctgcagggtcctatttgggccaagattcctcacacagatggcaactttcacccgtctcctttaatgggcggctttggacttaaacatccgcctcctcagatccttatcaaaaacactcctgttcctgcggatcctccaacagcgttcaaccaggccaagctgaattctttcatcacgcagtacagcaccggacaagtcagcgtggagatcgagtgggagctgcagaaggagaacagcaagcgctggaacccagagattcagtatacttccaactactacaaatctacaaatgtggactttgctgttaatactgagggtgcttactctgagcctcgccccattggcactcgttacctcacccgtaatctgtaa

SEQ ID NO: 446 - protein, 737 aa, Adeno-associated virus
MAADGYLPDWLEDNLSEGIREWWDLKPGAPKPKANQQKQDDGRGLVLPGYKYLGPFNGLDKGEPVNAADAAALEHDKAYDQQLKAGDNPYLRYNHADAEFQERLQEDTSFGGNLGRAVFQAKKRVLEPLGLVEEAAKTAPGKKRPVEPSPQRSPDSSTGIGKKGQQPARKRLNFGQTGDSESVPDPQPIGEPPAGPSGLGSGTMAAGGGAPMADNNEGADGVGNASGNWHCDSTWLGDRVITTSTRTWALPTYNNHLYKQISSQSAGSTNDNVYFGYSTPWGYFDFNRFHCHFSPRDWQRLINNNWGFRPKKLNFKLFNIQVKEVTTNDGVTTIANNLTSTVQVFSDSEYQLPYVLGSAHQGCLPPFPADVFMIPQYGYLTLNNGSQAVGRSSFYCLEYFPSQMLRTGNNFSFSYTFEDVPFHSSYAHSQSLDRLMNPLIDQYLYYLSRTQSTGGTAGTQQLLFSQAGPSNMSTQARNWLPGPCYRQQRVSTTLSQNNNSNFAWTGATKYHLNGRDSLVNPGVAMATNKDDEDRFFPSSGILMFGKQGAGKDNVDYSNVMLTSEEEIKTTNPVATEQYGVVADNLQQQNTAPIVGAVNSQGALPGMVWQNRDVYLQGPIWAKIPHTDGNFHPSPLMGGFGLKHPPPQILIKNTPVPADPPTAFNQAKLNSFITQYSTGQVSVEIEWELQKENSKRWNPEIQYTSNYYKSTNVDFAVNTEGAYSEPRPIGTRYLTRNL

SEQ ID NO: 447 - DNA, 2217 bp, Adeno-associated virus
atggctgccgatggttatcttccagattggctcgaggacaacctctctgagggcattcgcgagtggtgggacctgaaacctggagccccgaaacccaaagccaaccagcaaaagcaggacgacggccggggtctggtgcttcctggctacaagtacctcggacccttcaacggactcgacaagggggagcccgtcaacgcggcggacgcagcggccctcgagcacgacaaggcctacgaccagcagctcaaagcgggtgacaatccgtacctgcggtataatcacgccgacgccgagtttcaggagcgtctgcaagaagatacgtcttttgggggcaacctcgggcgagcagtcttccaggccaagaagcgggttctcgaacctctcggtctggttgaggaaggcgctaagacggctcctggaaagaagagaccggtagagccgtcaccacagcgttcccccgactcctccacgggcatcggcaagaaaggccagcagcccgccagaaagagactcaatttcggtcagactggcgactcagagtcagtccccgaccctcaacctatcggagaacctccagcagcgccctctagtgtgggatctggtacaatggctgcaggcggtggcgcaccaatggcagacaataacgaaggtgccgacggagtgggtagttcctcgggaaattggcattgcgattccacatggctgggcgacagagtcatcaccaccagcacccgaacctgggccctgcccacctacaacaaccacctctacaagcaaatctccaacgggacctcgggaggcagcaccaacgacaacacctactttggctacagcaccccctgggggtattttgactttaacagattccactgccacttctcaccacgtgactggcagcgactcatcaacaacaactggggattccggcccaagagactcagcttcaagctcttcaacatccaggtcaaagaggtcacgcagaatgaaggcaccaagaccatcgccaataacctcaccagcaccatccaggtgtttacggactcggaataccagctgccgtacgtcctcggctctgcccaccagggctgcctgcctccgttcccggcggacgtcttcatgattcctcagtacggctacctgactctcaacaacggtagtcaggccgtgggacgttcctccttctactgcctggagtacttcccctctcagatgctgagaacgggcaacaacttttccttcagctacactttcgaggacgtgcctttccacagcagctacgcgcacagccagagtttggacaggctgatgaatcctctcatcgaccagtacctgtactacctgtcaagaacccagtctacgggaggcacagcgggaacccagcagttgctgttttctcaggccgggcctagcaacatgtcggctcaggccagaaactggctgcctggaccctgctacagacagcagcgcgtctccacgacactgtcgcaaaacaacaacagcaactttgcctggactggtgccaccaagtatcatctgaacggcagagactctctggtgaatccgggcgtcgccatggcaaccaacaaggacgacgaggaccgcttcttcccatccagcggcatcctcatgtttggcaagcagggagctggaaaagacaacgtggactatagcaacgtgatgctaaccagcgaggaagaaatcaaggccaccaaccccgtggccacagaacagtatggcgtggtggctgataacctacagcagcaaaacaccgctcctattgtgggggccgtcaacagccagggagccttacctggcatggtctggcagaaccgggacgtgtacctgcagggtcctatttgggccaagattcctcacacagatggcaactttcacccgtctcctttaatgggcggctttggacttaaacatccgcctcctcagatcctcatcaaaaacactcctgttcctgcggatcctccaacagcgttcaaccaggccaagctgaattctttcatcacgcagtacagcaccggacaagtcagcgtggagatcgagtgggagctgcagaaggagaacagcaagcgctggaacccagagattcagtatacttccaactactacaaatctacaaatgtggactttgctgttaatactgagggtgtttactctgagcctcgccccattggcactcgttacctcacccgtaatctgtaa

SEQ ID NO: 448 - protein, 738 aa, Adeno-associated virus
MAADGYLPDWLEDNLSEGIREWWDLKPGAPKPKANQQKQDDGRGLVLPGYKYLGPFNGLDKGEPVNAADAAALEHDKAYDQQLKAGDNPYLRYNHADAEFQERLQEDTSFGGNLGRAVFQAKKRVLEPLGLVEEGAKTAPGKKRPVEPSPQRSPDSSTGIGKKGQQPARKRLNFGQTGDSESVPDPQPIGEPPAAPSSVGSGTMAAGGGAPMADNNEGADGVGSSSGNWHCDSTWLGDRVITTSTRTWALPTYNNHLYKQISNGTSGGSTNDNTYFGYSTPWGYFDFNRFHCHFSPRDWQRLINNNWGFRPKRLSFKLFNIQVKEVTQNEGTKTIANNLTSTIQVFTDSEYQLPYVLGSAHQGCLPPFPADVFMIPQYGYLTLNNGSQAVGRSSFYCLEYFPSQMLRTGNNFSFSYTFEDVPFHSSYAHSQSLDRLMNPLIDQYLYYLSRTQSTGGTAGTQQLLFSQAGPSNMSAQARNWLPGPCYRQQRVSTTLSQNNNSNFAWTGATKYHLNGRDSLVNPGVAMATNKDDEDRFFPSSGILMFGKQGAGKDNVDYSNVMLTSEEEIKATNPVATEQYGVVADNLQQQNTAPIVGAVNSQGALPGMVWQNRDVYLQGPIWAKIPHTDGNFHPSPLMGGFGLKHPPPQILIKNTPVPADPPTAFNQAKLNSFITQYSTGQVSVEIEWELQKENSKRWNPEIQYTSNYYKSTNVDFAVNTEGVYSEPRPIGTRYLTRNL

SEQ ID NO: 449 - DNA, 2217 bp, Adeno-associated virus
atggctgccgatggttatcttccagattggctcgaggacaacctctctgagggcattcgcgagtggtgggacctgaaacctggagccccgaaacccaaagccaaccagcaaaagcaggacgacggccggggtctggtgcttcctggctacaagcacctcggacccttcaacggactcgacaagggggagcccgtcaacgcggcggacgcagcggccctcgagcacgacaaggcctacgaccagcagctcaaagcgggtgacaatccgtacctgcggtataatcacgctgacgccgagtttcaggagcgtctgcaagaagatacgtcttttgggggcaacctcgggcgagcagtcttccaggccaagaagcgggttctcgaacctctcggtctggttgaggaaggcgctaagacggctcctggaaagaagagaccggtagagccgtcaccacagcgttcccccgactcctccacgggcatcggcaagaaaggccagcagcccgccagaaagagactcaatttcggtcagactggcgactcagagtcagtccccgaccctcaacctatcggagaacctccagcagcgccctctagtgtgggatctggtacaatggctgcaggcggtggcgcaccaatggcagacaataacgaaggtgccgacggagtgggtagttcctcgggaaattggcattgcgattccacatggctgggcgacagagtcatcaccaccagcacccgaacctgggccctgcccacctacaacaaccacctctacaagcaaatctccaacgggacctcgggaggcagcaccaacgacaacacctactttggctacagcaccccctgggggtattttgactttaacagattccactgccacttctcaccacgtgactggcagcgactcatcaacaacaactggggattccggcccaagagactcagcttcaagctcttcaacatccaggtcaaagaggtcacgcagaatgaaggcaccaagaccatcgccaataaccttaccagcacggttcaggtcttttcggactcggaataccagctgccctacgtcctcggctccgcacaccagggctgcctgcctccgttcccggcggacgtcttcatgattccccagtacggctacctgactctgaacaatggcagccaatcggtgggtcgttcctctttctactgcctggaatatttcccttctcaaatgctgagaacgggcaacaacttcaccttcagctacaccttcgaggacgttcccttccacagcagctacgcacacagccagagcctggaccggctgatgaatcctcttatcgaccagtacctgtattacctggccagaacacagagcaacgcaggaggcacagctggcaatcgggaactgcagttttatcagggcgggcctaccaccatggccgaacaagccaaaaactggctgcctggaccttgcttccggcaacaaagagtctccaagacgctggatcaaaacaacaacagcaactttgcttggactggtgccaccaaataccatctaaatggaagaaattcattggttaatcccggtgtcgccatggcaacccacaaggacgacgaggaacgcttcttcccttcgagcggagtcctgatttttggaaaaactggagcagctaataagactacactggaaaatgtgttaatgacaaatgaagaggaaattcgtcctaccaacccggtagccaccgaggaatacgggactgttagcagcaacctgcaggcggctaacactgcagcccagacacaagttgtcaacaaccagggagccttacctggtatggtctggcagaaccgggacgtgtacctgcagggtcccatctgggccaagattcctcacacggacggcaactttcacccgtctccgctgatgggcggctttggactgaagcatccgcctcctcagatcctgatcaaaaacactcctgttcctgctaatcccccggaggtgtttacgcctgccaagtttgcttctttcatcacacagtacagcaccggccaggtcagcgtggagatcgagtgggagctgcagaaggagaacagcaagcgctggaacccagagattcagtatacctccaattttgacaaacagactggtgtggactttgccgttgacagccagggtgtttattctgagcctcgccccattggtactcgttacctcacccgtaatctgtaa

SEQ ID NO: 450 - protein, 738 aa, Adeno-associated virus
MAADGYLPDWLEDNLSEGIREWWDLKPGAPKPKANQQKQDDGRGLVLPGYKHLGPFNGLDKGEPVNAADAAALEHDKAYDQQLKAGDNPYLRYNHADAEFQERLQEDTSFGGNLGRAVFQAKKRVLEPLGLVEEGAKTAPGKKRPVEPSPQRSPDSSTGIGKKGQQPARKRLNFGQTGDSESVPDPQPIGEPPAAPSSVGSGTMAAGGGAPMADNNEGADGVGSSSGNWHCDSTWLGDRVITTSTRTWALPTYNNHLYKQISNGTSGGSTNDNTYFGYSTPWGYFDFNRFHCHFSPRDWQRLINNNWGFRPKRLSFKLFNIQVKEVTQNEGTKTIANNLTSTVQVFSDSEYQLPYVLGSAHQGCLPPFPADVFMIPQYGYLTLNNGSQSVGRSSFYCLEYFPSQMLRTGNNFTFSYTFEDVPFHSSYAHSQSLDRLMNPLIDQYLYYLARTQSNAGGTAGNRELQFYQGGPTTMAEQAKNWLPGPCFRQQRVSKTLDQNNNSNFAWTGATKYHLNGRNSLVNPGVAMATHKDDEERFFPSSGVLIFGKTGAANKTTLENVLMTNEEEIRPTNPVATEEYGTVSSNLQAANTAAQTQVVNNQGALPGMVWQNRDVYLQGPIWAKIPHTDGNFHPSPLMGGFGLKHPPPQILIKNTPVPANPPEVFTPAKFASFITQYSTGQVSVEIEWELQKENSKRWNPEIQYTSNFDKQTGVDFAVDSQGVYSEPRPIGTRYLTRNL

SEQ ID NO: 451 - protein, 737 aa, Adeno-associated virus
MAADGYLPDWLEDNLSEGIREWWDLKPGAPKPKANQQKQDDGRGLVLPGYKYLGPFNGLDKGEPVNAADAAALEHDKAYDQQLKAGDNPYLRYNHADAEFQERLQEDTSFGGNLGRAVFQAKKRVLEPLGLVEEAAKTAPGKKRPVEPSPQRSPDSSTGIGKKGQQPARKRLNFGQTGDSESVPDPQPIGEPPAGPSGLGSGTMAAGGGAPMADNNKGADGVGNASGNWHCDSTWLGDRVITTSTRTWALPTYNNHLYKQISSQSAGSTNDNVYFGYSTPWGYFDFNRFHCHFSPRDWQRLINSNWGFRPKKLNFKLFNIQVKEVTTNDGVTTIANNLTSTVQVFSDSEYQLPYVLGSAHQGCLPPFPADVFMIPQYGYLTLNNGSQSVGRSSFYCLEYFPSQMLRTGNNFTFSYTFEDVPFHSSYAHSQSLDRLMNPLIDQYLYYLARTQSNAGGTAGNRELQFYQGGPTTMAEQAKNWLPGPCFRQQRVSKTLDQNNNSNFAWTGATKYHLNGRNSLVNPGVAMATHKDDEERFFPSSGVLIFGKTGAANKTTLENVLMTNEEEIRPTNPVATEEYGTVSSNLQAANTAAQTQVVNNQGALPGMVWQNRDVYLQGPIWAKIPHTDGNFHPSPLMGGFGLKHPPPQILIKNTPVPANPPEVFTPAKFASFITQYSTGQVSVEIEWELQKENSKRWNPEIQYTSNFDKQTGVDFAVDSQGVYSEPRPIGTRYLTRNL

SEQ ID NO: 452 - protein, 737 aa, Adeno-associated virus
MAADGYLPDWLEDNLSEGIREWWDLKPGAPKPKANQQKQDDGRGLVLPGYKYLGPFNGLDKGEPVNAADAAALEHDKAYDQQLKAGDNPYLRYNHADAEFQERLQEDTSFGGNLGRAVFQAKKRVLEPLGLVEEAAKTAPGKKRPVEPSPQRSPDSSTGIGKKGQQPARKRLNFGQTGDSESVPDPQPIGEPPAGPSGLGSGTMAAGGGAPMADNNEGADGVGNASGNWHCDSTWLGDRVITTSTRTWALPTYNNHLYKQISSQSAGSTNDNVYFGYSTPWGYFDFNRFHCHFSPRDWQRLINSNWGFRPKKLNFKLFNIQVKEVTTNDGVTTIANNLTSTVQVFSDSEYQLPYVLGSAHQGCLPPFPADVFMIPQYGYLTLNNGSQSVGRSSFYCLEYFPSQMLRTGNNFTFSYTFEDVPFHSSYAHSQSLDRLMNPLIDQYLYYLARTQSNAGGTAGNRELQFYQGGPTTMAEQAKNWLPGPCFRQQRVSKTLDQNNNSNFAWTGATKYHLNGRNSLVNPGVAMATHKDDEERFFPSSGVLIFGKTGAANKTTLENVLMTNEEEIRPTNPVATEEYGTVSSNLQAANTAAQTQVVNNQGALPGMVWQNRDVYLQGPIWAKIPHTDGNFHPSPLMGGFGLKHPPPQILIKNTPVPANPPEVFTPAKFASFITQYSTGQVSVEIEWELQKENSKRWNPEIQYTSNFDKQTGVDFAVDSQGVYSEPRPIGTRYLTRNL

SEQ ID NO: 453 - protein, 737 aa, Adeno-associated virus
MAADGYLPDWLEDNLSEGIREWWDLKPGAPKPKANQQKQDDGRGLVLPGYKYLGPFNGLDKGEPVNAADAAALEHDKAYDQQLKAGDNPYLRYNHADAEFQERLQEDTSFGGNLGRAVFQAKKRVLEPLGLVEEAAKTAPGKKRPVEPSPQRSPDSSTGIGKKGQQPARKRLNFGQTGDSESVPDPQPIGEPPAGPSGLGSGTMAAGGGAPMADNNEGADGVGNASGNWHCDSTWLGDRVITTSTRTWALPTYNNHLYKQISSQSAGSTNDNVYFGYSTPWGYFDFNRFHCHFSPRDWQRLINNNWGFRPKKLNFKLFNIQVKEVTTNDGVTTIANNLTSTVQVFSDSEYQLPYVLGSAHQGCLPPFPADVFMIPQYGYLTLNNGSQSVGRSSFYCLEYFPSQMLRTGNNFTFSYTFEDVPFHSSYAHSQSLDRLMNPLIDQYLYYLARTQSNAGGTAGNRELQFYQGGPTTMAEQAKNWLPGPCFRQQRVSKTLDQNNNSNFAWTGATKYHLNGRNSLVNPGVAMATHKDDEERFFPSSGVLIFGKTGAANKTTLENVLMTNEEEIRPTNPVATEEYGTVSSNLQAANTAAQTQVVNNQGALPGMVWQNRDVYLQGPIWAKIPHTDGNFHPSPLMGGFGLKHPPPQILIKNTPVPANPPEVFTPAKFASFITQYSTGQVSVEIEWELQKENSKRWNPEIQYTSNFDKQTGVDFAVDSQGVYSEPRPIGTRYLTRNL

SEQ ID NO: 454 - protein, 737 aa, Adeno-associated virus
MAADGYLPDWLEDNLSEGIREWWDLKPGAPKPKANQQKQDDGRGLVLPGYKYLGPFNGLDKGEPVNAADAAALEHDKAYDQQLKAGDNPYLRYNHADAEFQERLQEDTSFGGNLGRAVFQAKKRVLEPLGLVEEAAKTAPGKKRPVEPSPQRSPDSSTGIGKKGQQPARKRLNFGQTGDSESVPDPQPIGEPPAGPSGLGSGTMAAGGGAPMADNNKGADGVGNASGNWHCDSTWLGDRVITTSTRTWALPTYNNHLYKQISSQSAGSTNDNVYFGYSTPWGYFDFNRFHCHFSPRDWQRLINNNWGFRPKKLNFKLFNIQVKEVTTNDGVTTIANNLTSTVQVFSDSEYQLPYVLGSAHQGCLPPFPADVFMIPQYGYLTLNNGSQSVGRSSFYCLEYFPSQMLRTGNNFTFSYTFEDVPFHSSYAHSQSLDRLMNPLIDQYLYYLARTQSNAGGTAGNRELQFYQGGPTTMAEQAKNWLPGPCFRQQRVSKTLDQNNNSNFAWTGATKYHLNGRNSLVNPGVAMATHKDDEERFFPSSGVLIFGKTGAANKTTLENVLMTNEEEIRPTNPVATEEYGTVSSNLQAANTAAQTQVVNNQGALPGMVWQNRDVYLQGPIWAKIPHTDGNFHPSPLMGGFGLKHPPPQILIKNTPVPANPPEVFTPAKFASFITQYSTGQVSVEIEWELQKENSKRWNPEIQYTSNFDKQTGVDFAVDSQGVYSEPRPIGTRYLTRNL

SEQ ID NO: 455 - DNA, 2214 bp, Adeno-associated virus
atggctgctgacggttatcttccagattggctcgaggacaacctctctgagggcattcgcgagtggtgggacctgaaacctggagcccccaagcccaaggccaaccagcagaagcaggacgacggccggggtctggtgcttcctggctacaagtacctcggacccttcaacggactcgacaagggggagcccgtcaacgcggcggacgcagcggccctcgagcacgacaaggcctacgaccagcagctcaaagcgggtgacaatccgtacctgcggtataaccacgccgacgccgagtttcaggagcgtctgcaagaagatacgtcttttgggggcaacctcgggcgagcagtcttccaggccaagaagcgggttctcgaacctctcggtctggttgaggaagctgctaagacggctcctggaaagaagagaccggtagaaccgtcacctcagcgttcccccgactcctccacgggcatcggcaagaaaggccagcagcccgctagaaagagactgaactttgggcagactggcgactcagagtcagtccccgaccctcaaccaatcggagaaccaccagcaggcccctctggtctgggatctggtacaatggctgcaggcggtggcgcaccaatggctgacaataacaagggcgccgacggagtgggtaatgcctcaggaaattggcattgcgattccacatggctgggcgacagagtcatcaccaccagcacccgaacctgggctttgcccacctacaacaaccacctctacaagcaaatctccagtcagtcagcaggtagcaccaacgacaacgtctacttcggctacagcaccccctgggggtattttgacttcaacagattccactgtcacttctcaccacgtgactggcagcggctcatcaacagcaactggggattccggcccaagaagctcaacttcaagctgttcaacatccaggtcaaggaggtcacaacgaatgacggcgtcacgaccatcgccaataaccttaccagcacggttcaggtcttttcggactcggaataccagctgccctacgtcctcggctccgcacaccagggctgcctgcctccgttcccggcggacgtcttcatgattccccagtacggctacctgactctgaacaatggcagccaatcggtgggtcgttcctctttctactgcctggaatatttcccttctcaaatgctgagaacgggcaacaacttcaccttcagctacaccttcgaggacgttcccttccacagcagctacgcacacagccagagcctggaccggctgatgaatcctcttatcgaccagtacctgtattacctggccagaacacagagcaacgcaggaggcacagctggcaatcgggaactgcagttttatcagggcgggcctaccaccatggccgaacaagccaaaaactggctgcctggaccttgcttccggcaacaaagagtctccaagacgctggatcaaaacaacaacagcaactttgcttggactggtgccaccaaataccatctaaatggaagaaattcattggttaatcccggtgtcgccatggcaacccacaaggacgacgaggaacgcttcttcccttcgagcggagtcctgatttttggaaaaactggagcagctaataagactacactggaaaatgtgttaatgacaaatgaagaggaaattcgtcctaccaacccggtagccaccgaggaatacgggactgttagcagcaacctgcaggcggctaacactgcagcccagacacaagttgtcaacaaccagggagccttacctggtatggtctggcagaaccgggacgtgtacctgcagggtcccatctgggccaagattcctcacacggacggcaactttcacccgtctccgctgatgggcggctttggactgaagcatccgcctcctcagatcctgatcaaaaacactcctgttcctgctaatcccccggaggtgtttacgcctgccaagtttgcttctttcatcacacagtacagcaccggccaggtcagcgtggagatcgagtgggagctgcagaaggagaacagcaagcgctggaacccagagattcagtatacctccaattttgacaaacagactggtgtggactttgccgttgacagccagggtgtttattctgagcctcgccccattggtactcgttacctcacccgtaatctgtaa

SEQ ID NO: 456 - DNA, 2217 bp, Adeno-associated virus
atggctgccgatggttatcttccagattggctcgaggacaacctctctgagggcattcgcgagtggtgggacctgaaacctggagccccgaaacccaaagccaaccagcaaaagcaggacgacggccggggtctggtgcttcctggctacaagtacctcggacccttcaacggactcgacaagggggagcccgtcaacgcggcggacgcagcggccctcgagcacgacaaggcctacgaccagcagctcaaagcgggtgacaatccgcacctgcggtataatcacgccgacgccgagtttcaggagcgtctgcaagaagatacgtcttttgggggcaacctcgggcgagcagtcttccaggccaagaagcgggttctcgaacctctcggtctggttgaggaaggcgctaagacggctcctggaaagaagagaccggtagagccgtcaccacagcgttcccccgactcctccacgggcatcggcaagaaaggccagcagcccgccagaaagagactcaatttcggtcagactggcgactcagagtcagtccccgaccctcaacttatcggagaacctccagcagcgccctctagtgtgggatctggtacaatggctgcaggcggtggcgcaccaatggcagacaataacgaaggtgccgacggagtgggtagttcctcgggaaattggcattgcgattccacatggctgggcgacagagtcatcaccaccagcacccgaacctgggccctgcccacctacaacaaccacctctacaagcaaatctccaacgggacctcgggaggcagcaccaacgacaacacctactttggctacagcaccccctgggggtattttgactttaacagattccactgccacttctcaccacgtgactggcagcgactcatcaacaacaactggggattccggcccaagagactcagcttcaagctcttcaacatccaggtcaaagaggtcacgcagaatgaaggcaccaagaccatcgccaataacctcaccagcaccatccaggtgtttacggactcggagtaccagctgccgtacgtcctcggctctgcccaccagggctgcctgcctccgttcccggcggacgtcttcatgattcctcagtacggcaacctgactctcaacaacggtagtcaggccgtgggacgttcctccttctactgcctggagtacttcccctctcagatgctgagaacgggcaacaacttttccttcagctacactttcgaggacgtgcctttccacagcagctacgcgcacagccagagtttggacaggctgatgaatcctctcatcgaccagtacctgtactacctgtcaagaacccagtctacgggaggcacagcgggaacccagcagttgctgttttctcaggccgggcctagcaacatgtcggctcaggccagaaactggctgcctggaccctgctacagacagcagcgcgtctccacgacactgtcgcaaaacaacaacagcaactttgcctggactggtgccaccaagtatcatctgaacggcagagactctctggtgaatccgggcgtcgccatggcaaccaacaaggacgacgaggaccgcttcttcccatccagcggcatcctcatgtttggcaagcagggagctggaaaagacaacatgggctatagcaacgtgatgctaaccagcgaggaagaaatcaagaccaccaaccccgtggccacagaacagtatggcgtggtggctgataacctacagcagcaaaacaccgctcctattgtgggggccgtcaacagccagggagccttacctggcatggtctggcagaaccgggacgtgtacctgcagggtcctatttgggccaagattcctcacacagatggcaactttcacccgtctcctttaatgggcggctttggacttaaacatccgcctcctcagatcctcatcaaaaacactcctgttcctgcggatcctccaacagcgttcaaccaggccaagctgaattctttcatcacgcagtacggcaccggacaagtcagcgtggagatcgagtgggagctgcagaaggagaacagcaagcgctggaacccagagattcagtatacttccaactactacaaatctacaaatgtggactttgctgttaatactgagggtgtttactctgagcctcgccccattggcactcgttacctcacccgtaatctgtaa

SEQ ID NO: 457 - protein, 738 aa, Adeno-associated virus
MAADGYLPDWLEDNLSEGIREWWDLKPGAPKPKANQQKQDDGRGLVLPGYKYLGPFNGLDKGEPVNAADAAALEHDKAYDQQLKAGDNPHLRYNHADAEFQERLQEDTSFGGNLGRAVFQAKKRVLEPLGLVEEGAKTAPGKKRPVEPSPQRSPDSSTGIGKKGQQPARKRLNFGQTGDSESVPDPQLIGEPPAAPSSVGSGTMAAGGGAPMADNNEGADGVGSSSGNWHCDSTWLGDRVITTSTRTWALPTYNNHLYKQISNGTSGGSTNDNTYFGYSTPWGYFDFNRFHCHFSPRDWQRLINNNWGFRPKRLSFKLFNIQVKEVTQNEGTKTIANNLTSTIQVFTDSEYQLPYVLGSAHQGCLPPFPADVFMIPQYGNLTLNNGSQAVGRSSFYCLEYFPSQMLRTGNNFSFSYTFEDVPFHSSYAHSQSLDRLMNPLIDQYLYYLSRTQSTGGTAGTQQLLFSQAGPSNMSAQARNWLPGPCYRQQRVSTTLSQNNNSNFAWTGATKYHLNGRDSLVNPGVAMATNKDDEDRFFPSSGILMFGKQGAGKDNMGYSNVMLTSEEEIKTTNPVATEQYGVVADNLQQQNTAPIVGAVNSQGALPGMVWQNRDVYLQGPIWAKIPHTDGNFHPSPLMGGFGLKHPPPQILIKNTPVPADPPTAFNQAKLNSFITQYGTGQVSVEIEWELQKENSKRWNPEIQYTSNYYKSTNVDFAVNTEGVYSEPRPIGTRYLTRNL

SEQ ID NO: 458 - DNA, 2217 bp, Adeno-associated virus
atggctgccgatggttatcttccagattggctcgaggacaacctctctgagggcattcgcgagtggtgggacctgaaacctggagccccgaaacccaaagccaaccagcaaaagcaggacgacggccggggtctggtgcttcctggctacaagtacctcggacccttcaacggactcgacaagggggagcccgtcaacgcggcggacgcagcggccctcgagcacgacaaggcctacgaccagcagctcaaagcgggtgacaatccgtacctgcggtataatcacgccgacgccgagtttcaggagcgtctgcaagaagatacgtcttttgggggcaacctcgggcgagcagtcttccaggccaagaagcgggttctcgaacctctcggtctggttgaggaaggcgctaagacggctcctggaaagaagagaccggtagagccgtcaccacagcgttcccccgactcctccacgggcatcggcaagaaaggccagcagcccgccggaaagagactcaatttcggtcagactggcgactcagagtcagtccccgaccctcaacctatcggagaacctccagcagcgccctctagtgtgggatctggtacaatggctgcaggcggtggcgcaccaatggcagacaataacgaaggtgccgacggagtgggtagttcctcgggaaattggcattgcgattccacatggctgggcgacagagtcatcaccaccagcacccgaacctgggccctgcccacctacaacaaccacctctacaagcaaatctccaacgggacctcgggaggcagcaccaacgacaacacctactttggctacagcaccccctgggggtattttgactttaacagattccactgccacttctcaccacgtgactggcagcgactcatcaacaacaactggggattccggcccaagagactcagcttcaagctcttcaacatccaggtcaaagaggtcacgcagaatgaaggcaccaagaccatcgccaataacctcaccagcaccatccaggtgtttacggactcggaataccagctgccgtacgtcctcggctctgcccaccagggctgcctgcctccgttcccggcggacgtcttcatgattcctcagtacggctacctgactctcaacaacggtagtcaggccgtgggacgttcctccttctactgcctggagtacttcccctctcagatgctgagaacgggcaacaacttttccttcagctacactttcgaggacgtgcctttccacagcagctacgcgcacagccagagtttggacaggctgatgaatcctctcgtcgaccagtacctgtactacctgtcaagaacccagtctacgggaggcacagcgggaacccagcagttgctgttttctcaggccgggcctagcaacatgtcggctcaggccagaaactggctgcctggaccctgctacagacagcagcgcgtctccacgacactgtcgcaaaacaacaacagcaactttgcctggactggtgccaccaagtatcatctgaacggcagagactctctggtgaatccgggcgtcgccatggcaaccaacaaggacgacgaggaccgcttcttcccatccagcggcatcctcatgtttggcaagcagggagctggaaaagacaacgtggactatagcaacgtgatgctaaccagcgaggaagaaatcaagaccaccaaccccgtggccacagaacagtatggcgtggtggctgataacctacagcagcaaaacaccgctcctattgtgggggccgtcaacagccagggagccttacctggcatggtctggcagaaccgggacgtgtacctgcagggtcctatttgggccaagattcctcacacagatggcaactttcacccgtctcctttaatgggcggctttggacttaaacatccgcctcctcagatcctcatcaaaaacactcctgttcctgcggatcctccaacagcgttcaaccaggccaagctgaattctttcatcacgcagtacagcaccggacaagtcagcgtggagatcgagtgggagctgcagaaggagaacagcaagcgctggagcccagagattcagtatacttccaactactacaaatctacaaatgtggactttgctgttaatactgagggtgtttactctgagcctcgccccattggcactcgttacctcacccgtaatctgtaa

SEQ ID NO: 459 - protein, 738 aa, Adeno-associated virus
MAADGYLPDWLEDNLSEGIREWWDLKPGAPKPKANQQKQDDGRGLVLPGYKYLGPFNGLDKGEPVNAADAAALEHDKAYDQQLKAGDNPYLRYNHADAEFQERLQEDTSFGGNLGRAVFQAKKRVLEPLGLVEEGAKTAPGKKRPVEPSPQRSPDSSTGIGKKGQQPAGKRLNFGQTGDSESVPDPQPIGEPPAAPSSVGSGTMAAGGGAPMADNNEGADGVGSSSGNWHCDSTWLGDRVITTSTRTWALPTYNNHLYKQISNGTSGGSTNDNTYFGYSTPWGYFDFNRFHCHFSPRDWQRLINNNWGFRPKRLSFKLFNIQVKEVTQNEGTKTIANNLTSTIQVFTDSEYQLPYVLGSAHQGCLPPFPADVFMIPQYGYLTLNNGSQAVGRSSFYCLEYFPSQMLRTGNNFSFSYTFEDVPFHSSYAHSQSLDRLMNPLVDQYLYYLSRTQSTGGTAGTQQLLFSQAGPSNMSAQARNWLPGPCYRQQRVSTTLSQNNNSNFAWTGATKYHLNGRDSLVNPGVAMATNKDDEDRFFPSSGILMFGKQGAGKDNVDYSNVMLTSEEEIKTTNPVATEQYGVVADNLQQQNTAPIVGAVNSQGALPGMVWQNRDVYLQGPIWAKIPHTDGNFHPSPLMGGFGLKHPPPQILIKNTPVPADPPTAFNQAKLNSFITQYSTGQVSVEIEWELQKENSKRWSPEIQYTSNYYKSTNVDFAVNTEGVYSEPRPIGTRYLTRNL

SEQ ID NO: 460 - DNA, 2217 bp, Adeno-associated virus
atggttgccgatggttatcttccagattggctcgaggacaacctctctgagggcattcgcgagtggtgggacctgaaacctggagccccgaaacccaaagccaaccagcaaaagcagggcgacggccggggtctggtgcttcctggctacaagtacctcggacccttcaacggactcgacaagggggagcccgtcaacgcggcggacgcagcggccctcgagcacgacaaggcctacgaccagcagcttaaagcgggtgacaatccgtacctgcggtataatcacgccgacgccgagcttcaggagcgtctgcaagaagatacgtcttttgggggcaacctcgggcgagcagtcttccaggccaagaagcgggttctcgaacctctcggtctggttgaggaaggcgctaagacggctcctggaaagaagagaccggtagagccgtcaccacagcgttcccccgactcctccacgggcatcggcaagaaaggccagcagcccgccagaaagagactcaatttcggtcagactggcgactcagagtcagtccccgaccctcaacctatcggagaacctccagcagcgccctctagtgtgggatctggtacaatggctgcaggcggtggcgcgccaatggcagacaataacgaaggtgccgacggagtgggtagttcctcgggaaattggcattgcgattccacatggctgggcgacagagtcatcaccaccagcacccgaacctgggccctgcccacctacaacaaccacctctacaagcaaatctccaacgggacctcgggaggcagcaccaacgacaacacctactttggctacagcaccccctgggggtattttgactttaacagattccactgccacttctcaccacgtgactggcagcgactcatcaacaacaactggggattccggcccaagagactcagcttcaagctcttcaacatccaggtcaaagaggtcacgcagaatgaaggcaccaagaccatcgccaataacctcaccagcaccatccaggtgtttacggactcggaataccagctgccgtacgtcctcggctctgcccaccagggctgccagcctccgttcccggcggacgtcttcatgattcctcagtacggctacctgactctcaacaacggtagtcaggccgtgggacgttcctccttctactgcctggagtacttcccctctcagatgctgagaacgggcaacaacttttccttcagctacactttcgaggacgtgcctttccacagcagctacgcgcacagccagagtttggacaggctgatgaatcctctcatcgaccagtacctgtactacctgtcaagaacccagtctacgggaggcacagcgggaacccagcagttgctgttttctcaggccgggcctagcaacatgtcggctcaggccagaaactggctgcctggaccctgctacagacagcagcgcgtctccacgacactgtcgcaaaacaacaacagcaactttgcctggactggtgccaccaagtatcatctgaacggcagagactctctggtgaatccgggcgtcgccatggcaaccaacaaggacgacgaggaccgcttcttcccatccagcggcatcctcatgtttggcaagcagggagctggaaaagacaacgtggactatagcaacgtgatgctaaccagcgaggaagaaatcaagaccaccaaccccgtggccacagaacagtatggcgtggtggctgataacctacagcagcaaaacaccgctcctattgtgggggccgtcaacagccagggagccttacctggcatggtctggcagaaccgggacgtgtacctgcagggtcctatttgggccaagattcctcacacagatggcaactttcacccgtctcctttaatgggcggctttggacttaaacatccgcctcctcagatcctcatcaaaaacactcctgttcctgcggatcctccaacagcgttcaaccaggccaagctgaattctttcatcacgcagtacagcaccggacaagtcagcgtggagatcgagtgggagccgcagaaggagaacagcaagcgctggaacccagagattcagtatacttccaactactacaaatctacaaatgtggactttgctgttaatactgagggtgtttactctgagcctcgccccattggcactcgttacctcacccgtaatctgtaa

SEQ ID NO: 461 - protein, 738 aa, Adeno-associated virus
MVADGYLPDWLEDNLSEGIREWWDLKPGAPKPKANQQKQGDGRGLVLPGYKYLGPFNGLDKGEPVNAADAAALEHDKAYDQQLKAGDNPYLRYNHADAELQERLQEDTSFGGNLGRAVFQAKKRVLEPLGLVEEGAKTAPGKKRPVEPSPQRSPDSSTGIGKKGQQPARKRLNFGQTGDSESVPDPQPIGEPPAAPSSVGSGTMAAGGGAPMADNNEGADGVGSSSGNWHCDSTWLGDRVITTSTRTWALPTYNNHLYKQISNGTSGGSTNDNTYFGYSTPWGYFDFNRFHCHFSPRDWQRLINNNWGFRPKRLSFKLFNIQVKEVTQNEGTKTIANNLTSTIQVFTDSEYQLPYVLGSAHQGCQPPFPADVFMIPQYGYLTLNNGSQAVGRSSFYCLEYFPSQMLRTGNNFSFSYTFEDVPFHSSYAHSQSLDRLMNPLIDQYLYYLSRTQSTGGTAGTQQLLFSQAGPSNMSAQARNWLPGPCYRQQRVSTTLSQNNNSNFAWTGATKYHLNGRDSLVNPGVAMATNKDDEDRFFPSSGILMFGKQGAGKDNVDYSNVMLTSEEEIKTTNPVATEQYGVVADNLQQQNTAPIVGAVNSQGALPGMVWQNRDVYLQGPIWAKIPHTDGNFHPSPLMGGFGLKHPPPQILIKNTPVPADPPTAFNQAKLNSFITQYSTGQVSVEIEWEPQKENSKRWNPEIQYTSNYYKSTNVDFAVNTEGVYSEPRPIGTRYLTRNL

SEQ ID NO: 462 - DNA, 2217 bp, Adeno-associated virus
atggctgccgatggttatcttccagattggctcgaggacaacctctctgagggcattcgcgagtggtgggacctgaaacctggagccccgaaacccaaagccaaccagcaaaagcaggacgacggccggggtctggtgcttcctggctacaagtacctcggacccttcaacggactcgacaagggggagcccgtcaacgcggcggacgcagcggccctcgagcacgacaaggcctacgaccagcagctcaaagcgggtgacaatccgtacctgcggtataatcacgccgacgccgagtttcaggagcgtctgcaagaagatacgtcttttgggggcaacctcgggcgagcagtcttccaggccaagaagcgggttctcgaacctctcggtctggttgaggaaggcgctaagacggctcctggaaagaagagaccggtagagccgtcaccacagcgttcccccgactcctccacgggcatcggcaagaaaggccagcagcccgccagaaagagactcaatttcggtcagactggcgactcagagtcagtccccgaccctcaacctatcggagaacctccagcagcgccctctagtgtgggatctggtacaatggctgcaggcggtggcgcaccaatggcagacaataacgaaggtgccgacggagtgggtagttcctcgggaaattggcattgcgattccacatggctgggcgacagagtcatcaccaccagcacccgaacctgggccctgcccacctacaacaaccacctctacaagcaaatctccaacgggacctcgggaggcagcaccaacgacaacacctactttggctacagcaccccctgggggtattttgactttaacagattccactgccacttctcaccacgtgactggcagcgactcatcaacaacaactggggattccggcccaagagactcagcttcaagctcttcaacatccaggtcaaagaggtcacgcagaatgaaggcaccaagaccatcgccaatagcctcaccagcaccatccaggtgtttacggactcggaataccagctgccgtacgtcctcggctctgcccaccagggctgcctgcctccgttcccggcggacgtcttcatgattcctcagtacggctacctgactcccaacaacggtagtcaggccgtgggacgttcctccttctactgcctggagtacttcccctctcagatgctgagaacgggcaacaacttttccttcagctacactttcgaggacgtgcctttccacagcagctacgcgcacagccagagtttggacaggctgatgaatcctctcatcgaccagtacctgtactacctgtcaagaacccagtctacgggaggcacagcgggaacccagcagttgctgtcttctcaggccgggcctagcaacatgtcggctcaggccagaaactggctgcctggaccctgctacagacagcagcgcgtctccacgacactgtcgcaaaacaacaacagcaactttgcctggactggtgccaccaagtatcatctgaacggcagagactctctggtgaatccgggcgtcgccatggcaaccaacaaggacgacgaggaccgcttcttcccatccagcggcatcctcatgtttggcaagcagggagctggaaaagacaacgtggactatagcaacgtgatgctaaccagcgaggaagaaatcaagaccaccaaccccgtggccacagaacagtatggcgtggtggctgataacctacagcagcaaaacaccgctcctattgtgggggccgtcaacagccagggagccttacctggcatggtctggcagaaccgggacgtgtacttgcagggtcctatttgggccaagattcctcacacagatggcaactttcacccgtctcctttaatgggcggctttggacttaaacatccgcctcctcagatcctcatcaaaaacactcctgttcctgcggatcctccaacagcgttcaaccaggccaagctgaattctttcatcacgcagtacagcaccggacaagtcagcgtggagatcgagtgggagctgcagaaggagaacagcaagcgctggaacccagagattcagtatacttccaactactacaaatctacaaatgtggactttgctgttaatactgagggtgtttactctgagcctcgccccattggcactcgttacctcacccgtaatctgtaa

SEQ ID NO: 463 - protein, 738 aa, Adeno-associated virus
MAADGYLPDWLEDNLSEGIREWWDLKPGAPKPKANQQKQDDGRGLVLPGYKYLGPFNGLDKGEPVNAADAAALEHDKAYDQQLKAGDNPYLRYNHADAEFQERLQEDTSFGGNLGRAVFQAKKRVLEPLGLVEEGAKTAPGKKRPVEPSPQRSPDSSTGIGKKGQQPARKRLNFGQTGDSESVPDPQPIGEPPAAPSSVGSGTMAAGGGAPMADNNEGADGVGSSSGNWHCDSTWLGDRVITTSTRTWALPTYNNHLYKQISNGTSGGSTNDNTYFGYSTPWGYFDFNRFHCHFSPRDWQRLINNNWGFRPKRLSFKLFNIQVKEVTQNEGTKTIANSLTSTIQVFTDSEYQLPYVLGSAHQGCLPPFPADVFMIPQYGYLTPNNGSQAVGRSSFYCLEYFPSQMLRTGNNFSFSYTFEDVPFHSSYAHSQSLDRLMNPLIDQYLYYLSRTQSTGGTAGTQQLLSSQAGPSNMSAQARNWLPGPCYRQQRVSTTLSQNNNSNFAWTGATKYHLNGRDSLVNPGVAMATNKDDEDRFFPSSGILMFGKQGAGKDNVDYSNVMLTSEEEIKTTNPVATEQYGVVADNLQQQNTAPIVGAVNSQGALPGMVWQNRDVYLQGPIWAKIPHTDGNFHPSPLMGGFGLKHPPPQILIKNTPVPADPPTAFNQAKLNSFITQYSTGQVSVEIEWELQKENSKRWNPEIQYTSNYYKSTNVDFAVNTEGVYSEPRPIGTRYLTRNL

SEQ ID NO: 464 - protein, 738 aa, Adeno-associated virus
MAADGYLPDWLEDNLSEGIREWWDLKPGAPKPKANQQKQDDGRGLVLPGYKYLGPFNGLDKGEPVNAADAAALEHDKAYDQQLKAGDNPYLRYNHADAEFQERLQEDTSFGGNLGRAVFQAKKRVLEPLGLVEEGAKTAPGKKRPVEPSPQRSPDSSTGIGKKGQQPARKRLNFGQTGDSESVPDPQPIGEPPAAPSSVGSGTMAAGGGAPMADNNEGADGVGSSSGNWHCDSTWLGDRVITTSTRTWALPTYNNHLYKQISNGTSGGSTNDNTYFGYSTPWGYFDFNRFHCHFSPRDWQRLINNNWGFRPKRLSFKLFNIQVKEVTQNEGTKTIANNLTSTIQVFTDSEYQLPYVLGSAHQGCLPPFPADVFMIPQYGYLTLNNGSQAVGRSSFYCLEYFPSQMLRTGNNFSFSYTFEDVPFHSSYVHSQSLDRLMNPLIDQYLYYLSRTQSTGGTAGTQQLLFSQAGPSNMSAQARNWLPGPCYRQQRVSTTLSQNNNSNFAWTGATKYHLNGRDSLVNSGVAMATNKDDEDRFFPSSGILMFGKQGAGKDNVDYSNVMLTSEEEIKTTNPVATEQYGVVADNLQQQNTAPIVGAVNSQGALPGMVWQNRDVYLQGPIWAKIPHTDGNFHPSPLMGGFGLKHPPPQILIKNTPVPADPPTAFNQAKLNSFITQYSTGQVSVEIEWELQKENSKRWNPEIQYTSNYYKSTNVDFAVNTEGVYSEPRPIGTRYPTRNL

SEQ ID NO: 465 - DNA, 2217 bp, Adeno-associated virus
atggctgccgatggttatcttccagattggctcgaggacaacctctctgagggcattcgcgagtggtgggacctgaaacctggagccccgaaacccaaagccaaccagcaaaagcaggacgacggccggggtctggtgcttcctggctacaagtacctcggacccttcaacggactcgacaagggggagcccgtcaacgcggcggacgcagcggccctcgagcacgacaaggcctacgaccagcagctcaaagcgggtgacaatccgtacctgcggtataatcacgccgacgccgagtttcaggagcgtctgcaagaagatacgtcttttgggggcaacctcgggcgagcagtcttccaggccaagaagcgggttctcgaacctctcggtctggttgaggaaggcgctaagacggctcctggaaagaagagaccggtagagccgtcaccacagcgttcccccgactcctccacgggcatcggcaagaaaggccagcagcccgccagaaagagactcaatttcggtcagactggcgactcagagtcagtccccgaccctcaacctatcggagaacctccagcagcgccctctagtgtgggatctggtacaatggctgcaggcggtggcgcaccaatggcagacaataacgaaggtgccgacggagtgggtagttcctcgggaaattggcattgcgattccacatggctgggcgacagagtcatcaccaccagcacccgaacctgggccctgcccacctacaacaaccacctctacaagcaaatctccaacgggacctcgggaggcagcaccaacgacaacacctactttggctacagcaccccctgggggtattttgactttaacagattccactgccacttctcaccacgtgactggcagcgactcatcaacaacaactggggattccggcccaagagactcagcttcaagctcttcaacatccaggtcaaagaggtcacgcagaatgaaggcaccaagaccatcgccaataacctcaccagcaccatccaggtgtttacggactcggaataccagctgccgtacgtcctcggctctgcccaccagggctgcctgcctccgttcccggcggacgtcttcatgattcctcagtacggctacctgactctcaacaacggtagtcaggccgtgggacgttcctccttctactgcctggagtacttcccctctcagatgctgagaacgggcaacaacttttccttcagctacactttcgaggacgtgcctttccacagcagctacgtgcacagccagagtttggacaggctgatgaatcctctcatcgaccagtacctgtactacctgtcaagaacccagtctacgggaggcacagcgggaacccagcagttgctgttttctcaggccgggcctagcaacatgtcggctcaggccagaaactggctgcctggaccctgctacagacagcagcgcgtctccacgacactgtcgcaaaacaacaacagcaactttgcctggactggtgccaccaagtatcatctgaacggcagagactctctggtgaattcgggcgtcgccatggcaaccaacaaggacgacgaggaccgcttcttcccatccagcggcatcctcatgtttggcaagcagggagctggaaaagacaacgtggactatagcaacgtgatgctaaccagcgaggaagaaatcaagaccaccaaccccgtggccacagaacagtatggcgtggtggctgataacctacagcagcaaaacaccgctcctattgtgggggccgtcaacagccagggagccttacctggcatggtctggcagaaccgggacgtgtacctgcagggtcctatttgggccaagattcctcacacagatggcaactttcacccgtctcctttaatgggcggctttggacttaaacatccgcctcctcagatcctcatcaaaaacactcctgttcctgcggatcctccaacagcgttcaaccaggccaagctgaattctttcatcacgcagtacagcaccggacaagtcagcgtggagatcgagtgggagctgcagaaggagaacagcaagcgctggaacccagagattcagtatacttccaactactacaaatctacaaatgtggactttgctgttaatactgagggtgtttactctgagcctcgccccattggcactcgttaccccacccgtaatctgtaa

SEQ ID NO: 466 - protein, 734 aa, Adeno-associated virus; identical to SEQ ID NO: 291

SEQ ID NO: 467 - DNA, 2214 bp, Adeno-associated virus
atggctgctgacggttatcttccagattggctcgaggacaacctctctgagggcattcgcgagtggtgggacctgaaacctggagccccgaaacccaaagccaaccagcagaagcaggacgacggccggggtctggtgcttcctggctacaagtacctcggacccttcaacggactcgacaagggggagcccgtcaacgcggcggacgcagcggccctcgagcacgacaaggcctacgaccagcagctcaaagcgggtgacaatccgtacctgcggtataaccacgccgacgccgagtttcaggagcgtctgcaagaagatacgtcttttgggggcaacctcgggcgagcagtcttccaggccaagaagcgggttctcgaacctctcggtctggttgaggaagctgctaagacggctcctggaaagaagagaccggtagaaccgtcacctcagcgttcccccgactcctccacgggcatcggcaagaaaggccagcagcccgctagaaagagactgaactttgggcagactggcgactcagagtcagtccccgaccctcaacctctcggagaaccaccagcaggcccctctggtctgggatctggtacaatggctgcaggcggtggcgctccaatggcagacaataacgaaggcgccgacggagtgggtaatgcctcaggaaattggcattgcgattccacatggctgggcgacagagtcatcaccaccagcacccgaacctgggctttgcccacctacaacaaccacctctacaagcaaatctccagtcagtcagcaggtagcaccaacgacaacgtctacttcggctacagcaccccctgggggtattttgacttcaacagattccactgtcacttctcaccacgtgactggcagcgactcatcaacaacaactggggattccggcccaagaagctcaacttcaagctcttcaacatccaagtcaaggaggtcacgacgaatgacggcgtcacgaccatcgctaataaccttaccagcacggttcaggtcttttcggactcggagtaccagctgccgtacgtcctcggctctgcccaccagggctgcctgcctccgttcccggcggacgtcttcatgattcctcagtacggctacctgactctgaacaatggcagccaatcggtgggacgttcatccttctactgcctggaatacttcccttctcaggtgctgagaacgggtaacaacttcaccttcagttacaccttcgaggacgtgcctttccacagcagctacgcgcacagccagagcctagaccggctgatgaatcccctcatcgaccagtacctgtattacctggctagaacacagagtaacccaggaggcacatctggcaatcgggaactgcagttttaccagggcgggccttccaccatggccgaacaagccaagaactggttacctggaccttgcttccggcaacaaagagtttccaaaacactggatcaaaacaacaacagcaactttgcttggactggtgccaccaaatatcacctgaacggcagaaactcattggtgaatcctggtgtcgccatggcaactcacaaggacgacgaggaccgctttttcccatccagcggagtcctgatttttggaaaaactggagcaaccaacaagactacattggaaaacgtgttaatgacaaatgaagaagaaattcgtcctactaatcctgtggccacagaagaatacgggatagtcagcagcaatttacaagcggccaatactgcagcccagacacaagttgtcaacaaccagggagccttacctggcatggtctggcagaaccgggacgtgtacctgcagggtcccatctgggccaaaattcctcacacagacggcaactttcacccgtctccgctgatgggcggctttggactgaagcatccgcctcctcagatcctgatcaaaaacactcctgttcctgctaatcccccggaggtgtttacgcctgccaagtttgcttctttcatcacacagtacagcaccggccaggtcagcgtggagatcgagtgggagctgcagaaggagaacagcaagcgctggaacccagagattcagtatacctccaattttgacaaacagactggtgtggactttgccgttgacagccagggtgtttattctgagcctcgccccattggtactcgttacctcacccgtaatctgtaa

SEQ ID NO: 468 - protein, 737 aa, Adeno-associated virus
MAADGYLPDWLEDNLSEGIREWWDLKPGAPKPKANQQKQDDGRGLVLPGYKYLGPFNGLDKGEPVNAADAAALEHDKAYDQQLKAGDNPYLRYNHADAEFQERLQEDTSFGGNLGRAVFQAKKRVLEPLGLVEEAAKTAPGKKRPVEPSPQRSPDSSTGIGKKGQQPARKRLNFGQTGDSESVPDPQPLGEPPAGPSGLGSGTMAAGGGAPMADNNEGADGVGNASGNWHCDSTWLGDRVITTSTRTWALPTYNNHLYKQISSQSAGSTNDNVYFGYSTPWGYFDFNRFHCHFSPRDWQRLINNNWGFRPKKLNFKLFNIQVKEVTTNDGVTTIANNLTSTVQVFSDSEYQLPYVLGSAHQGCLPPFPADVFMIPQYGYLTLNNGSQSVGRSSFYCLEYFPSQVLRTGNNFTFSYTFEDVPFHSSYAHSQSLDRLMNPLIDQYLYYLARTQSNPGGTSGNRELQFYQGGPSTMAEQAKNWLPGPCFRQQRVSKTLDQNNNSNFAWTGATKYHLNGRNSLVNPGVAMATHKDDEDRFFPSSGVLIFGKTGATNKTTLENVLMTNEEEIRPTNPVATEEYGIVSSNLQAANTAAQTQVVNNQGALPGMVWQNRDVYLQGPIWAKIPHTDGNFHPSPLMGGFGLKHPPPQILIKNTPVPANPPEVFTPAKFASFITQYSTGQVSVEIEWELQKENSKRWNPEIQYTSNFDKQTGVDFAVDSQGVYSEPRPIGTRYLTRNL

SEQ ID NO: 469 - DNA, 2214 bp, Adeno-associated virus
atggctgccgatggttatcttccagattggctcgaggacaacctctctgagggcattcgcgagtggtgggacctgaaacctggagccccgaaacccaaagccaaccagcaaaagcaggacgacggccggggtctggtgcttcctggctacaagtacctcggacccttcaacggactcgacaagggggagcccgtcaacgcggcggacgcagcggccctcgagcacgacaaggcctacgaccagcagctcaaagcgggtgacaatccgtacctgcggtataatcacgccgacgccgagtttcaggagcgtctgcaagaagatacgtcttttgggggcaacctcgggcgagcagtcttccaggccaagaagcgggttctcgaacctctcggtctggttgaggaaggcgctaagacggctcctggaaagaagagaccggtagagccgtcaccacagcgttcccccgactcctccacgggcatcggcaagaaaggccagcagcccgccagaaagagactcaatttcggtcagactggcgactcagagtcagtccccgaccctcaacctatcggagaacctccagcagcgccctctagtgtgggatctggtacaatggctgcaggcggtggcgcaccaatggcagacaataacgaaggtgccgacggagtgggtagttcctcgggaaattggcattgcgattccacacggctgggcgacagagtcatcaccaccagcacccggacctgggctttgcccacctacaacaaccacctctacaagcaaatctccagtcagtcagcaggtagcaccaacgacaacgtctacttcggctacagcaccccctgggggtattttgacttcaacagattccactgtcacttctcaccacgtgactggcagcggctcatcaacaacaactggggattccggcccaagaagctcaacttcaagctgttcaacatccaggtcaaggaggtcacaacgaatgacggcgtcacgaccatcgccaataaccttaccagcacggttcaggtcttttcggactcggaataccagctgccctacgtcctcggctccgcacaccagggctgcctgcctccgttcccggcggacgtcttcatgattccccagtacggctacctgactctgaacaatggcagccaatcggtgggtcgttcctctttctactgcctggaatatttcccttctcaaatgctgagaacgggcaacaacttcaccttcagctacaccttcgaggacgttcccttccacagcagctacgcacacagccagagcctggaccggctgatgaatcctcttatcgaccagtacctgtattacctggccagaacacagagcaacgcaggaggcacagctggcaatcgggaactgcagttttatcagggcgggcctaccaccatggccgaacaagccaaaaactggctgcctggaccttgcttccggcaacgaagagtctccaagacgctggatcaaaacaacaacagcaactttgcttggactggtgccaccaaataccatctaaatggaagaaattcattggttaatcccggtgtcgccatggcaacccacaaggacgacgaggaacgcttcttcccttcgagcggagtcctgatttttggaaaaactggagcagctaataagactacactggaaaatgtgttaatgacaaatgaagaggaaattcgtcctaccaacccggtagccaccgaggaatacgggactgttagcagcaacctgcaggcggctaacactgcagcccagacacaagttgtcaacaaccagggagccttacctggtatggtctggcagaaccgggacgtgtacctgcagggtcccatctgggccaagattcctcacacggacggcaactttcacccgtctccgctgatgggcggctttggactgaagcatccgcctcctcagatcctgatcaaaaacactcctgttcctgctaatcccccggaggtgtttacgcctgccaagtttgcttctttcatcacacagtacagcaccggccaggtcagcgtggagatcgagtgggagctgcagaaggagaacagcaagcgctggaacccagagattcagtatacctccaattttgacaaacagactggtgtggactttgccgttgacagccagggtgtttattctgagcctcgccccattggtactcgttacctcacccgtaatctgtaa

SEQ ID NO: 470 - protein, 737 aa, Adeno-associated virus
MAADGYLPDWLEDNLSEGIREWWDLKPGAPKPKANQQKQDDGRGLVLPGYKYLGPFNGLDKGEPVNAADAAALEHDKAYDQQLKAGDNPYLRYNHADAEFQERLQEDTSFGGNLGRAVFQAKKRVLEPLGLVEEGAKTAPGKKRPVEPSPQRSPDSSTGIGKKGQQPARKRLNFGQTGDSESVPDPQPIGEPPAAPSSVGSGTMAAGGGAPMADNNEGADGVGSSSGNWHCDSTRLGDRVITTSTRTWALPTYNNHLYKQISSQSAGSTNDNVYFGYSTPWGYFDFNRFHCHFSPRDWQRLINNNWGFRPKKLNFKLFNIQVKEVTTNDGVTTIANNLTSTVQVFSDSEYQLPYVLGSAHQGCLPPFPADVFMIPQYGYLTLNNGSQSVGRSSFYCLEYFPSQMLRTGNNFTFSYTFEDVPFHSSYAHSQSLDRLMNPLIDQYLYYLARTQSNAGGTAGNRELQFYQGGPTTMAEQAKNWLPGPCFRQRRVSKTLDQNNNSNFAWTGATKYHLNGRNSLVNPGVAMATHKDDEERFFPSSGVLIFGKTGAANKTTLENVLMTNEEEIRPTNPVATEEYGTVSSNLQAANTAAQTQVVNNQGALPGMVWQNRDVYLQGPIWAKIPHTDGNFHPSPLMGGFGLKHPPPQILIKNTPVPANPPEVFTPAKFASFITQYSTGQVSVEIEWELQKENSKRWNPEIQYTSNFDKQTGVDFAVDSQGVYSEPRPIGTRYLTRNL

SEQ ID NO: 471 - DNA, 2208 bp, Adeno-associated virus
atggctgccgatggttatcttccagattggctcgaggacactctctctgaaggaataagacagtggtggaagctcaaacctggcccaccaccaccaaagcccgcagagcggcataaggacgacagcaggggtcttgtgcttcctgggtacaagtacctcggacccttcaacggactcgacaagggggagccggtcaacgaggcagacgccgcggccctcgagcacgacaaggcctacgaccggcagctcgacagcggagacaacccgtacctcaagtacaaccacgccgacgcggagtttcaggagcgtcttaaagaagatacgtcttttgggggcaacctcggacgagcagtcttccaggcgaaaaagagggttcttgaacctctgggcctggttgaggaacctgttaagacggctccgggaaaaaagaggccggtagagcactctcctgcggagccagactcctcctcgggaaccggaaaagcgggccagcagcctgcaagaaaaagattgaattttggtcagactggagacgcagactccgtacctgacccccagcctctcggacagccaccagcagccccctctggtttgggatctactacaatggctacaggcagtggcgcaccaatggcagacaataacgagggtgccgatggagtgggtaattcttcaggaaattggcattgcgattcccaatggctgggcgacagagtcatcaccaccagcacccgaacctgggcccagcccacctacaacaaccacctctacaagcaaatctcaagccaatcaggagcctcaaacgacaaccactactttggctacagcaccccttgggggtattttgacttcaacagattccactgccacttttcaccacgtgactggcaaagactcatcaacaacaactggggattccgacccaagagactcaacttcaagctctttaacattcaagtcaaagaggtcacgcagaatgacggtacgacgacgattgccaataaccttaccagcacggttcaggtgtttactgactcggagtaccagctcccgtacgtcctcgggtcggcgcatcaaggatgcctcccgccgtttccagcggacgtcttcatggtcccacagtatggatacctcaccctgaacaacgggagtcaggcggtaggacgctcttccttttactgcctggagtactttccttctcagatgcttcgtactggaaacaactttcagttcagctacacctttgaagacgttcctttccacagcagctacgctcacagccagagtctggatcggctgatgaatcctctgatcgaccagtacctgtattatctgaacaaaacacaatcaaatagtggagctcttcagcagtctcggctactgtttagtcaagctggacccaccagcatgtctcttcaagctaaaaactggctacctggaccttgctacagacagcagcgtctgtcaaagcaggcaaacgacaacaacaacagcaactttccctggactgcggctacaaagtaccacctaaatggccgggactcgttggttaatccaggaccagctatggccagtcacaaagacgatgaagaaaagtttttccccatgcatggaaccctgatatttggtaaacaaggaacaaatgctaacgacgcggatttggacaatgtcatgattacagatgaagaagaaatccgcaccaccaatcccgtggctacggagcagtacggatatgtgtcaaataatttgcaaaactcaaatactggtccaactactggaactgtcaatcaccgaggagcgttacctggcatggtgtggcaggatcgagacgtgtacctgcagggacccatttgggccaagattcctcacaccgatggacactttcatccttctccactgatgggaggttttgggctcaaacacccgcctcctcagatcatgatcaaaaacactcccgttccagccaatcctcccacaaacttcagttctgccaagtttgcttctttcatcacacagtattccacggggcaggtcagcgtggagatcgagtgggagctgcagaaagagaacagcaaacgctggaatcccgaaattcagtacacttccaactacaacaaatctgttaatgtggactttactgtggacactaatggcgtgtattcagagcctcgccccattggcaccagatacctgactcgtaatctgtaa

SEQ ID NO: 472 - protein, 735 aa, Adeno-associated virus
MAADGYLPDWLEDTLSEGIRQWWKLKPGPPPPKPAERHKDDSRGLVLPGYKYLGPFNGLDKGEPVNEADAAALEHDKAYDRQLDSGDNPYLKYNHADAEFQERLKEDTSFGGNLGRAVFQAKKRVLEPLGLVEEPVKTAPGKKRPVEHSPAEPDSSSGTGKAGQQPARKRLNFGQTGDADSVPDPQPLGQPPAAPSGLGSTTMATGSGAPMADNNEGADGVGNSSGNWHCDSQWLGDRVITTSTRTWAQPTYNNHLYKQISSQSGASNDNHYFGYSTPWGYFDFNRFHCHFSPRDWQRLINNNWGFRPKRLNFKLFNIQVKEVTQNDGTTTIANNLTSTVQVFTDSEYQLPYVLGSAHQGCLPPFPADVFMVPQYGYLTLNNGSQAVGRSSFYCLEYFPSQMLRTGNNFQFSYTFEDVPFHSSYAHSQSLDRLMNPLIDQYLYYLNKTQSNSGALQQSRLLFSQAGPTSMSLQAKNWLPGPCYRQQRLSKQANDNNNSNFPWTAATKYHLNGRDSLVNPGPAMASHKDDEEKFFPMHGTLIFGKQGTNANDADLDNVMITDEEEIRTTNPVATEQYGYVSNNLQNSNTGPTTGTVNHRGALPGMVWQDRDVYLQGPIWAKIPHTDGHFHPSPLMGGFGLKHPPPQIMIKNTPVPANPPTNFSSAKFASFITQYSTGQVSVEIEWELQKENSKRWNPEIQYTSNYNKSVNVDFTVDTNGVYSEPRPIGTRYLTRNL

SEQ ID NO: 473 - DNA, 2217 bp, Adeno-associated virus
atggctgccgatggttatcttccagattggctcgaggacaacctctctgagggcattcgcgagtggtgggcgctgaaacctggagccccgaagcccaaagccaaccagcaaaagcaggacgacggccggggtctggtgcttcctggctacaagtacctcggacccttcaacggactcgacaagggggagcccgtcaacgcggcggacgcagcggccctcgagcacgacaaggcctacgaccagcagctgcaggcgggtgacaatccgtacctgcggtataatcacgccgacgccgagtttcaggagcgtctgcaagaagatacgtcttttgggggcaacctcgggcgagcagtcttccaggccaagaagcgggttctcgaacctctcggtctggttgaggaaggcgctaagacggctcctggaaagaagagaccggtagagccgtcaccacagcgttcccccgactcctccacgggcatcggcaagaaaggccagcagcccgccagaaagagactcaatttcggtcagactggcgactcagagtcagtccccgaccctcaacctatcggagaacctccagcagcgccctctagtgtgggatctggtacaatggctgcaggcggtggcgcgccaatggcagacaataacgaaggtgccgacggagtgggtagttcctcgggaaattggcattgcgattccacatggctgggcgacagagtcatcaccaccagcacccgaacctgggccctgcccacctacaacaaccacctctacaagcaaacctccaacgggacctcgggaggcagcaccaacgacaacacctactttggctacagcaccccctgggggtattttgactttaacagattccactgccacttctcaccacgtgactggcagcgactcatcaacaacaactggggattccggcccaagagactcagcttcaagctcttcaacatccaggtcaaagaggtcacgcagaatgaaggcaccaagaccatcgccaataacctcaccagcaccatccaggtgtttacggactcggaataccagctgccgtacgtcctcggctctgcccaccagggctgcctgcctccgttcccggcggacgtcttcatgattcctcagtacggctacctgactctcaacaacggtagtcaggccgtgggacgttcctccttctactgcctggagtacttcccctctcagatgctgagaacgggcaacaacttttccttcagctacactttcgaggacgtgcctttccacagcagctacgcgcacagccagagtttggacaggctgatgaatcctctcatcgaccagtacctgtactacctgtcaagaacccagtctacgggaggcacagcgggaacccagcagttgctgttttctcaggccgggcctagcaacatgtcggctcaggccagaaactggctgcctggaccctgctacagacagcagcgcgtctccacgacactgtcgcaaaacaacaacagcaactttgcctggactggtgccaccaagtatcatctgaacggcagagactctctggtgaatccgggcgtcgccatggcaaccaacaaggacgacgaggaccgcttcttcccatccagcggcatcctcatgtttggcaagcagggagctggaaaagacaacgtggactatagcaacgtgatgctaaccagcgaggaagaaatcaagaccaccaaccccgtggccacagaacagtatggcgtggtggctgataacctacagcagcaaaacaccgctcctattgtgggggccgtcaacagccagggagccttacctggcatggtctggcagaaccgggacgtgtacctgcagggtcctatttgggccaagattcctcacacagatggcaactttcacccgtctcctttaatgggcggctttggacttaaacatccgcctcctcagatcctcatcaaaaacactcctgttcctgcggatcctccaacagcgttcaaccaggccaagctgaattctttcatcacgcagtacagcaccggacaagtcagcgcggagatcgagtgggagctgcagaaggagaacagcaagcgctggaacccagagattcagtatacttccaactactacaaatctacaaatgtggactttgctgttaatactgagggtgtttactctgagcctcgccccattggcactcgttacctcacccgtaatctgtaa

SEQ ID NO: 474 - protein, 738 aa, Adeno-associated virus
MAADGYLPDWLEDNLSEGIREWWALKPGAPKPKANQQKQDDGRGLVLPGYKYLGPFNGLDKGEPVNAADAAALEHDKAYDQQLQAGDNPYLRYNHADAEFQERLQEDTSFGGNLGRAVFQAKKRVLEPLGLVEEGAKTAPGKKRPVEPSPQRSPDSSTGIGKKGQQPARKRLNFGQTGDSESVPDPQPIGEPPAAPSSVGSGTMAAGGGAPMADNNEGADGVGSSSGNWHCDSTWLGDRVITTSTRTWALPTYNNHLYKQTSNGTSGGSTNDNTYFGYSTPWGYFDFNRFHCHFSPRDWQRLINNNWGFRPKRLSFKLFNIQVKEVTQNEGTKTIANNLTSTIQVFTDSEYQLPYVLGSAHQGCLPPFPADVFMIPQYGYLTLNNGSQAVGRSSFYCLEYFPSQMLRTGNNFSFSYTFEDVPFHSSYAHSQSLDRLMNPLIDQYLYYLSRTQSTGGTAGTQQLLFSQAGPSNMSAQARNWLPGPCYRQQRVSTTLSQNNNSNFAWTGATKYHLNGRDSLVNPGVAMATNKDDEDRFFPSSGILMFGKQGAGKDNVDYSNVMLTSEEEIKTTNPVATEQYGVVADNLQQQNTAPIVGAVNSQGALPGMVWQNRDVYLQGPIWAKIPHTDGNFHPSPLMGGFGLKHPPPQILIKNTPVPADPPTAFNQAKLNSFITQYSTGQVSAEIEWELQKENSKRWNPEIQYTSNYYKSTNVDFAVNTEGVYSEPRPIGTRYLTRNL

SEQ ID NO: 475 - DNA, 2217 bp, Adeno-associated virus
atggctgctgacggttatcttccagattggctcgaggacaacctctctgagggcattcgcgagtggtgggacctgaaacctggagcccccaagcccaaggccaaccagcagaagcaggacgacggccggggtctggtgcttcctggctacaagtacctcggacccttcaacggactcgacaagggggagcccgtcaacgcggcggacgcagcggccctcgagcacgacaaggcctacgaccagcagctcaaagcgggtgacaatccgtacctgcggtataatcacgccgacgccgagtttcaggagcgtctgcaagaagatacgtcttttgggggcaacctcgggcgagcagtcttccaggccaagaagcgggttctcgaacctctcggtctggttgaggaagctgctaagacggctcctggaaagaagagaccggtagaaccgtcacctcagcgttcccccgactcctccacgggcatcggcaagaaaggccagcagcccgctagaaagagactgaactttgggcagactggcgactcagagtcagtccccgaccctcaaccaatcggagaacctccagcagcgccctctagtgtgggatctggtacaatggccgcaggcggtggcgcaccaatggcagacaataacgaaggtgccgacggagtgggtagttcctcgggaaattggcattgcgattccacatggctgggcgacagagtcatcaccaccagcacccgaacctgggccctgcccacctacaacaaccacctctacaagcaaatctccaacgggacctcgggaggcagcaccaacgacaacacctactttggctacagcaccccctgggggtattttgactttaacagattccactgccacttctcaccacgtgactggcagcgactcatcaacaacaactggggattccggcccaagagactcagcttcaagctcttcaacatccaggtcaaagaggtcacgcagaatgaaggcaccaagaccatcgccaataacctcaccagcaccatccaggtgtttacggactcggaataccagctgccgtacgtcctcggctctgcccaccagggctgcctgcctccgttcccggcggacgtcttcatgattcctcagtacggctacctgactctcaacaacggtagtcaggccgtgggacgttcctccttctactgcctggagtacttcccctctcagatgctgagaacgggcaacaacttttccttcagctacactttcgaggacgtgcctttccacagcagctacgcgcacagccagagtttggacaggctgatgaatcctctcatcgaccagtacctgtactacctgtcaagaacccagtctacgggaggcacagcgggaacccagcagctgctgttttctcaggccgggcctagcaacatgtcggctcaggccagaaactggctgcctggaccctgctacagacagcagcgcgtctccacgacactgtcgcaaaacaacaacagcaactttgcctggactggtgccaccaagtatcatctgaacggcagagactctctggtgaatccgggcgtcgccatggcaaccaacaaggacgacgaggaccgcttcttcccatccagcggcatcctcatgtttggcaagcagggagctggaaaagacaacgtggactatagcaacgtgatgctaaccagcgaggaagaaatcaagaccaccaaccccgtggccacagaacagtatggcgtggtggctgataacctacagcagcaaaacaccgctcctattgtgggggccgtcaacagccagggagccttacctggcatggtctggcagaaccgggacgtgtacctgcagggtcctatttgggccaagattcctcacacagatggcaactttcacccgtctcctttaatgggcggctttggacttaaacatccgcctcctcagatcctcatcaaaagcactcctgttcctgcggatcctccaacagcgttcaaccaggccaagctgaattctttcatcacgcagtacagcaccggacaagtcagcgtggagatcgagtgggagctgcagaaggagaacagcaagtgctggaacccagagattcagtatacttccaactactacaaatctacaaatgtggactttgctgttaatactgagggtgtttactctgagcctcgccccattggcactcgttacctcacccgtaatctgtaa

SEQ ID NO: 476 - protein, 738 aa, Adeno-associated virus
MAADGYLPDWLEDNLSEGIREWWDLKPGAPKPKANQQKQDDGRGLVLPGYKYLGPFNGLDKGEPVNAADAAALEHDKAYDQQLKAGDNPYLRYNHADAEFQERLQEDTSFGGNLGRAVFQAKKRVLEPLGLVEEAAKTAPGKKRPVEPSPQRSPDSSTGIGKKGQQPARKRLNFGQTGDSESVPDPQPIGEPPAAPSSVGSGTMAAGGGAPMADNNEGADGVGSSSGNWHCDSTWLGDRVITTSTRTWALPTYNNHLYKQISNGTSGGSTNDNTYFGYSTPWGYFDFNRFHCHFSPRDWQRLINNNWGFRPKRLSFKLFNIQVKEVTQNEGTKTIANNLTSTIQVFTDSEYQLPYVLGSAHQGCLPPFPADVFMIPQYGYLTLNNGSQAVGRSSFYCLEYFPSQMLRTGNNFSFSYTFEDVPFHSSYAHSQSLDRLMNPLIDQYLYYLSRTQSTGGTAGTQQLLFSQAGPSNMSAQARNWLPGPCYRQQRVSTTLSQNNNSNFAWTGATKYHLNGRDSLVNPGVAMATNKDDEDRFFPSSGILMFGKQGAGKDNVDYSNVMLTSEEEIKTTNPVATEQYGVVADNLQQQNTAPIVGAVNSQGALPGMVWQNRDVYLQGPIWAKIPHTDGNFHPSPLMGGFGLKHPPPQILIKSTPVPADPPTAFNQAKLNSFITQYSTGQVSVEIEWELQKENSKCWNPEIQYTSNYYKSTNVDFAVNTEGVYSEPRPIGTRYLTRNL

SEQ ID NO: 477 - protein, 738 aa, Adeno-associated virus
MAADGYLPDWLEDNLSEGIREWWDLKPGAPKPKANQQKQDDGRGLVLPGYKYLGPFNGLDKGEPVNAADAAALEHDKAYDQQLKAGDNPYLRYNHADAEFQERLQEDTSFGGNLGRAVFQAKKRVLEPLGLVEEAAKTAPGKKRPVEPSPQRSPDSSTGIGKKGQQPARKRLNFGQTGDSESVPDPQPIGEPPAAPSSVGSGTMAAGGGAPMADNNEGADGVGSSSGNWHCDSTWLGDRVITTSTRTWALPTYNNHLYKQISNGTSGGSTNDNTYFGYSTPWGYFDFNRFHCHFSPRDWQRLINNNWGFRPKRLSFKLFNIQVKEVTQNEGTKTIANNLTSTIQVFTDSEYQLPYVLGSAHQGCLPPFPADVFMIPQYGYLTLNNGSQAVGRSSFYCLEYFPSQMLRTGNNFSFSYTFEDVPFHSSYAHSQSLDRLMNPLIDQYLYYLSRTQSTGGTAGTQQLLFSQAGPSNMSAQARNWLPGPCYRQQRVSTTLSQNNNSNFAWTGATKYHLNGRDSLVNPGVAMATNKDDEDRFFPSSGILMFGKQGAGKDNVDYSNVMLTSEEEIKTTNPVATEQYGVVADNLQQQNTAPIVGAVNSQGALPGMVWQNRDVYLQGPIWAKIPHTDGNFHPSPLMGGFGLKHPPPQILIKSTPVPADPPTAFNQAKLNSFITQYSTGQVSVEIEWELQKENSKRWNPEIQYTSNYYKSTNVDFAVNTEGVYSEPRPIGTRYLTRNL

SEQ ID NO: 478 - DNA, 2217 bp, Adeno-associated virus
atggctgctgacggttatcttccagattggctcgaggacaacctctctgagggcattcgcgagtggtgggacctgaaacctggagcccccaagcccaaggccaaccagcagaagcaggacgacggccggggtctggtgcttcctggctacaagtacctcggacccttcaacggactcgacaagggggagcccgtcaacgcggcggacgcagcggccctcgagcacgacaaggcctacgaccagcagctcaaagcgggtgacaatccgtacctgcggtataaccacgccgacgccgagtttcaggagcgtctgcaagaagatacgtcttttgggggcaacctcgggcgagcagtcttccaggccaagaagcgggttctcgaacctctcggtctggttgaggaagctgctaagacggctcctggaaagaagagaccggtagaaccgtcacctcagcgttcccccgactcctccacgggcatcggcaagaaaggccagcagcccgctagaaagagactgaactttgggcagactggcgactcagagtcagtccccgaccctcaaccaatcggagaaccaccagcaggcccctctggtctgggatctggtacaatggctgcaggcggtggcgcaccaatggctgacaataacgagggcgccgacggagtgggtaatgcctcaggaaattggcattgcgattccacatggctgggcgacagagtcatcaccaccagcacccgaacctgggctttgcccacctacaacaaccacctctacaagcaaatctccagtcagtcagcaggtagcaccaacgacaacgtctacttcggctacagcaccccctgggggtattttgacttcaacagattccactgtcacttctcaccacgtgactggcagcggctcatcaacaacaactggggattccggcccaagaagctcaacttcaagctgttcaacatccaggtcaaggaggtcacaacgaatgacggcgtcacgaccatcgccaataaccctaccagcacggttcaggtcttttcggactcggaataccagctgccctacgtcctcggctccgcacaccagggctgcctgcctccgttcccggcggacgtcttcatgattccccagtacggctacctgactctgaacaatggcagccaatcggtgggtcgttcctctttctactgcctggaatatttcccttctcaaatgctgagaacgggcaacaacttcaccttcagctacaccttcgaggacgttcccttccacagcagctacgcacacagccagagcctggaccggctgatgaatcctcttatcgaccagtacctgtattacctggccagaacacagagcaacgcaggaggcacagctggcaatcgggaactgcagttttatcagggcgggcctaccaccatggccgaacaagccaaaaactggctgcctggaccctgctacagacagcagcgcgtctccacgacactgtcgcaaaacaacaacagcaactttgcctggactggtgccaccaagtatcatctgaacggcagagactctctggtgaatccgggcgtcgccatggcaaccaacaaggacgacgaggaccgcttcttcccatccagcggcatcctcatgtttggcaagcagggagctggaaaagacaacgtggactatagcaacgtgatgctaaccagcgaggaagaaatcaagaccaccaaccccgtggccacagaacagtatggcgtggtggctgataacctacagcagcaaaacaccgctcctattgtgggggccgtcaacagccagggagccttacctggcatggtctggcagaaccgggacgtgtacctgcagggtcctatttgggccaagattcctcacacagatggcaactttcacccgtctcctttaatgggcggctttggacttaaacatccgcctcctcagatcctcatcaaaaacactcctgttcctgcggatcctccaacagcgttcaaccaggccaagctgaattctttcatcacgcagtacagcaccggacaagtcagcgtggagatcgagtgggagctgcagaaggagaacagcaagcgctggaacccagagattcagtatacttccaactactacaaatctacaaatgtggactttgctgttaatactgagggtgtttactctgagcctcgccccattggcactcgttacctcacccgtaatctgtaa

SEQ ID NO: 479 - protein, 738 aa, Adeno-associated virus
MAADGYLPDWLEDNLSEGIREWWDLKPGAPKPKANQQKQDDGRGLVLPGYKYLGPFNGLDKGEPVNAADAAALEHDKAYDQQLKAGDNPYLRYNHADAEFQERLQEDTSFGGNLGRAVFQAKKRVLEPLGLVEEAAKTAPGKKRPVEPSPQRSPDSSTGIGKKGQQPARKRLNFGQTGDSESVPDPQPIGEPPAGPSGLGSGTMAAGGGAPMADNNEGADGVGNASGNWHCDSTWLGDRVITTSTRTWALPTYNNHLYKQISSQSAGSTNDNVYFGYSTPWGYFDFNRFHCHFSPRDWQRLINNNWGFRPKKLNFKLFNIQVKEVTTNDGVTTIANNPTSTVQVFSDSEYQLPYVLGSAHQGCLPPFPADVFMIPQYGYLTLNNGSQSVGRSSFYCLEYFPSQMLRTGNNFTFSYTFEDVPFHSSYAHSQSLDRLMNPLIDQYLYYLARTQSNAGGTAGNRELQFYQGGPTTMAEQAKNWLPGPCYRQQRVSTTLSQNNNSNFAWTGATKYHLNGRDSLVNPGVAMATNKDDEDRFFPSSGILMFGKQGAGKDNVDYSNVMLTSEEEIKTTNPVATEQYGVVADNLQQQNTAPIVGAVNSQGALPGMVWQNRDVYLQGPIWAKIPHTDGNFHPSPLMGGFGLKHPPPQILIKNTPVPADPPTAFNQAKLNSFITQYSTGQVSVEIEWELQKENSKRWNPEIQYTSNYYKSTNVDFAVNTEGVYSEPRPIGTRYLTRNL

SEQ ID NO: 480 - DNA, 2208 bp, Adeno-associated virus
atggctgccgatggttatcttccagattggctcgaggacaacctctctgagggcattcacgagtggtgggacccgaaacctggagccccgaaacccaaagccaaccagcaaaagcaggacgacggccggggtctggtgcttcctggctacaagtacctcggacccttcaacggactcgacaagggggagcccgtcaacgcggcggacgcagcggccctcgagcacgacaaggcctacgaccagcagctcaaagcgggtgacaatccgtacctgcggtataatcacgccgacgccgagtttcaggagcgtctgcaagaagatacgtcttttgggggcaacctcgggcgagcagtcttccaggccaagaagcgggttctcgaacctctcggtctggttgaggaaggcgctaagacggctcctggaaagaagagaccggtagagccgtcaccacagcgttcccccgactcctccacgggcatcggcaagaaaggccagcagcccgccagaaagagactcaatttcggtcagactggcgactcagagtcagtccccgaccctcaacctatcggagaacctccagcagcgccctctagtgtgggatctggtacaatggctgcaggcggtggcgcaccaatggcagacaataacgaaggtgccgacggagtgggtagttcctcgggaaattggcattgcgattccacatggctgggcgacagagtcatcaccaccagcacccgaacctgggccctgcccacccacaacaaccacctctacaagcaaatctccaacgggacctcgggaggcagcaccaacgacaacgtctacttcggctacagcaccccctgggggtattttgacttcaacagattccactgtcacttctcaccacgtgaccggcagcgactcatcaacaacaactggggattccggcccaagagactcagcttcaagctcttcaacatccaggtcaaagaggtcacgcagaatgaaggcaccaagaccatcgccaataacctcaccagcaccatccaggtgtttacggactcggaataccagctgccgtacgtcctcggctctgcccaccagggctgcctgcctccgttcccggcggacgtcttcatgattcctcagtacggctacctgactctcaacaacggtagtcaggccgtgggacgttcctccttctactgcctggagtacttcccctctcagatgctgagaacgggcaacaacttttccttcagctacactttcgaggacgtgcctttccacagcagctacgcgcacagccagagtttggacaggctgatgaatcctctcatcgaccagtacctgtactacctgtcaagaacccagtctacggaaggcacagcgggaacccagcagttgctgttttctcaggccgggcctagcaacatgtcggctcaggccagaaactggctgcctggaccctgctacagacagcagcgcgtctccacgacactgtcgcaaaacaacaacagcaactttgcctggactggtgccaccaagtatcatctgaacggcagagactctctggtgaatccgggcgtcgccatggcaacccacaaggacgacgaggaacgcttcttcccttcgagcggagtcctgatttttggaaaaactggagcagctaataagactacactggaaaatgtgttaatgacaaatgaagaggaaattcgtcctaccaacccggtagccaccgaggaatacgggactgttagcagcaacctgcaggcggctaacactgcagcccagacacaagttgtcaacaaccagggagccttacctggtatggtctggcagaaccgggacgtgtacctgcagggtcccatctgggccaagattcctcacacggacggcaactttcacccgtctccgctgatgggcggctttggactgaagcatcctcagatcctgatcaaaaacactcctgttcctgctaatcccccggaggtgtttacgcctgccaagtttgcttctttcatcacacagtacagcaccggccaggtcagcgtggagatcgagtgggagctgcagaaggagaacagcaagcgctggaacccagagattcagtatacctccaattttgacaaacagactggtgtggactttgccgttgacagccagggtgtttattctgagcctcgccccattggtactcgttacctcacccgtaatctgtaa

SEQ ID NO: 481 - protein, 735 aa, Adeno-associated virus
MAADGYLPDWLEDNLSEGIHEWWDPKPGAPKPKANQQKQDDGRGLVLPGYKYLGPFNGLDKGEPVNAADAAALEHDKAYDQQLKAGDNPYLRYNHADAEFQERLQEDTSFGGNLGRAVFQAKKRVLEPLGLVEEGAKTAPGKKRPVEPSPQRSPDSSTGIGKKGQQPARKRLNFGQTGDSESVPDPQPIGEPPAAPSSVGSGTMAAGGGAPMADNNEGADGVGSSSGNWHCDSTWLGDRVITTSTRTWALPTHNNHLYKQISNGTSGGSTNDNVYFGYSTPWGYFDFNRFHCHFSPRDRQRLINNNWGFRPKRLSFKLFNIQVKEVTQNEGTKTIANNLTSTIQVFTDSEYQLPYVLGSAHQGCLPPFPADVFMIPQYGYLTLNNGSQAVGRSSFYCLEYFPSQMLRTGNNFSFSYTFEDVPFHSSYAHSQSLDRLMNPLIDQYLYYLSRTQSTEGTAGTQQLLFSQAGPSNMSAQARNWLPGPCYRQQRVSTTLSQNNNSNFAWTGATKYHLNGRDSLVNPGVAMATHKDDEERFFPSSGVLIFGKTGAANKTTLENVLMTNEEEIRPTNPVATEEYGTVSSNLQAANTAAQTQVVNNQGALPGMVWQNRDVYLQGPIWAKIPHTDGNFHPSPLMGGFGLKHPQILIKNTPVPANPPEVFTPAKFASFITQYSTGQVSVEIEWELQKENSKRWNPEIQYTSNFDKQTGVDFAVDSQGVYSEPRPIGTRYLTRNL

SEQ ID NO: 482 - protein, 738 aa, Adeno-associated virus
MAADGYLPDWLEDNLSEGIREWWDLKPGAPKPKANQQKQDDGRGLVLPGYKYLGPFNGLDKGEPVNAADAAALEHDKAYDQQLKAGDNPYLRYNHADAEFQERLQEDTSFGGNLGRAVFQAKKRVLEPLGLVEEGAKTAPGKKRPVEPSPQRSPDSSTGIGKKGQQPARKRLNFGQTGDSESVPDPQPIGEPPAAPSSVGSGTMAAGGGAPMADNNEGADGVGSSSGNWHCDSTWLGDRVITTSTRTWALPTYNNHLYKQISNGTSGGSTNDNTYFGYSTPWGYFDFNRFHCHFSPRDWQRPINNNWGFRPKRLSFKLFNIQVKEVTQNEGTKTIANNLTSTIQVFTDSEYQLPYVLGSAHQGCLPPFPADVFMIPQYGYLTLNNGSQAVGRSSFYCLEYFPSQMLRTGNNFSFSYPFEDVPFHSSYAHSQSLDRLMNPLIDQYLYYLSRTQSTGGTAGTQQLLFSQAGPSNMSAQARNWLPGPCYRQQRVSTTLSQNNNSNFAWTGATKYHLNGRDSLVNPGVAMATNKDDEDRFFPSSGILMFGKQGAGKDNVDYSNVMLTSEEEIKTTNPVATEQYGVVADNLQQQDTAPIVGAVNSQGALPGMVWQNRDVYLQGPIWAKIPHTDGNFHPSPLMGGFGLKHPPPQVLIKNTPVPADPPTAFNQAKLNSFITQYSTGQVSVEIEWELQKENSKRWNPEIQYTSNYYKSTNVDFAVNTEGVYSEPRPIGTRYLTRNL

SEQ ID NO: 483 - DNA, 2217 bp, Adeno-associated virus
atggctgccgatggttatcttccagattggctcgaggacaacctctctgagggcattcgcgagtggtgggacctgaaacctggagccccgaaacccaaggccaaccagcaaaagcaggacgacggccggggtctggtgcttcctggctacaagtacctcggacccttcaacggactcgacaagggggagcccgtcaacgcggcggacgcagcggccctcgagcacgacaaggcctacgaccagcagctcaaagcgggtgacaatccgtacctgcggtataatcacgccgacgccgagtttcaggagcgtctgcaagaagatacgtcttttgggggcaacctcgggcgagcagtcttccaggccaagaagcgggttctcgaacctctcggtctggttgaggaaggcgctaagacggctcctggaaagaagagaccggtagagccgtcaccacagcgttcccccgactcctccacgggcatcggcaagaaaggccagcagcccgccagaaagagactcaatttcggtcagactggcgactcagagtcagtccccgaccctcaacctatcggagaacctccagcagcgccctctagtgtgggatctggtacaatggctgcaggcggtggcgcaccaatggcagacaataacgaaggtgccgacggagtgggtagttcctcgggaaattggcattgcgattccacatggctgggcgacagagtcatcaccaccagcacccgaacctgggccctgcccacctacaacaaccacctctacaagcaaatctccaacgggacctcgggaggcagcaccaacgacaacacctactttggctacagcaccccctgggggtattttgactttaacagattccactgccacttctcaccacgtgactggcagcgacccatcaacaacaactggggattccggcccaagagactcagcttcaagctcttcaacatccaggtcaaagaggtcacgcagaatgaaggcaccaagaccatcgccaataacctcaccagcaccatccaggtgtttacggactcggaataccagctgccgtacgtcctcggctctgcccaccagggctgcctgcctccgttcccggcggacgtcttcatgattcctcagtacggctacctgactctcaacaacggtagtcaggccgtgggacgttcctccttctactgcctggagtacttcccctctcagatgctgagaacgggcaacaacttttccttcagctaccctttcgaggacgtgcctttccacagcagctacgcgcacagccagagtttggacaggctgatgaatcctctcatcgaccagtacctgtactacctgtcaagaacccagtctacgggaggcacagcgggaacccagcagttgctgttttctcaggccgggcctagcaacatgtcggctcaggccagaaactggctgcctggaccctgctacagacagcagcgcgtctccacgacactgtcgcaaaacaacaacagcaactttgcctggactggtgccaccaagtatcatctgaacggcagagactctctggtgaatccgggcgtcgccatggcaaccaacaaggacgacgaggaccgcttcttcccatccagcggcatcctcatgtttggcaagcagggagctggaaaagacaacgtggactatagcaacgtgatgctaaccagcgaggaagaaatcaagaccaccaaccccgtggccacagaacagtatggcgtggtggctgataacctacagcagcaagacaccgctcctattgtgggggccgtcaacagccagggagccttacctggcatggtctggcagaaccgggacgtgtacctgcagggtcctatttgggccaagattcctcacacagatggcaactttcacccgtctcctttaatgggcggctttggacttaaacatccgcctcctcaggtcctcatcaaaaacactcctgttcctgcggatcctccaacagcgttcaaccaggccaagctgaattctttcatcacgcagtacagcaccggacaagtcagcgtggagatcgagtgggagctgcagaaggagaacagcaagcgctggaacccagagattcagtatacttccaactactacaaatctacaaatgtggactttgctgttaatactgagggtgtttactctgagcctcgccccattggcactcgttacctcacccgtaatctgtaa

SEQ ID NO: 484 - DNA, 2214 bp, Adeno-associated virus
atggctgctgacggttatcttccagattggctcgaggacaacctctctgagggcattcgcgagtggtgggacctgaaacctggagcccccaagcccaaggccaaccagcagaagcaggacgacggccggggtctggtgcttcctggctacaagtacctcggacccttcaacggactcgacaagggggagcccgtcaacgcggcggacgcagcggccctcgagcacgacaaggcctacgaccagcagctcaaagcgggtgacaatccgtacctgcggtataaccacgccgacgccgagttccaggagcgtctgcaagaagatacgtcttttgggggcaacctcgggcgagcagtcttccaggccaagaagcgggttctcgaacctctcggtctggctgaggaagctgctaagacggctcctggaaagaagagaccggtagaaccgtcacctcagcgttcccccgactcctccacgggcatcggcaagaaaggccagcagcccgctagaaagagactgaactttgggcagactggcgactcagagtcagtccccgaccctcaaccaatcggagagccaccagcaggcccctctggtctgggatctggtacaatggctgcaggcggtggcgcaccaatggctgacaataacaagggcgccgacggagtgggtaatgcctcaggaaattggcattgcgattccacatggctgggcgacagagtcatcaccaccagcacccgaacctgggctttgcccacctacaacaaccacctctacaagcaaatctccagtcagtcagcaggtagcaccaacgacaacgtctacttcggctacagcaccccctgggggtattttgacttcaacagattccactgtcacttctcaccacgtgactggcagcggctcatcaacaacaactggggattccggcccaagaagctcaacttcaagctgttcaacatccaggtcaaggaggtcacaacgggtgacggcgtcacgaccatcgccaataaccttaccagcacggttcaggtcttttcggactcggaataccagctgccctacgtcctcggctccgcacaccagggctgcctgcctccgttcccggcggacgtcttcatgattccccagtacggctacctgactctgaacaatgacagccaatcggtgggtcgttcctctttctactgcctggaatatttcccttctcaaatgctgagaacgggcaacaacttcaccttcagctacaccttcgaggacgttcccttccacagcagctacgcacacagccagagcctggaccggctgatgaatcctcttatcgaccagtacctgtattacctggccagaacacagagcaacgcaggaggcacagctggcaatcgggaactgcagttttatcagggcgggcctaccaccatggccgaacaagccaaaaactggctgcctggaccttgcttccggcaacaaagagtctccaagacgctggatcaaaacaacaacagcaactttgcttggactggtgccaccaaataccatctaaatggaagaaattcattggttaatcccggtgtcgccatggcaacccacaaggacgacgaggaacgcttcttcccttcgagcggagtcctgatttttggaaaaactggagcagctaataagactacactggaaaatgtgttaatgacaaatgaagaggaaattcgtcctaccaacccggtagccaccgaggaatacgggactgttagcagcaacctgcaggcggctaacactgcagcccagacacaagttgtcaacaaccagggagccttacctggtatggtctggcagaaccgggacgtgtacctgcagggtcccatctgggccaagattcctcacacggacggcaactttcacccgtctccgctgatgggcggctttggactgaagcatccgcctcctcagatcctgatcaaaaacactcctgttcctgctaatcccccggaggtgtttacgcctgccaagtttgcttctttcatcacacagtacagcaccggccaggtcagcgtggagatcgagtgggagctgcagaaggagaacagcaagcgctggaacccagagattcagtatacctccaattttgacaaacagactggtgtggactttgccgttgacagccagggtgtttattctgagcctcgccccattggtactcgttacctcacccgtaatctgtaa

SEQ ID NO: 485 - protein, 737 aa, Adeno-associated virus
MAADGYLPDWLEDNLSEGIREWWDLKPGAPKPKANQQKQDDGRGLVLPGYKYLGPFNGLDKGEPVNAADAAALEHDKAYDQQLKAGDNPYLRYNHADAEFQERLQEDTSFGGNLGRAVFQAKKRVLEPLGLAEEAAKTAPGKKRPVEPSPQRSPDSSTGIGKKGQQPARKRLNFGQTGDSESVPDPQPIGEPPAGPSGLGSGTMAAGGGAPMADNNKGADGVGNASGNWHCDSTWLGDRVITTSTRTWALPTYNNHLYKQISSQSAGSTNDNVYFGYSTPWGYFDFNRFHCHFSPRDWQRLINNNWGFRPKKLNFKLFNIQVKEVTTGDGVTTIANNLTSTVQVFSDSEYQLPYVLGSAHQGCLPPFPADVFMIPQYGYLTLNNDSQSVGRSSFYCLEYFPSQMLRTGNNFTFSYTFEDVPFHSSYAHSQSLDRLMNPLIDQYLYYLARTQSNAGGTAGNRELQFYQGGPTTMAEQAKNWLPGPCFRQQRVSKTLDQNNNSNFAWTGATKYHLNGRNSLVNPGVAMATHKDDEERFFPSSGVLIFGKTGAANKTTLENVLMTNEEEIRPTNPVATEEYGTVSSNLQAANTAAQTQVVNNQGALPGMVWQNRDVYLQGPIWAKIPHTDGNFHPSPLMGGFGLKHPPPQILIKNTPVPANPPEVFTPAKFASFITQYSTGQVSVEIEWELQKENSKRWNPEIQYTSNFDKQTGVDFAVDSQGVYSEPRPIGTRYLTRNL

SEQ ID NO: 486 - DNA, 2217 bp, Adeno-associated virus
atggctgccgatggttatcttccagattggctcgaggacaacctctctgagggcattcgcgagtggtgggacctgaaacctggagccccgaaacccaaagccaaccagcaaaagcaggacgacggccggggtctggtgcttcctggctacaagtacctcggacccttcaacggactcgacaagggggagcccgtcaacgcggcggacgcagcggccctcgagcacgacaaggcctacgaccagcagctcaaagcgggtgacaatccgtacctgcggtataatcacgccgacgccgagtttcaggagcgtctgcaagaagatacgtcttttgggggcaacctcgggcgagcagtcttccaggccaagaagcgggttctcgaacctctcggtctggttgaggaaggcgctaagacggctcctggaaagaagagaccggtagagccgtcaccacagcgttcccccgactcctccacgggcatcggcaagaaaggccagcagcccgccagaaagagactcaatttcggtcagactggcgactcagagtcagtccccgaccctcaacctatcggagaacctccagcagcgccctctagtgtgggatctggtacaatggctgcaggcggtggcgcaccaatggcagacaataacgaaggtgccgacggagtgggtagttcctcgggaaattggcattgcgattccacatggctgggcgacagagtcatcaccaccagcacccgaacctgggccctgcccacctacaacaaccacctctacaagcaaatctccaacgggacctcgggaggcagcaccaacgacaacacctactttggctacagcaccccctgggggtattttgactttaacagattccactgccacttctcaccacgtgactggcagcgactcatcaacaacaactggggattccggcccaagagactcagcttcaagctcttcaacatccaggtcaaagaggtcacgcagaatgaaggcaccaagaccatcgccaataacctcaccagcaccatccaggtgtttacggactcggaataccagctgccgtacgtcctcggctctgcccaccagggctgcctgcctccgttcccggcggacgtcttcatgattcctcagtacggctacctgactctcaacaacggtagtcaggccgtgggacgttcctccttctactgcctggagtacttcccctctcagatgctgagaacgggcaacaacttttccttcagctacactttcgaggacgtgcctttccacagcagctacgcgcacagccagagtttggacaggctgatgaatcctctcatcgaccagtacctgtactacctgtcaagaacccagtctacgggaggcacagcgggaacccagcagttgctgttttctcaggccgggcctagcaacatgtcggctcaggccagaaactggctgcctggaccctgctacagacagcagcgcgtctccacgacactgtcgcaaaacaacaacagcaactttgcctggactggtgccaccaagtatcatctgaacggcagagactctctggtgaatccgggcgtcgccatggcaaccaacaaggacgacgaggaccgcttcttcccatccagcggcatcctcatgtttggcaagcagggagctggaaaagacaacgtggactatagcaacgtgatgctaaccagcgaggaagaaatcaagaccaccaaccccgtggccacagaacagtatggcgtggtggctgataacctacagcagcaaaacaccgctcctattgtgggggccgtcaacagccagggagccttacctggcatggtctggcagaaccgggacgtgtacctgcagggtcctatttgggccaagattcctcacacagatggcaactttcacccgtctcctttaatgggcggctttggacttaaacatccgcctcctcagatcctcatcaaaaacactcctgttcctgcggatcctccaacagcgttcaaccaggccaagctgaattctttcatcacgcagtacagcaccggacaagtcagcgtggagatcgtgtgggagctgcagaaggagaacagcaagcgcaggaacccagagattcagtatacttccaactactacaaatctacaaatgtggactttgctgttaatactgagggtgtttactctgagcctcgccccattggcactcgttacctcacccgtaatctgtaa

SEQ ID NO: 487 - protein, 738 aa, Adeno-associated virus
MAADGYLPDWLEDNLSEGIREWWDLKPGAPKPKANQQKQDDGRGLVLPGYKYLGPFNGLDKGEPVNAADAAALEHDKAYDQQLKAGDNPYLRYNHADAEFQERLQEDTSFGGNLGRAVFQAKKRVLEPLGLVEEGAKTAPGKKRPVEPSPQRSPDSSTGIGKKGQQPARKRLNFGQTGDSESVPDPQPIGEPPAAPSSVGSGTMAAGGGAPMADNNEGADGVGSSSGNWHCDSTWLGDRVITTSTRTWALPTYNNHLYKQISNGTSGGSTNDNTYFGYSTPWGYFDFNRFHCHFSPRDWQRLINNNWGFRPKRLSFKLFNIQVKEVTQNEGTKTIANNLTSTIQVFTDSEYQLPYVLGSAHQGCLPPFPADVFMIPQYGYLTLNNGSQAVGRSSFYCLEYFPSQMLRTGNNFSFSYTFEDVPFHSSYAHSQSLDRLMNPLIDQYLYYLSRTQSTGGTAGTQQLLFSQAGPSNMSAQARNWLPGPCYRQQRVSTTLSQNNNSNFAWTGATKYHLNGRDSLVNPGVAMATNKDDEDRFFPSSGILMFGKQGAGKDNVDYSNVMLTSEEEIKTTNPVATEQYGVVADNLQQQNTAPIVGAVNSQGALPGMVWQNRDVYLQGPIWAKIPHTDGNFHPSPLMGGFGLKHPPPQILIKNTPVPADPPTAFNQAKLNSFITQYSTGQVSVEIVWELQKENSKRRNPEIQYTSNYYKSTNVDFAVNTEGVYSEPRPIGTRYLTRNL

SEQ ID NO: 488 - protein, 738 aa, Adeno-associated virus
MAADGYLPDWLEDNLSEGIREWWDLKPGAPKPKANQQKQDDGRGLVLPGYKYLGPFNGLDKGEPVNAADAAALEHDKAYDQQLKAGDNPYLRYNHADAEFQERLQEDTSFGGNLGRAVFQAKKRVLEPLGLVEEGAKTAPGKKRPVEPSPQRSPDSSTGIGKKGQQPARKRLNFGQTGDSESVPDPQPIGEPPAAPSSVGSGTMAAGGGAPMADNNEGADGVGSSSGNWHCDSTWLGDRVITTSTRTWALPTYNNHLYKQISNGTSGGSTNDNTYFGYSTPWGYFDFNRFHCHFSPRDWQRLINNNWGFRPKRLSFKLFNIQVKEVTQNEGTKTIANNLTSTIQVFTDSEYQLPYVLGSAHQGCLPPFPADVFMIPQYGYLTLNNGSQAVGRSSFYCLEYFPSQMLRTGNNFSFSYTFEDVPFHSSYAHSQSLDRLMNPLIDQYLYYLSRTQSTGGTAGTQQLLFSQAGPSNMSAQARNWLPGPCYRQQRVSTTLSQNNNSNFAWTGATKYHLNGRDSLVNPGVAMATNKDDEDRFFPSSGILMFGKQGAGKDNVDYSNVMLTSEEEIKTTNPVATEQYGVVADNLQQQNTAPIVGAVNSQGALPGMVWQNRDVYLQGPIWAKIPHTDGNFHPSPLMGGFGLKHPPPQILIKNTPVPADPPTAFNQAKLNSFITQYSTGQVSVEIEWELQKENSKRWNPEIQYTSNYYKSTNVDFAVNTEGVYSEPRPIGTRYLTRNL

SEQ ID NO: 489 - protein, 738 aa, Adeno-associated virus
MAADGYLPDWLEDNLSEGIREWWDLKPGAPKPKANQQKQDDGRGLVLPGYKYLGPFNGLDKGEPVNAADAAALEHDKAYDQQLKAGDNPYLRYNHADAEFQERLQEDTSFGGNLGRAVFQAKKRVLEPLGLVEEGAKTAPGKKRPVEPSPQRSPDSSTGIGKKGQQPARKRLNFGQTGDSESVPDPQPIGEPPAAPSSVGSGTMAAGGGAPMADNNEGADGVGSSSGNWHCDSTWLGDRVITTSTRTWALPTYNNHLYKQISNGTSGGSTNDNTYFGYSTPWGYFDFNRFHCHFSPRDWQRLINNNWGFRPKRLSFKLFNIQVKEVTQNEGTKTIANNLTSTIQVFTDSEYQLPYVLGSAHQGCLPPFPADVFMIPQYGYLTLNNGSQAVGRSSFYCLEYFPSQMLRTGNNFSFSYTFEDVPFHSSYAHSQSLDRLMNPLIDQYLYYLSRTQSTGGTAGTQQLLFSQAGPSNMSAQARNWLPGPCYRQQRVSTTLSQNNNSNFAWTGATKYHLNGRDSLVNPGVAMATNKDDEDRFFPSSGILMFGKQGAGKDNVDYSNVMLTSEEEIKTTNPVATEQYGVVADNLQQQNTAPIVGAVNSQGALPGMVWQNRDVYLQGPIWAKIPHTDGNFHPSPLMGGFGLKHPPPQILIKNTPVPADPPTAFNQAKLNSFITQYSTGQVSVEIVWELQKENSKRWNPEIQYTSNYYKSTNVDFAVNTEGVYSEPRPIGTRYLTRNL

SEQ ID NO: 490 - protein, 738 aa, Adeno-associated virus; identical to SEQ ID NO: 488

SEQ ID NO: 491 - DNA, 2214 bp, Adeno-associated virus
atggctgctgacggttatcttccagattggctcgaggacaacctctctgagggcattcgcgagtggtgggacctgaaacctggagcccccaagcccaaggccaaccagcagaagcaggacgacggccggggtctggtgcttcctggctacaagtacctcggacccttcaacggactcgacaagggggagcccgtcaacgcggcggacgcagcggccctcgagcacgacaaggcctacgaccagcagctcaaagcgggtgacaatccgtacctgcggtataaccacgccgacgccgagtttcaggagcgtctgcaagaagatacgtcttttgggggcaacctcgggcgagcagtcttccaggccaagaagcgggttctcgaacctctcggtctggttgaggaagctgctaagacggctcctggaaagaagagaccggtagaaccgtcacctcagcgttcccccgactcctccacgggcatcggcaagaaaggccagcagcccgctagaaagagactgaactttgggcagactggcgactcagagtcagtccccgaccctcaaccaatcggagaaccaccagcaggcccctctggtctgggatctggtacaatggctgcaggcggtggcgctccaatggcagacaataacgaaggcgccgacggagtgggtaatgcctcaggaaattggcattgcgattccacatggctgggcgacagagtcatcaccaccagcacccgaacctgggctttgcccacctacaacaaccacctctacaagcaaatctccagtcagtcagcaggtagcaccaacgacaacgtctacttcggctacagcaccccctgggggtattttgacttcaacagattccactgtcacttctcaccacgtgactggcagcggctcatcaacaacaactggggattccggcccaagaagctcaacttcaagctgttcaacatccaggtcaaggaggtcacaacgaatgacggcgtcacgaccatcgccaataaccttaccagcacggttcaggtcttttcggactcggaataccagctgccctacgtcctcggctccgcacaccagggctgcctgcctccgttcccggcggacgtcttcatgattccccagtacggctacctgactctgaacaatggcagccaatcggtgggtcgttcctctttctactgcctggaatatttcccttctcaaatgctgagaacgggcaacaacttcaccttcagctacaccttcgaggacgttcccttccacagcagctacgcacacagccagagcctggaccggctgatgaatcctcttatcgaccagtacctgtattacctggccagaacacagagcaacgcaggaggcacagctggcaatcgggaactgcagttttatcagggcgggcctaccaccatggccgaacaagccaaaaactggctgcctagaccttgcttccggcaacaaagagtctccaagacgctggatcaaaacaacaacagcaactttgcttggactggtgccaccaaataccatctaaatggaagaaattcattggttaatcccggtgtcgccatggcaacccacaaggacgacgaggaacgcttcttcccttcgagcggagtcctgatttttggaaaaactggagcagctaataagactacactggaaaatgtgttaatgacaaatgaagaggaaattcgtcctaccaacccggtagccaccgaggaatacgggactgttagcagcaacctgcaggcggctaacactgcagcccagacacaagttgtcaacaaccagggagccttacctggtatggtctggcagaaccgggacgtgtacctgcagggtcccatctgggccaagattcctcacacggacggcaactttcacccgtctccgctgatgggcggctttggactgaagcatccgcctcctcagatcctgatcaaaaacactcctgttcctgctaatcccccggaggtgtttacgcctgccaagtttgcttctttcatcacacagtacagcaccggccaggtcagcgtggagatcgagtgggagctgcagaaggagaacagcaagcgctggaacccagagattcagtatacctccaattttgacaaacagactggtgtggactttgccgttgacagccagggtgtttattctgagcctcgccccattggtactcgttacctcacccgtaatctgtaa

SEQ ID NO: 492 - protein, 737 aa, Adeno-associated virus
MAADGYLPDWLEDNLSEGIREWWDLKPGAPKPKANQQKQDDGRGLVLPGYKYLGPFNGLDKGEPVNAADAAALEHDKAYDQQLKAGDNPYLRYNHADAEFQERLQEDTSFGGNLGRAVFQAKKRVLEPLGLVEEAAKTAPGKKRPVEPSPQRSPDSSTGIGKKGQQPARKRLNFGQTGDSESVPDPQPIGEPPAGPSGLGSGTMAAGGGAPMADNNEGADGVGNASGNWHCDSTWLGDRVITTSTRTWALPTYNNHLYKQISSQSAGSTNDNVYFGYSTPWGYFDFNRFHCHFSPRDWQRLINNNWGFRPKKLNFKLFNIQVKEVTTNDGVTTIANNLTSTVQVFSDSEYQLPYVLGSAHQGCLPPFPADVFMIPQYGYLTLNNGSQSVGRSSFYCLEYFPSQMLRTGNNFTFSYTFEDVPFHSSYAHSQSLDRLMNPLIDQYLYYLARTQSNAGGTAGNRELQFYQGGPTTMAEQAKNWLPRPCFRQQRVSKTLDQNNNSNFAWTGATKYHLNGRNSLVNPGVAMATHKDDEERFFPSSGVLIFGKTGAANKTTLENVLMTNEEEIRPTNPVATEEYGTVSSNLQAANTAAQTQVVNNQGALPGMVWQNRDVYLQGPIWAKIPHTDGNFHPSPLMGGFGLKHPPPQILIKNTPVPANPPEVFTPAKFASFITQYSTGQVSVEIEWELQKENSKRWNPEIQYTSNFDKQTGVDFAVDSQGVYSEPRPIGTRYLTRNL

SEQ ID NO: 493 - DNA, 2214 bp, Adeno-associated virus
atggctgctgacggttatcttccagattggctcgaggacaacctctctgagggcattcgcgagtggtgggacctgaaacctggagcccccaagcccaaggccaaccagcagaagcaggacgacggccggggtctggtgcttcctggctacaagtacctcggacccttcaacggactcgacaagggggagcccgtcaacgcggcggacgcagcggccctcgagcacgacaaggcctacgaccagcagctcaaagcgggtgacaatccgtacctgcggtataaccatgccgacgccgagtttcaggagcgtctgcaagaagatacgtcttttgggggcaacctcgggcgagcagtcctccaggccaagaagcgggttctcgaacctctcggtctggttgaggaagctgctaagacggctcctggaaagaagagaccggtagaaccgtcacctcagcgttcccccgactcctccacgggcatcggcaagaaaggccagcagcccgctagaaagagactgaactttgggcagactggcgactcagagtcagtccccgaccctcaaccaatcggagaaccaccagcaggcccctctggtctgggatctggtacaatggctgcaggcggtggcgctccaatggcagacaataacgaaggcgccgacggagtgggtaatgcctcaggaaattggcattgcgattccacatggctgggcgacagagtcatcaccaccagcacccgaacctgggctttgcccacctacaacaaccacctctacaagcaaatctccagtcagtcagcaggtagcaccaacgacaacgtctacttcggctacagcaccccctgggggtattttgacttcaacagattccactgtcacttctcaccacgtgactggcagcggctcatcaacaacaactggggattccggcccaagaagctcaacttcaagctgttcaacatccaggtcaaggaggtcacaacgaatgacggcgtcacgaccatcgccaataaccttaccagcacggttcaggtcttttcggactcggaataccagctgccctacgtcctcggctccgcacaccagggctgcctgcctccgttcccggcggacgtcttcatgattccccagtacggctacctgactctgaacaatggcagccaatcggtgggtcgttcctctttctactgcctggaatatttcccttctcaaatgctgagaacgggcaacaacttcaccttcagctacaccttcgaggacgttcccttccacagcagctacgcacacagccagagcctggaccggctgatgaatcctcttatcgaccagtacctgtattacctggccagaacacagagcaacgcaggaggcacagctggcaatcgggaactgcagttttatcagggcgggcctaccaccatggccgaacaagccaaaaactggctgcctggaccttgcttccggcaacaaagagtctccaagacgctggatcaaaacaacaacagcaactttgcttggactggtgccaccaaataccatctaaatggaagaaattcattggttaatcccggtgtcgccatggcaacccacaaggacgacgaggaacgcttcttcccttcgagcggagtcctgatttttggaaaaactggagcagctaataagactacactggaaaatgtgttaatgacaaatgaagaggaaattcgtcctaccaacccggtagccaccgaggaatacgggactgttagcagcaacctgcaggcggctaacactgcagcccagacacaagttgtcaacaaccagggagccttacctggtatggtctggcagaaccgggacgtgtacctgcagggtcccatctgggccaagattcctcacacggacggcaactttcacccgtctccgctgatgggcggctttggactgaagcatccgcctcctcagatcctgatcaaaaacactcctgttcctgctaatcccccggaggtgtttacgcctgccaagtttgcttctttcatcacacagtacagcaccggccaggtcagcgtggagatcgagtgggagctgcagaaggagaacagcaagcgctggaacccagagattcagtatacctccaattttgacaaacagactggtgtggactttgccgttgacagccagggtgtttattctgagcctcgccccattggtactcgttacctcacccgtaatctgtaa

SEQ ID NO: 494 - protein, 737 aa, Adeno-associated virus; identical to SEQ ID NO: 453

SEQ ID NO: 495 - protein, 737 aa, Adeno-associated virus
MAADGYLPDWLEDNLSEGIREWWDLKPGAPKPKANQQKQDDGRGLVLPGYKYLGPFNGLDKGEPVNAADAAALEHDKAYDQQLKAGDNPYLRYNHADAEFQERLQEDTSFGGNLGRAVLQAKKRVLEPLGLVEEAAKTAPGKKRPVEPSPQRSPDSSTGIGKKGQQPARKRLNFGQTGDSESVPDPQPIGEPPAGPSGLGSGTMAAGGGAPMADNNEGADGVGNASGNWHCDSTWLGDRVITTSTRTWALPTYNNHLYKQISSQSAGSTNDNVYFGYSTPWGYFDFNRFHCHFSPRDWQRLINNNWGFRPKKLNFKLFNIQVKEVTTNDGVTTIANNLTSTVQVFSDSEYQLPYVLGSAHQGCLPPFPADVFMIPQYGYLTLNNGSQSVGRSSFYCLEYFPSQMLRTGNNFTFSYTFEDVPFHSSYAHSQSLDRLMNPLIDQYLYYLARTQSNAGGTAGNRELQFYQGGPTTMAEQAKNWLPGPCFRQQRVSKTLDQNNNSNFAWTGATKYHLNGRNSLVNPGVAMATHKDDEERFFPSSGVLIFGKTGAANKTTLENVLMTNEEEIRPTNPVATEEYGTVSSNLQAANTAAQTQVVNNQGALPGMVWQNRDVYLQGPIWAKIPHTDGNFHPSPLMGGFGLKHPPPQILIKNTPVPANPPEVFTPAKFASFITQYSTGQVSVEIEWELQKENSKRWNPEIQYTSNFDKQTGVDFAVDSQGVYSEPRPIGTRYLTRNL

SEQ ID NO: 496 - DNA, 2217 bp, Adeno-associated virus
atggctgccgatggttatcttccagattggctcgaggacaacctctctgagggcattcgcgagtggtgggacctgaaacctggagccccgaaacccaaagccaaccagcaaaagcaggacgacggccggggtctggtgcttcctggctacaagtacctcggacccttcaacggactcgacaagggggagcccgtcaacgcggcggacgcagcggccctcgagcacgacaaggcctacgaccagcagctcaaagcgggtgacaatccgtacctgcggtataatcacgccgacgccgagtttcaggagcgtctgcaagaagatacgtcttttgggggcaacctcgggcgagcagtcttccaggccaagaagcgggttctcgaacctctcggtctggttgaggaaggcgctaagacggctcctggaaagaagagaccggtagagccgtcaccacagcgttcccccgactcctccacgggcatcggcaagaaaggccagcagcccgccagaaagagactcaatttcggtcagactggcgactcagagtcagtccccgaccctcaacctatcggagaacctccagcagcgccctctagtgtgggatctggtacaatggctgcaggcggtggcgcaccaatggcagacaataacgaaggtgccgacggagtgggtagttcctcgggaaattggcattgcgattccacatggctgggcgacagagtcatcaccaccagcacccgaacctgggccctgcccacctacaacaaccacctctacaagcaaatctccaacgggacctcgggaggcagcaccaacgacaacacctactttggctacagcaccccctgggggtattttgactttaacagattccactgccacttctcaccacgtgactggcagcgactcatcaacaacaactggggattccggcccaagagactcagcttcaagctcttcaacatccaggtcaaagaggtcacgcagaatgaaggcaccaagaccatcgccaataacctcaccagcaccatccaggtgtttacggactcggaataccagctgccgtacgtcctcggctctgcccaccagggctgcctgcctccgttcccggcggacgtcttcatgattcctcagtacggctacctgactctcaacaacggtagtcaggccgtgggacgttcctccttctactgcctggagtacttcccctctcagatgctgagaacgggcaacaacttttccttcagctacactttcgaggacgtgcctttccacagcagctacgcgcacagccagagtttggacaggctgatgaatcctctcatcgaccagtacctgtactacctgtcaagaacccagtctacgggaggcacagcgggaacccagcagttgctgttttctcaggccgggcctagcaacatgtcggctcaggccagaaactggctgcctggaccctgctacagacagcagcgcgtctccacgacactgtcgcaaaacaacaacagcaactttgcctggactggtgccaccaagtatcatctgaacggcagagactctctggtgaatccgggcgtcgccatggcaaccaacaaggacgacgaggaccgcttcttcccacccagcggcatcctcatgtttggcaagcagggagctggaaaagacaacgtggactatagcaacgtgatgctaaccagcgaggaagaaatcaagaccaccaaccccgtggccacagaacagtatggcgtggtggctgataacctacagcagcaaaacaccgctcctattgtgggggccgtcaacagccagggagccttacctggcatggtctggcagaaccgggacgtgtacctgcagggtcctatttgggccaagattcctcacacagatggcaactttcacccgtctcctttaatgggcggctttggacttaaacatccgcctcctcagatcctcatcaaaaacactcctgttcctgcggatcctccaacagcgttcaaccaggccaagctgaattctttcatcacgcagtacagcaccggacaagtcagcgtggtgatcgagtgggagctgcagaaggagaacagcaagcgctggaacccagagattcagtatacttccaactactacaaatctacaaatgtggactttgctgttaatactgagggtgtttactctgagcttcgccccattggcactcgttacctcacccgtaatctgtaa

SEQ ID NO: 497 - protein, 738 aa, Adeno-associated virus
MAADGYLPDWLEDNLSEGIREWWDLKPGAPKPKANQQKQDDGRGLVLPGYKYLGPFNGLDKGEPVNAADAAALEHDKAYDQQLKAGDNPYLRYNHADAEFQERLQEDTSFGGNLGRAVFQAKKRVLEPLGLVEEGAKTAPGKKRPVEPSPQRSPDSSTGIGKKGQQPARKRLNFGQTGDSESVPDPQPIGEPPAAPSSVGSGTMAAGGGAPMADNNEGADGVGSSSGNWHCDSTWLGDRVITTSTRTWALPTYNNHLYKQISNGTSGGSTNDNTYFGYSTPWGYFDFNRFHCHFSPRDWQRLINNNWGFRPKRLSFKLFNIQVKEVTQNEGTKTIANNLTSTIQVFTDSEYQLPYVLGSAHQGCLPPFPADVFMIPQYGYLTLNNGSQAVGRSSFYCLEYFPSQMLRTGNNFSFSYTFEDVPFHSSYAHSQSLDRLMNPLIDQYLYYLSRTQSTGGTAGTQQLLFSQAGPSNMSAQARNWLPGPCYRQQRVSTTLSQNNNSNFAWTGATKYHLNGRDSLVNPGVAMATNKDDEDRFFPPSGILMFGKQGAGKDNVDYSNVMLTSEEEIKTTNPVATEQYGVVADNLQQQNTAPIVGAVNSQGALPGMVWQNRDVYLQGPIWAKIPHTDGNFHPSPLMGGFGLKHPPPQILIKNTPVPADPPTAFNQAKLNSFITQYSTGQVSVVIEWELQKENSKRWNPEIQYTSNYYKSTNVDFAVNTEGVYSELRPIGTRYLTRNL

SEQ ID NO: 498 - DNA, 2214 bp, Adeno-associated virus
atggctgctgacggttatcttccagattggctcgaggacaacctctctgagggcattcgcgagtggtgggacctgaaacctggagcccccaagcccaaggccaaccagcagaagcaggacgacggccggggtctggtgcttcctggctacaagtacctcggacccttcaacggactcgacaagggggagcccgtcaacgcggcggacgcagcggccctcgagcacgacaaggcctacgaccagcagctcaaagcgggtgacaatccgtacctgcggtataaccacgccgacgccgagtttcaggagcgtctgcaagaagatacgtcttttgggggcaacctcgggcgagcagtcttccaggccaagaagcgggttctcgaacctctcggtctggttgaggaagctgctaagacggctcctggaaagaagagaccggtagaaccgtcacctcagcgttcccccgactcctccacgggcatcggcaagaaaggccagcagcccgctagaaagagactgaactttgggcagactggcgactcagagtcagtccccgaccctcaaccaatcggagaaccaccagcaggcccctctggtctgggatctggtacaatggctgcaggcggtggcgccccaatggcagacaataacgaaggcgccgacggagtgggtaatgcctcaggaaattggcattgcgattccacatggctgggcgacagagtcatcaccaccagcacccgaacctgggctttgcccacctacaacaaccacctctacaagcaaatctccagtcagtcagcaggtagcaccaacgacaacgtctacttcggctacagcaccccctgggggtattttgacttcaacagattccactgtcacttctcaccacgtgactggcagcggctcatcaacaacaactggggattccggcccaagaagctcaacttcaagctgttcaacatccaggtcaaggaggtcacaacgaatgacggcgtcacgaccatcgccaataaccttaccagcacggttcaggtcttttcggactcggaataccagctgccctacgtcctcggctccgcacaccagggctgcctgcctccgttcccggcggacgtcttcatgattccccagtacggctacctgactctgaacaatggcagccaatcggtgggtcgttcctctttctactgcctggaatatttcccttctcaaatgctgagaacgggcaacaacttcaccatcagctacaccttcgaggacgttcccttccacagcagctacgcacacagccagagcctggaccggctgatgaatcctcttatcgaccagtacctgtattacctggccagaacacagagcaacgcaggaggcacagctggcaatcaggaactgcagttttatcagggcgggcctaccaccatggccgaacaagccaaaaactggctgcctggaccttgcttccggcaacaaagagtctccaagacgctggatcaaaacaacaacagcaactttgcttggactggtgccaccaaataccatctaaatggaagaaattcattggttaatcccggtgtcgccatggcaacccacaaggacgacgaggaacgcttcttcccttcgagcggagtcctgatttttggaaaaactggagcagctaataagactacactggaaaatgtgttaatgacaaatgaagaggaaattcgtcctaccaacccggtagccaccgaggaatacgggactgttagcagcaacctgcaggcggctaacactgcagcccagacacaagttgtcaacaaccagggagccttacctggtatggtctggcagaaccgggacgtgtacctgcagggtcccatctgggccaagattcctcacacagatggcaactttcacccgtctcctttaatgggcggctttggacttaaacatccgcctcctcagatcctcatcaaaaacactcctgttcctgcggatcctccaacagcgttcaaccaggccaagctgaattctttcatcacgcagtacagcaccggacaagtcagcgtggagatcgagtgggagctgcagaaggagaacagcaagcgctggaacccagagattcagtatacttccaactactacaaatctacaaatgtggactttgctgttaatactgagggtgtttactctgagcctcgccccattggcactcgttacctcacccgtaatctgtaa

SEQ ID NO: 499 - protein, 737 aa, Adeno-associated virus
MAADGYLPDWLEDNLSEGIREWWDLKPGAPKPKANQQKQDDGRGLVLPGYKYLGPFNGLDKGEPVNAADAAALEHDKAYDQQLKAGDNPYLRYNHADAEFQERLQEDTSFGGNLGRAVFQAKKRVLEPLGLVEEAAKTAPGKKRPVEPSPQRSPDSSTGIGKKGQQPARKRLNFGQTGDSESVPDPQPIGEPPAGPSGLGSGTMAAGGGAPMADNNEGADGVGNASGNWHCDSTWLGDRVITTSTRTWALPTYNNHLYKQISSQSAGSTNDNVYFGYSTPWGYFDFNRFHCHFSPRDWQRLINNNWGFRPKKLNFKLFNIQVKEVTTNDGVTTIANNLTSTVQVFSDSEYQLPYVLGSAHQGCLPPFPADVFMIPQYGYLTLNNGSQSVGRSSFYCLEYFPSQMLRTGNNFTISYTFEDVPFHSSYAHSQSLDRLMNPLIDQYLYYLARTQSNAGGTAGNQELQFYQGGPTTMAEQAKNWLPGPCFRQQRVSKTLDQNNNSNFAWTGATKYHLNGRNSLVNPGVAMATHKDDEERFFPSSGVLIFGKTGAANKTTLENVLMTNEEEIRPTNPVATEEYGTVSSNLQAANTAAQTQVVNNQGALPGMVWQNRDVYLQGPIWAKIPHTDGNFHPSPLMGGFGLKHPPPQILIKNTPVPADPPTAFNQAKLNSFITQYSTGQVSVEIEWELQKENSKRWNPEIQYTSNYYKSTNVDFAVNTEGVYSEPRPIGTRYLTRNL

SEQ ID NO: 500 - DNA, 2217 bp, Adeno-associated virus
atggctgccgatggttatcttccagattggctcgaggacaacctctctgagggcattcgcgagtggtgggacctgaaacctggagccccgaaacccaaagccaaccagcaaaagcaggacgacggccggggtctggtgcttcctggctacaagtacctcggacccttcaacggactcgacaagggggagcccgtcaacgcggcggacgcagcggccctcgagcacgacaaggcctacgaccagcagctcaaagcgggtgacaatccgtacctgcggtataatcacgccgacgccgagtttcaggagcgtctgcaagaagatacgtcttttgggggcaacctcgggcgagcagtcttccaggccaagaagcgggttctcgaacctctcggtctggttgaggaaggcgctaagacggctcctggaaagaagagaccggtagagccgtcaccacagcgttcccccgactcctccacgggcatcggcaagaaaggccagcagcccgccagaaagagactcaatttcggtcagactggcgactcagagtcagtccccgaccctcaacctatcggagaacctccagcagcgccctctagtgtgggatctggtacaatggctgcaggcggtggcgcaccaatggcagacaataacgaaggtgccgacggagtgggtagttcctcgggaaattggcattgcgattccacatggctgggcgacagagtcatcaccaccagcacccgaacctgggccctgcccgcctacaacaaccacctctacaagcaaatctccaacgggacctcgggaggcagcaccaacgacaacacctactttggctacagcaccccctgggggtattttgactttaacagattccactgccacttctcaccacgtgactggcagcgactcatcaacaacaactggggattccggcccaagagactcagcttcaagctcttcaacatccaggtcaaagaggtcacgcagaatgaaggcaccaagaccatcgccaataacctcaccagcaccatccaggtgtttacggactcggaataccagctgccgtacgtcctcggctctgcccaccagggctgcctgcctccgttcccggcggatgtcttcatgattcctcagtacggctacctgactctcaacaacggtagtcaggccgtgggacgttcctccttctactgcctggagtacttcccctctcagatgctgagaacgggcaacaacttttccttcagctacactttcgaggacgtgcctttccacagcagctacgcgcacagccagagtttggacaggctgatgaatcctctcatcgaccagtacctgtactacctgtcaagaacccagtctacgggaggcacagcgggaacccagcagttgctgttttctcaggccgggcctagcaacatgtcggctcaggccagaaactggctgcctggaccctgctacagacagcagcgcgtctccacgacactgtcgcaaaacaacaacagcaactttgcctggactggtgccaccaagtatcatctgagcggcagagactctctggtgaatccgggcgtcgccatggcaaccaacaaggacgacgaggaccgcttcttcccatccagcggcatcctcatgtttggcaagcagggagctggaaaagacaacgtggactatagcaacgtgatgctaaccagcgaggaagaaatcaagaccaccaaccccgtggccacagaacagtatggcgtggtggctgataacctacagcagcaaaacaccgctcctattgtgggggccgtcaacagccagggagccttacctggcatggtctggcagaaccgggacgtgtacctgcagggtcctatttgggccaagattcctcacacagatggcaactttcacccgtctcctttaatgggcggctttggacttaaacatccgcctcctcagatcctcatcaaaaacactcctgttcctgcggatcctccaacagcgttcaaccaggccaagctgaattcttccatcacgcagtacagcaccggacaagtcagcgtggagatcgagtgggagctgcagaaggagaacagcaagcgctggaacccagagattcagtatacttccaactactacaaatctacaaatgtggactttgctgttaatactgagggtgtttactctgagcctcgccccattggcactcgttacctcacccgtaatttgtaa

SEQ ID NO: 501 - protein, 738 aa, Adeno-associated virus
MAADGYLPDWLEDNLSEGIREWWDLKPGAPKPKANQQKQDDGRGLVLPGYKYLGPFNGLDKGEPVNAADAAALEHDKAYDQQLKAGDNPYLRYNHADAEFQERLQEDTSFGGNLGRAVFQAKKRVLEPLGLVEEGAKTAPGKKRPVEPSPQRSPDSSTGIGKKGQQPARKRLNFGQTGDSESVPDPQPIGEPPAAPSSVGSGTMAAGGGAPMADNNEGADGVGSSSGNWHCDSTWLGDRVITTSTRTWALPAYNNHLYKQISNGTSGGSTNDNTYFGYSTPWGYFDFNRFHCHFSPRDWQRLINNNWGFRPKRLSFKLFNIQVKEVTQNEGTKTIANNLTSTIQVFTDSEYQLPYVLGSAHQGCLPPFPADVFMIPQYGYLTLNNGSQAVGRSSFYCLEYFPSQMLRTGNNFSFSYTFEDVPFHSSYAHSQSLDRLMNPLIDQYLYYLSRTQSTGGTAGTQQLLFSQAGPSNMSAQARNWLPGPCYRQQRVSTTLSQNNNSNFAWTGATKYHLSGRDSLVNPGVAMATNKDDEDRFFPSSGILMFGKQGAGKDNVDYSNVMLTSEEEIKTTNPVATEQYGVVADNLQQQNTAPIVGAVNSQGALPGMVWQNRDVYLQGPIWAKIPHTDGNFHPSPLMGGFGLKHPPPQILIKNTPVPADPPTAFNQAKLNSSITQYSTGQVSVEIEWELQKENSKRWNPEIQYTSNYYKSTNVDFAVNTEGVYSEPRPIGTRYLTRNL

SEQ ID NO: 502 - protein, 736 aa, Adeno-associated virus; identical to SEQ ID NO: 2

SEQ ID NO: 503 - DNA, 2217 bp, Adeno-associated virus
atggctgctgacggttatcttccagattggctcgaggacaacctctctgagggcattcgcgagtggtgggacctgaaacctggagcccccaagcccaaggccaaccagcagaagcaggacgacggccggggtctggtgcttcctggctacaagtacctcggacccttcaacggactcgacaagggggagcccgtcaacgcggcggacgcagcggccctcgagcacgacaaggcctacgaccagcagctcaaagcgggtgacaatccgtacctgcggtataaccacgccgacgccgagtttcaggagcgtctgcaagaagatacgtcttttgggggcaacctcgggcgagcagtcttccaggccaagaagcgggttctcgaacctctcggtctggttgaggaagctgctaagacggctcctggaaagaagagaccggtagaaccgtcacctcagcgttcccccgactcctccacgggcatcggcaagaaaggccagcagcccgctaaaaagagactgaactttggtcagactggcgactcagagtcagtccccgaccctcaaccaatcggagaaccaccagcaggcccctctggtctgggatctggtacaatggctgcaggcggtggcgctccaatggcagacaataacgaaggcgccgacggagtgggtagttcctcaggaaattggcattgcgattccacatggctgggcgacagagtcatcaccaccagcacccgaacctgggccctgcccacctacaacaaccacctctacaagcaaatatccaatgggacatcgggaggaagcaccaacgacaacacctacttcggctacagcaccccctgggggtattttgacttcaacagattccactgccacttctcaccacgtgactggcagcgactcatcaacaacaactggggattccggccaaaaagactcagcttcaagctcttcaacatccaggtcaaggaggtcacgcagaatgaaggcaccaagaccatcgccaataaccttaccagcacgattcaggtatttacggactcggaataccagctgccgtacgtcctcggctccgcgcaccagggctgcctgcctccgttcccggcggacgtcttcatgattccccagtacggctaccttacactgaacaatggaagtcaagccgtaggccgttcctccttctactgcctggaatattttccatctcaaatgctgcgaactggaaacaattttgaattcagctacaccttcgaggacgtgcctttccacagcagctacgcacacagccagagcttggaccgactgatgaatcctctcatcgaccagtacctgtactacttatccagaactcagtccacaggaggaactcaaggtacccagcaattgttattttctcaagctgggcctgcaaacatgtcggctcaggctaagaactggctacctggaccttgctaccggcagcagcgagtctctacgacactgtcgcaaaacaacaacagcaactttgcttggactggtgccaccaaatatcacctgaacggaagagactctttggtaaatcccggtgtcgccatggcaacccacaaggacgacgaggaacgcttcttcccgtcgagtggagtcctgatgtttggaaaacagggtgctggaagagacaatgtggactacagcagcgttatgctaaccagcgaagaagaaattaaaaccactaaccctgtagccacagaacaatacggtgtggtggctgacaacttgcagcaaaccaatacagggcctattgtgggaaatgtcaacagccaaggagccttacctggcatggtctggcagaaccgagacgtgtacctgcagggtcccatctgggccaagattcctcacacggacggcaacttccacccttcaccgctaatgggaggatttggactgaagcacccacctcctcagatcctgatcaagaacacgccggtacctgcggatcctccaacaacgttcagccaggcgaaattggcttccttcattacgcagtacagcaccggacaggtcagcgtggaaatcgagtgggagctgcagaaggagaacagcaaacgctggaacccagagattcagtacacttcaaactactacaaatctacaaatgtggactttgctgtcaatacagagggaacttattctgagcctcgccccattggtactcgttacctcacccgtaatctgtaa

SEQ ID NO: 504 - protein, 738 aa, Adeno-associated virus
MAADGYLPDWLEDNLSEGIREWWDLKPGAPKPKANQQKQDDGRGLVLPGYKYLGPFNGLDKGEPVNAADAAALEHDKAYDQQLKAGDNPYLRYNHADAEFQERLQEDTSFGGNLGRAVFQAKKRVLEPLGLVEEGAKTAPGKKRPVEPSPQRSPDSSTGIGKKGQQPARKRLNFGQTGDSESVPDPQPLGEPPAAPSSVGSGTMAAGGGAPMADNNEGADGVGSSSGNWHCDSTWLGDRVITTSTRTWALPTYNNHLYKQISNGTSGGSTNDNTYFGYSTPWGYFDFNRFHCHFSPRDWQRLINNNWGFRPKRLSFKLFNIQVKEVTQNEGTKTIANNLTSTIQVFTDSEYQLPYVLGSAHQGCLPPFPADVFMIPQYGYLTLNNGSQAVGRSSFYCLEYFPSQMLRTGNNFSFSYTFEDVPFHSSYAHSQSLDRLMNPLIDQYLYYLSRTQSTGGTAGTQQLLFSQAGPSNMSAQARNWLPGPCYRQQRVSTTLSQNNNSNFAWTGATKYHLNGRDSLVNPGVAMATNKDDEDRFFPSSGILMFGKQGAGKDNVDYSNVMLTSEEEIKTTNPVATEQYGVVADNLQRQNTAPIVGAVNSQGALPGMVWQNRDVYLQGPIWAKIPHTDGNFHPSPLMGGFGLKHPPPQILIKNTPVPADPPTAFNQAKLNSFITQYSTGQVSVEIEWELQKENSKRWNPEIQYTSNYYKSTNVDFAVNTEGVYSEPRPIGTRYLTRNL

SEQ ID NO: 505 - protein, 736 aa, Adeno-associated virus
MAADGYLPDWLEDNLSEGIREWLNLKPGAPQPKANQQKQDNARGLVLPGYKYLGPFNGLDKGDPVNEADAAALEHDKAYGQQLKAGDNPYLKYNHADAEFQERLQKDTSFGGNLGKAVFQAKKRILEPLGLVETPAKTAPGKKRPVDPSPQRSPDSSSGIGKKSPHPARKRLNFGQTGEAESVPDPQPIGEPPSDPSSVGSGTMAAGGGAPMADNNEGADGVGNSSGNWHCDSTWLGDRVITTSTRTWALPTYNNHLYKQISSQSGATNDNHYFGYSTPWGYFDFNRFHCHFSPRDWQRLINNNWGFRPKRLSFKLFNIQVKEVTQNDGTTTIANNLTSTVQVFTDSEYQLPYVLGSAHQGCLPPFPADVFMIPQYGYLTLNNGSQAVGRSSFYCLEYFPSQMLRTGNNFQFSYTFEDVPFHSSYAHSQSLDRLMNPLIDQYLYYLSKTQGTNATVQGAKLQFSQAGPSNMRDQARNWLPGPCYRQQRVSKTANDNNNSEYAWTGATKYHLNGRDSLVNPGPAMASHKDDEEKFFPMNGTLVFGKNGAGNSNVDIENVMITDEEEIRTTNPVATEQYGVVSDNLQSSNTRPITGDVDSQGVLPGMVWQDRDVYLQGPIWAKIPHTDGHFHPSPLMGGFGLKHPPPQILIKNTPVPANPATTFTPGKFASFITQYSTGQVSVQIEWELQKENSKRWNPEIQYTSNYNKSVNVDFTVDTNGVYSEPRPIGTRYLTRNL

SEQ ID NO: 506 - protein, 736 aa, Adeno-associated virus; identical to SEQ ID NO: 81

SEQ ID NO: 507 - protein, 736 aa, Adeno-associated virus
MAADGYLPDWLEDNLSEGIREWWDLKPGAPKPKANQQKQDDGRGLVLPGYKYLGPFNGLDKGEPVNAADAAALEHDKAYDQQLKAGDNPYLRYNHADAEFQERLQEDTSFGGNLGRAVFQAKKRVLEPLGLVEEGAKTAPGKKRPVEQSPQEPDSSSGIGKTGQQPAKKRLNFGQTGDSESVPDPQPLGEPPAAPSGLGPNTMASGGGAPMADNNEGADGVGNSSGNWHCDSTWLGDRVITTSTRTWALPTYNNHLYKQISNGTSGGSTNDNTYFGYSTPWGYFDFNRFHCHFSPRDWQRLINNNWGFRPKRLNFKLFNIQVKEVTTNEGTKTIANNLTSTVQVFTDSEYQLPYVLGSAHQGCLPPFPADVFMVPQYGYLTLNNGSQALGRSSFYCLEYFPSQMLRTGNNFQFSYTFEDVPFHSSYAHSQSLDRLMNPLIDQYLYYLVRTQTTGTGGTQTLAFSQAGPSSMANQARNWVPGPCYRQQRVSTTTNQNNNSNFAWTGAAKFKLNGRDSLMNPGVAMASHKDDEDRFFPSSGVLIFGKQGAGNDGVDYSQVLITDEEEIKATNPVATEEYGAVAINNQAANTQAQTGLVHNQGVIPGMVWQNRDVYLQGPIWAKIPHTDGNFHPSPLMGGFGLKHPPPQILIKNTPVPADPPLTFNQAKLNSFITQYSTGQVSVEIEWELQKENSKRWNPEIQYTSNYYKSTNVDFAVNTEGVYSEPRPIGTRYLTRNL

SEQ ID NO: 508 - protein, 736 aa, Artificial Sequence; identical to SEQ ID NO: 507
  Description of Artificial Sequence: Synthetic polypeptide

SEQ ID NO: 509 - protein, 736 aa, Artificial Sequence
  Description of Artificial Sequence: Synthetic polypeptide
MAADGYLPDWLEDNLSEGIREWWDLKPGAPKPKANQQKQDDGRGLVLPGYKYLGPFNGLDKGEPVNAADAAALEHDKAYDQQLKAGDNPYLRYNHADAEFQERLQEDTSFGGNLGRAVFQAKKRVLEPLGLVEEGAKTAPGKKRPVEQSPQEPDSSSGIGKTGQQPAKKRLNFGQTGDSESVPDPQPLGEPPAAPSGLGPNTMASGGGAPMADNNEGADGVGNSSGNWHCDSTWLGDRVITTSTRTWALPTYNNHLYKQISNGTSGGSTNDNTYFGYSTPWGYFDFNRFHCHFSPRDWQRLINNNWGFRPKRLNFKLFNIQVKEVTTNEGTKTIANNLTSTVQVFTDSEYQLPYVLGSAHQGCLPPFPADVFMVPQYGYLTLNNGSQALGRSSFYCLEYFPSQMLRTGNNFQFSYTFEDVPFHSSYAHSQSLDRLMNPLIDQYLYYLVRTQTTGTGGTQTLAFSQAGPSSMANQARNWVPGPCYRQQRVSTTTNQNNNSNFAWTGAAKFKLNGRDSLMNPGVAMASHKDDEDRFFPSSGVLIFGKQGAGNDGVDYSQVLITDEEEIKATNPVATEEYGAVAINNQRANTQAQTGLVHNQGVIPGMVWQNRDVYLQGPIWAKIPHTDGNFHPSPLMGGFGLKHPPPQILIKNTPVPADPPLTFNQAKLNSFITQYSTGQVSVEIEWELQKENSKRWNPEIQYTSNYYKSTNVDFAVNTEGVYSEPRPIGTRYLTRNL

SEQ ID NO: 510 - protein, 736 aa, Artificial Sequence
  Description of Artificial Sequence: Synthetic polypeptide
MAADGYLPDWLEDNLSEGIREWWDLKPGAPKPKANQQKQDDGRGLVLPGYKYLGPFNGLDKGEPVNAADAAALEHDKAYDQQLKAGDNPYLRYNHADAEFQERLQEDTSFGGNLGRAVFQAKKRVLEPLGLVEEGAKTAPGKKRPVEQSPQEPDSSSGIGKTGQQPAKKRLNFGQTGDSESVPDPQPLGEPPAAPSGLGPNTMASGGGAPMADNNEGADGVGNSSGNWHCDSTWLGDRVITTSTRTWALPTYNNHLYKQISNGTSGGSTNDNTYFGYSTPWGYFDFNRFHCHFSPRDWQRLINNNWGFRPKRLNFKLFNIQVKEVTTNEGTKTIANNLTSTVQVFTDSEYQLPYVLGSAHQGCLPPFPADVFMVPQYGYLTLNNGSQALGRSSFYCLEYFPSQMLRTGNNFQFSYTFEDVPFHSSYAHSQSLDRLMNPLIDQYLYYLVRTQTTGTGGTQTLAFSQAGPSSMANQARNWVPGPCYRQQRVSTTTNQNNNSNFAWTGAAKFKLNGRDSLMNPGVAMASHKDDEDAFFPSSGVLIFGKQGAGNDGVDYSQVLITDEEEIKATNPVATEEYGAVAINNQAANTQAQTGLVHNQGVIPGMVWQNRDVYLQGPIWAKIPHTDGNFHPSPLMGGFGLKHPPPQILIKNTPVPADPPLTFNQAKLNSFITQYSTGQVSVEIEWELQKENSKRWNPEIQYTSNYYKSTNVDFAVNTEGVYSEPRPIGTRYLTRNL

SEQ ID NO: 511 - DNA, 1803 bp, Bovine adeno-associated virus
acggcgcctgcggcaaaaaagaggcctctagagcagagtcctcaagagccagactcctcgagcggagttggcaagaaaggcaaacagcctgccagaaagagactcaactttgacgacgaacctggagccggagacgggcctcccccagaaggaccatcttccggagctatgtctactgagactgaaatgcgtgcagcagctggcggaaatggtggcgatgcgggacaaggtgccgagggagtgggtaatgcctccggtgattggcattgcgattccacttggtcagagagccacgtcaccaccacctcaacccgcacctgggtcctgccgacctacaacaaccacctgtacctgcggctcggctcgagcaacgccagcgacaccttcaacggattctccaccccctggggatactttgactttaaccgcttccactgccacttctcgccaagagactggcaaaggctcatcaacaaccactggggactgcgccccaaaagcatgcaagtccgcatcttcaacatccaagttaaggaggtcacgacgtctaacggggagacgaccgtatccaacaacctcaccagcacggtccagatctttgcggacagcacgtacgagctcccgtacgtgatggatgcaggtcaggagggcagcttgcctcctttccccaacgacgtgttcatggtgcctcagtacgggtactgcggactggtaaccggaggcagctctcaaaaccagacagacagaaatgccttctactgtctggagtactttcccagccagatgctgagaaccggaaacaactttgagatggtgtacaagtttgaaaacgtgcccttccactccatgtacgctcacagccagagcctggataggctgatgaacccgctgctggaccagtacctgtgggagctccagtctaccacctctggaggaactctcaaccagggcaattcagccaccaactttgccaagctgaccaaaacaaacttttctggctaccgcaaaaactggctcccggggcccatgatgaagcagcagagattctccaagactgccagtcaaaactacaagattccccagggaagaaacaacagtctgctccattatgagaccagaactaccctcgacggaagatggagcaattttgccccgggaacggccatggcaaccgcagccaacgacgccaccgacttctctcaggcccagctcatctttgcggggcccaacatcaccggcaacaccaccacagatgccaataacctgatgttcacttcagaagatgaacttagggccaccaacccccgggacactgacctgtttggccacctggcaaccaaccagcaaaacgccaccaccgttcctaccgtagacgacgtggacggagtcggcgtgtacccgggaatggtgtggcaggacagagacatttactaccaagggcccatttgggccaaaattccacacacggatggacactttcacccgtctcctctcattggcggatttggactgaaaagcccgcctccacaaatattcatcaaaaacactcctgtacccgccaatcccgcaacgaccttctctccggccagaatcaacagcttcatcacccagtacagcaccggacaggtggctgtcaaaatagaatgggaaatccagaaggagcggtccaagagatggaacccagaggtccagttcacgtccaactacggagcacaggactcgcttctctgggctcccgacaacgccggagcctacaaagagcccagggccattggatcccgatacctcaccaaccacctctag

SEQ ID NO: 512 - DNA, 1617 bp, Bovine adeno-associated virus
atgcgtgcagcagctggcggaaatggtggcgatgcgggacaaggtgccgagggagtgggtaatgcctccggtgattggcattgcgattccacttggtcagagagccacgtcaccaccacctcaacccgcacctgggtcctgccgacctacaacaaccacctgtacctgcggctcggctcgagcaacgccagcgacaccttcaacggattctccaccccctggggatactttgactttaaccgcttccactgccacttctcgccaagagactggcaaaggctcatcaacaaccactggggactgcgccccaaaagcatgcaagtccgcatcttcaacatccaagttaaggaggtcacgacgtctaacggggagacgaccgtatccaacaacctcaccagcacggtccagatctttgcggacagcacgtacgagctcccgtacgtgatggatgcaggtcaggagggcagcttgcctcctttccccaacgacgtgttcatggtgcctcagtacgggtactgcggactggtaaccggaggcagctctcaaaaccagacagacagaaatgccttctactgtctggagtactttcccagccagatgctgagaaccggaaacaactttgagatggtgtacaagtttgaaaacgtgcccttccactccatgtacgctcacagccagagcctggataggctgatgaacccgctgctggaccagtacctgtgggagctccagtctaccacctctggaggaactctcaaccagggcaattcagccaccaactttgccaagctgaccaaaacaaacttttctggctaccgcaaaaactggctcccggggcccatgatgaagcagcagagattctccaagactgccagtcaaaactacaagattccccagggaagaaacaacagtctgctccattatgagaccagaactaccctcgacggaagatggagcaattttgccccgggaacggccatggcaaccgcagccaacgacgccaccgacttctctcaggcccagctcatctttgcggggcccaacatcaccggcaacaccaccacagatgccaataacctgatgttcacttcagaagatgaacttagggccaccaacccccgggacactgacctgtttggccacctggcaaccaaccagcaaaacgccaccaccgttcctaccgtagacgacgtggacggagtcggcgtgtacccgggaatggtgtggcaggacagagacatttactaccaagggcccatttgggccaaaattccacacacggatggacactttcacccgtctcctctcattggcggatttggactgaaaagcccgcctccacaaatattcatcaaaaacactcctgtacccgccaatcccgcaacgaccttctctccggccagaatcaacagcttcatcacccagtacagcaccggacaggtggctgtcaaaatagaatgggaaatccagaaggagcggtccaagagatggaacccagaggtccagttcacgtccaactacggagcacaggactcgcttctctgggctcccgacaacgccggagcctacaaagagcccagggccattggatcccgatacctcaccaaccacctctag

SEQ ID NO: 513 - DNA, 1173 bp, Bovine adeno-associated virus
atggcgctggtaagctggctggtggaacatggcatcacttccgagaagcagtggattcaggagaatcaggagagctacctgtccttcaactccacgggaaactctcggagccagattaaagccgcgcttgacaacgcgtcaaaaattatgagtctgaccaaatctgcctcagactatctcgtgggacagactgttccagaggacatttctgaaaacagaatctggcagatttttgatctcaacggctacgacccggcatacgcgggctctgttctctacggctggtgcactcgcgcctttggaaagaggaacaccgtctggctgtatggacccgcgaccaccggaaagaccaacatcgcggaagccatctctcacaccgtgcccttttatggctgtgtgaactggactaatgagaactttccctttaatgactgtgtggaaaaaatgttgatctggtgggaggagggaaagatgaccagcaaggtggtggaacccgccaaggccatcttgggggggtctagagtacgagtggatcaaaaatgtaaatcctctgtacaagtagactctaccccggtgattatcacctccaatactaacatgtgtgtggtggtggatgggaactccacgacctttgaacaccagcagccgctggaagaccgcatgttcagatttgaactcatgcggcggctcccgccagattttggcaagattaccaagcaggaagtcaaagacttttttgcttgggcaaaggtcaaccaggtgccggtgactcacgagtttatggttcccaagaaagtggcgggaactgagagggcggagacttctagaaaacgcccactggatgacgtcaccaataccaactataaaagtccggagaagcgggcccggctctcagttgttcctgagacgcctcgcagttcagacgtgcctgtagagcccgctcctctgcgacctctcaactggtcttccaggtatgaatgcagatgtgactatcatgctaaatttgactctgtaacgggggaatgtgacgagtgtgaatatttgaatcggggcaaaaatggctgtatctttcataatgctacacattgtcaaatttgtcacgctgttcctccatgggaaaaggaaaatgtgtcagattttaatgattttgatgactgtaataaagagcagtaa

SEQ ID NO: 514 - DNA, 1833 bp, Bovine adeno-associated virus
atggctaccttctatgaagtcattgttcgcgttccatttgatgtggaagagcacctgcctggaatttctgacaactttgtagactgggtaactggtcaaatttgggagctgcctcccgagtcagatttgaatttgactctgattgagcagcctcagctgacggtggctgacagaattcgccgcgtgttcctgtacgagtggaacaaattttccaagcaggagagcaaattctttgtgcagtttgaaaagggatctgaatattttcatctgcacacgctcgtggagacctccggcatctcttctatggtccttggccgctacgtgagtcagattcgcgcccagctggtgaaggtggtgttccagaacattgagccgcggattaacgactgggtcgccatcaccaaggtaaagaagggcggagccaataaggtggtggattctgggtatattcccgcctacctgctgccgaaggtccaaccagagcttcagtgggcgtggactaacctcgaagagtataaattggccgccctcaatctggaggagcgcaaacggctcgtcgctcagtttcagcttgagtcctcgcagcgctcgcaagaggcatcttcccagagggacgtttcggctgacccggtcatcaagagcaagacttcccagaaatacatggcgctggtaagctggctggtggaacatggcatcacttccgagaagcagtggattcaggagaatcaggagagctacctgtccttcaactccacgggaaactctcggagccagattaaagccgcgcttgacaacgcgtcaaaaattatgagtctgaccaaatctgcctcagactatctcgtgggacagactgttccagaggacatttctgaaaacagaatctggcagatttttgatctcaacggctacgacccggcatacgcgggctctgttctctacggctggtgcactcgcgcctttggaaagaggaacaccgtctggctgtatggacccgcgaccaccggaaagaccaacatcgcggaagccatctctcacaccgtgcccttttatggctgtgtgaactggactaatgagaactttccctttaatgactgtgtggaaaaaatgttgatctggtgggaggagggaaagatgaccagcaaggtggtggaacccgccaaggccatcttgggggggtctagagtacgagtggatcaaaaatgtaaatcctctgtacaagtagactctaccccggtgattatcacctccaatactaacatgtgtgtggtggtggatgggaactccacgacctttgaacaccagcagccgctggaagaccgcatgttcagatttgaactcatgcggcggctcccgccagattttggcaagattaccaagcaggaagtcaaagacttttttgcttgggcaaaggtcaaccaggtgccggtgactcacgagtttatggttcccaagaaagtggcgggaactgagagggcggagacttctagaaaacgcccactggatgacgtcaccaataccaactataaaagtccggagaagcgggcccggctctcagttgttcctgagacgcctcgcagttcagacgtgcctgtagagcccgctcctctgcgacctctcaactggtcttccaggtatgaatgcagatgtgactatcatgctaaatttgactctgtaacgggggaatgtgacgagtgtgaatatttgaatcggggcaaaaatggctgtatctttcataatgctacacattgtcaaatttgtcacgctgttcctccatgggaaaaggaaaatgtgtcagattttaatgattttgatgactgtaataaagagcagtaa

SEQ ID NO: 515 - DNA, 2211 bp, Bovine adeno-associated virus
atgtcttttgttgaccaccctccagattggttggaatcgatcggcgacggctttcgtgaatttctcggccttgaggcgggtcccccgaaacccaaggccaatcaacagaagcaagataacgctcgaggtcttgtgcttcctgggtacaagtatcttggtcctgggaacggccttgataagggcgatcctgtcaattttgctgacgaggttgcccgagagcacgacctctcctaccagaaacagcttgaggcgggcgataacccttacctcaagtacaaccacgcggacgcagagtttcaggagaaactcgcttctgacacttcttttgggggaaaccttgggaaggctgttttccaggctaaaaagaggattctcgaacctcttggcctggttgagacgccggataaaacggcgcctgcggcaaaaaagaggcctctagagcagagtcctcaagagccagactcctcgagcggagttggcaagaaaggcaaacagcctgccagaaagagactcaactttgacgacgaacctggagccggagacgggcctcccccagaaggaccatcttccggagctatgtctactgagactgaaatgcgtgcagcagctggcggaaatggtggcgatgcgggacaaggtgccgagggagtgggtaatgcctccggtgattggcattgcgattccacttggtcagagagccacgtcaccaccacctcaacccgcacctgggtcctgccgacctacaacaaccacctgtacctgcggctcggctcgagcaacgccagcgacaccttcaacggattctccaccccctggggatactttgactttaaccgcttccactgccacttctcgccaagagactggcaaaggctcatcaacaaccactggggactgcgccccaaaagcatgcaagtccgcatcttcaacatccaagttaaggaggtcacgacgtctaacggggagacgaccgtatccaacaacctcaccagcacggtccagatctttgcggacagcacgtacgagctcccgtacgtgatggatgcaggtcaggagggcagcttgcctcctttccccaacgacgtgttcatggtgcctcagtacgggtactgcggactggtaaccggaggcagctctcaaaaccagacagacagaaatgccttctactgtctggagtactttcccagccagatgctgagaaccggaaacaactttgagatggtgtacaagtttgaaaacgtgcccttccactccatgtacgctcacagccagagcctggataggctgatgaacccgctgctggaccagtacctgtgggagctccagtctaccacctctggaggaactctcaaccagggcaattcagccaccaactttgccaagctgaccaaaacaaacttttctggctaccgcaaaaactggctcccggggcccatgatgaagcagcagagattctccaagactgccagtcaaaactacaagattccccagggaagaaacaacagtctgctccattatgagaccagaactaccctcgacggaagatggagcaattttgccccgggaacggccatggcaaccgcagccaacgacgccaccgacttctctcaggcccagctcatctttgcggggcccaacatcaccggcaacaccaccacagatgccaataacctgatgttcacttcagaagatgaacttagggccaccaacccccgggacactgacctgtttggccacctggcaaccaaccagcaaaacgccaccaccgttcctaccgtagacgacgtggacggagtcggcgtgtacccgggaatggtgtggcaggacagagacatttactaccaagggcccatttgggccaaaattccacacacggatggacactttcacccgtctcctctcattggcggatttggactgaaaagcccgcctccacaaatattcatcaaaaacactcctgtacccgccaatcccgcaacgaccttctctccggccagaatcaacagcttcatcacccagtacagcaccggacaggtggctgtcaaaatagaatgggaaatccagaaggagcggtccaagagatggaacccagaggtccagttcacgtccaactacggagcacaggactcgcttctctgggctcccgacaacgccggagcctacaaagagcccagggccattggatcccgatacctcaccaaccacctctag

SEQ ID NO: 516 - DNA, 4694 bp, Bovine adeno-associated virus
gtggcactcccccccctgtcgcgttcgctcgttcgctggctcgattgggggggtggcagctcaaagagctgccagacgacggccctctgggccgtcgcccccccaatcgagccagcgaacgagcgaacgcgacaggggggggagtgccacactctctagcaagggggttttgtaggtggtgatgtcattgttgatgtcattatagttgtcacgcgatagttaatgattaacagtcatgtgatgtgtgttatccaataggatgaaagcgcgcgaatgagatctcgcgagacttccggggtataaaaggggtgagtgaacgagcccgccgccattctctgctctggactgctagaggaccctcgctgccatggctaccttctatgaagtcattgttcgcgttccatttgatgtggaagagcacctgcctggaatttctgacaactttgtagactgggtaactggtcaaatttgggagctgcctcccgagtcagatttgaatttgactctgattgagcagcctcagctgacggtggctgacagaattcgccgcgtgttcctgtacgagtggaacaaattttccaagcaggagagcaaattctttgtgcagtttgaaaagggatctgaatattttcatctgcacacgctcgtggagacctccggcatctcttctatggtccttggccgctacgtgagtcagattcgcgcccagctggtgaaggtggtgttccagaacattgagccgcggattaacgactgggtcgccatcaccaaggtaaagaagggcggagccaataaggtggtggattctgggtatattcccgcctacctgctgccgaaggtccaaccagagcttcagtgggcgtggactaacctcgaagagtataaattggccgccctcaatctggaggagcgcaaacggctcgtcgctcagtttcagcttgagtcctcgcagcgctcgcaagaggcatcttcccagagggacgtttcggctgacccggtcatcaagagcaagacttcccagaaatacatggcgctggtaagctggctggtggaacatggcatcacttccgagaagcagtggattcaggagaatcaggagagctacctgtccttcaactccacgggaaactctcggagccagattaaagccgcgcttgacaacgcgtcaaaaattatgagtctgaccaaatctgcctcagactatctcgtgggacagactgttccagaggacatttctgaaaacagaatctggcagatttttgatctcaacggctacgacccggcatacgcgggctctgttctctacggctggtgcactcgcgcctttggaaagaggaacaccgtctggctgtatggacccgcgaccaccggaaagaccaacatcgcggaagccatctctcacaccgtgcccttttatggctgtgtgaactggactaatgagaactttccctttaatgactgtgtggaaaaaatgttgatctggtgggaggagggaaagatgaccagcaaggtggtggaacccgccaaggccatcttgggggggtctagagtacgagtggatcaaaaatgtaaatcctctgtacaagtagactctaccccggtgattatcacctccaatactaacatgtgtgtggtggtggatgggaactccacgacctttgaacaccagcagccgctggaagaccgcatgttcagatttgaactcatgcggcggctcccgccagattttggcaagattaccaagcaggaagtcaaagacttttttgcttgggcaaaggtcaaccaggtgccggtgactcacgagtttatggttcccaagaaagtggcgggaactgagagggcggagacttctagaaaacgcccactggatgacgtcaccaataccaactataaaagtccggagaagcgggcccggctctcagttgttcctgagacgcctcgcagttcagacgtgcctgtagagcccgctcctctgcgacctctcaactggtcttccaggtatgaatgcagatgtgactatcatgctaaatttgactctgtaacgggggaatgtgacgagtgtgaatatttgaatcggggcaaaaatggctgtatctttcataatgctacacattgtcaaatttgtcacgctgttcctccatgggaaaaggaaaatgtgtcagattttaatgattttgatgactgtaataaagagcagtaaataaagtgagtagtcatgtcttttgttgaccaccctccagattggttggaatcgatcggcgacggctttcgtgaatttctcggccttgaggcgggtcccccgaaacccaaggccaatcaacagaagcaagataacgctcgaggtcttgtgcttcctgggtacaagtatcttggtcctgggaacggccttgataagggcgatcctgtcaattttgctgacgaggttgcccgagagcacgacctctcctaccagaaacagcttgaggcgggcgataacccttacctcaagtacaaccacgcggacgcagagtttcaggagaaactcgcttctgacacttcttttgggggaaaccttgggaaggctgttttccaggctaaaaagaggattctcgaacctcttggcctggttgagacgccggataaaacggcgcctgcggcaaaaaagaggcctctagagcagagtcctcaagagccagactcctcgagcggagttggcaagaaaggcaaacagcctgccagaaagagactcaactttgacgacgaacctggagccggagacgggcctcccccagaaggaccatcttccggagctatgtctactgagactgaaatgcgtgcagcagctggcggaaatggtggcgatgcgggacaaggtgccgagggagtgggtaatgcctccggtgattggcattgcgattccacttggtcagagagccacgtcaccaccacctcaacccgcacctgggtcctgccgacctacaacaaccacctgtacctgcggctcggctcgagcaacgccagcgacaccttcaacggattctccaccccctggggatactttgactttaaccgcttccactgccacttctcgccaagagactggcaaaggctcatcaacaaccactggggactgcgccccaaaagcatgcaagtccgcatcttcaacatccaagttaaggaggtcacgacgtctaacggggagacgaccgtatccaacaacctcaccagcacggtccagatctttgcggacagcacgtacgagctcccgtacgtgatggatgcaggtcaggagggcagcttgcctcctttccccaacgacgtgttcatggtgcctcagtacgggtactgcggactggtaaccggaggcagctctcaaaaccagacagacagaaatgccttctactgtctggagtactttcccagccagatgctgagaaccggaaacaactttgagatggtgtacaagtttgaaaacgtgcccttccactccatgtacgctcacagccagagcctggataggctgatgaacccgctgctggaccagtacctgtgggagctccagtctaccacctctggaggaactctcaaccagggcaattcagccaccaactttgccaagctgaccaaaacaaacttttctggctaccgcaaaaactggctcccggggcccatgatgaagcagcagagattctccaagactgccagtcaaaactacaagattccccagggaagaaacaacagtctgctccattatgagaccagaactaccctcgacggaagatggagcaattttgccccgggaacggccatggcaaccgcagccaacgacgccaccgacttctctcaggcccagctcatctttgcggggcccaacatcaccggcaacaccaccacagatgccaataacctgatgttcacttcagaagatgaacttagggccaccaacccccgggacactgacctgtttggccacctggcaaccaaccagcaaaacgccaccaccgttcctaccgtagacgacgtggacggagtcggcgtgtacccgggaatggtgtggcaggacagagacatttactaccaagggcccatttgggccaaaattccacacacggatggacactttcacccgtctcctctcattggcggatttggactgaaaagcccgcctccacaaatattcatcaaaaacactcctgtacccgccaatcccgcaacgaccttctctccggccagaatcaacagcttcatcacccagtacagcaccggacaggtggctgtcaaaatagaatgggaaatccagaaggagcggtccaagagatggaacccagaggtccagttcacgtccaactacggagcacaggactcgcttctctgggctcccgacaacgccggagcctacaaagagcccagggccattggatcccgatacctcaccaaccacctctagcccaattctgttgcataccctcaataaaccgtgtattcgtttcagtaaaatactgcctcttgtggtcattcggcgtacaacagcttacaacaacaacaaaacccccttgctagagagtgtggcactcccccccctgtcgcgttcgctcgttcgctggctcgattgggggggtggcagctcaaagagctgccagacgacggccctctgggccgtcgcccccccaatcgagccagcgaacgagcgaacgcgacaggggggggagtgccac

SEQ ID NO: 517 - protein, 390 aa, Bovine adeno-associated virus
MALVSWLVEHGITSEKQWIQENQESYLSFNSTGNSRSQIKAALDNASKIMSLTKSASDYLVGQTVPEDISENRIWQIFDLNGYDPAYAGSVLYGWCTRAFGKRNTVWLYGPATTGKTNIAEAISHTVPFYGCVNWTNENFPFNDCVEKMLIWWEEGKMTSKVVEPAKAILGGSRVRVDQKCKSSVQVDSTPVIITSNTNMCVVVDGNSTTFEHQQPLEDRMFRFELMRRLPPDFGKITKQEVKDFFAWAKVNQVPVTHEFMVPKKVAGTERAETSRKRPLDDVTNTNYKSPEKRARLSVVPETPRSSDVPVEPAPLRPLNWSSRYECRCDYHAKFDSVTGECDECEYLNRGKNGCIFHNATHCQICHAVPPWEKENVSDFNDFDDCNKEQ

SEQ ID NO: 518 - protein, 610 aa, Bovine adeno-associated virus
MATFYEVIVRVPFDVEEHLPGISDNFVDWVTGQIWELPPESDLNLTLIEQPQLTVADRIRRVFLYEWNKFSKQESKFFVQFEKGSEYFHLHTLVETSGISSMVLGRYVSQIRAQLVKVVFQNIEPRINDWVAITKVKKGGANKVVDSGYIPAYLLPKVQPELQWAWTNLEEYKLAALNLEERKRLVAQFQLESSQRSQEASSQRDVSADPVIKSKTSQKYMALVSWLVEHGITSEKQWIQENQESYLSFNSTGNSRSQIKAALDNASKIMSLTKSASDYLVGQTVPEDISENRIWQIFDLNGYDPAYAGSVLYGWCTRAFGKRNTVWLYGPATTGKTNIAEAISHTVPFYGCVNWTNENFPFNDCVEKMLIWWEEGKMTSKVVEPAKAILGGSRVRVDQKCKSSVQVDSTPVIITSNTNMCVVVDGNSTTFEHQQPLEDRMFRFELMRRLPPDFGKITKQEVKDFFAWAKVNQVPVTHEFMVPKKVAGTERAETSRKRPLDDVTNTNYKSPEKRARLSVVPETPRSSDVPVEPAPLRPLNWSSRYECRCDYHAKFDSVTGECDECEYLNRGKNGCIFHNATHCQICHAVPPWEKENVSDFNDFDDCNKEQ

SEQ ID NO: 519 - protein, 538 aa, Bovine adeno-associated virus
MRAAAGGNGGDAGQGAEGVGNASGDWHCDSTWSESHVTTTSTRTWVLPTYNNHLYLRLGSSNASDTFNGFSTPWGYFDFNRFHCHFSPRDWQRLINNHWGLRPKSMQVRIFNIQVKEVTTSNGETTVSNNLTSTVQIFADSTYELPYVMDAGQEGSLPPFPNDVFMVPQYGYCGLVTGGSSQNQTDRNAFYCLEYFPSQMLRTGNNFEMVYKFENVPFHSMYAHSQSLDRLMNPLLDQYLWELQSTTSGGTLNQGNSATNFAKLTKTNFSGYRKNWLPGPMMKQQRFSKTASQNYKIPQGRNNSLLHYETRTTLDGRWSNFAPGTAMATAANDATDFSQAQLIFAGPNITGNTTTDANNLMFTSEDELRATNPRDTDLFGHLATNQQNATTVPTVDDVDGVGVYPGMVWQDRDIYYQGPIWAKIPHTDGHFHPSPLIGGFGLKSPPPQIFIKNTPVPANPATTFSPARINSFITQYSTGQVAVKIEWEIQKERSKRWNPEVQFTSNYGAQDSLLWAPDNAGAYKEPRAIGSRYLTNHL

SEQ ID NO: 520 - protein, 736 aa, Artificial Sequence
  Description of Artificial Sequence: Synthetic polypeptide
MSFVDHPPDWLESIGDGFREFLGLEAGPPKPKANQQKQDNARGLVLPGYKYLGPGNGLDKGDPVNFADEVAREHDLSYQKQLEAGDNPYLKYNHADAEFQEKLASDTSFGGNLGKAVFQAKKRILEPLGLVETPDKTAPAAKKRPLEQSPQEPDSSSGVGKKGKQPARKRLNFDDEPGAGDGPPPEGPSSGAMSTETEMRAAAGGNGGDAGQGAEGVGNASGDWHCDSTWSESHVTTTSTRTWVLPTYNNHLYLRLGSSNASDTFNGFSTPWGYFDFNRFHCHFSPRDWQRLINNHWGLRPKSMQVRIFNIQVKEVTTSNGETTVSNNLTSTVHIFADSTYELPYVMDAGQEGSLPPFPNDVFMVPQYGYCGLVTGGSSQNQTDRNAFYCLEYFPSQMLRTGNNFEMVYKFENVPFHSMYAHSQSLDRLMNPLLDQYLWELQSTTSGGTLNQGNSATNFAKLTNKNFSGYRKNWLPGPMMKQQRFSKTASQNYKIPQGGNNSLLHYETRTTLDRRWSNFAPGTAMATAANDATDFSQAQLIFAGPNITGNTTTDANNLMFTSEDELRATNPRDTDLFGHLATNQQNATTVPTVDDVDGVGVYPGMVWQDRDIYYQGPIWAKIPHTDGHFHPSPLIGGFGLKSPPPQIFIKNTPVPANPATTFSPARINSFITQYSTGQVAVKIEWEIQKERSKRWNPEVQFTSNYGAQDSLLWAPDNAGAYKEPRAIGSRYLTNHL

SEQ ID NO: 521 - protein, 736 aa, Artificial Sequence
  Description of Artificial Sequence: Synthetic polypeptide
MSFVDHPPDWLESIGDGFREFLGLEAGPPKPKANQQKQDNARGLVLPGYKYLGPGNGLDKGDPVNFADEVAREHDLSYQKQLEAGDNPYLKYNHADAEFQEKLASDTSFGGNLGKAVFQAKKRILEPLGLVETPDKTAPAAKKRPLEQSPQEPDSSSGVGKKGKQPARKRLNFDDEPGAGDGPPPEGPSSGAMSTETEMRAAAGGNGGDAGQGAEGVGNASGDWHCDSTWSESHVTTTSTRTWVLPTYNNHLYLRLGSSNASDTFNGFSTPWGYFDFNRFHCHFSPRDWQRLINNHWGLRPKSMQVRIFNIQVKEVTTSNGETTVSNNLTSTVQIFADSTYELPYVMDAGQEGSLPPFPNDVFMVPQYGYCGLVTGGSSQNQTDRNAFYCLEYFPSQMLRTGNNFEMVYKFENVPFHSMYAHSQSLDRLMNPLLDQYLWELQSTTSGGTLNQGNSATNFAKLTKTNFSGYRKNWLPGPMMKQQRFSKTASQNYKIPQGRNNSLLHYETRTTLDGRWSNFAPGTAMATAANDATDFSQAQLIFAGPNITGNTTTDANNLMFTSEDELRATNPRDTDLFGHLATNQQNATTVPTVDDVDGVGVYPGMVWQDRDIYYQGPIWAKIPHTDGHFHPSPLIGGFGLKSPPPQIFIKNTPVPANPATTFSPARINSFITQYSTGQVAVKIEWEIQKERSKRWNPEVQFTSNYGAQDSLLWAPDNAGAYKEPRAIGSRYLTNHL

SEQ ID NO: 522 - protein, 736 aa, Bovine adeno-associated virus; identical to SEQ ID NO: 521

SEQ ID NO: 523 - protein, 600 aa, Bovine adeno-associated virus
TAPAAKKRPLEQSPQEPDSSSGVGKKGKQPARKRLNFDDEPGAGDGPPPEGPSSGAMSTETEMRAAAGGNGGDAGQGAEGVGNASGDWHCDSTWSESHVTTTSTRTWVLPTYNNHLYLRLGSSNASDTFNGFSTPWGYFDFNRFHCHFSPRDWQRLINNHWGLRPKSMQVRIFNIQVKEVTTSNGETTVSNNLTSTVQIFADSTYELPYVMDAGQEGSLPPFPNDVFMVPQYGYCGLVTGGSSQNQTDRNAFYCLEYFPSQMLRTGNNFEMVYKFENVPFHSMYAHSQSLDRLMNPLLDQYLWELQSTTSGGTLNQGNSATNFAKLTKTNFSGYRKNWLPGPMMKQQRFSKTASQNYKIPQGRNNSLLHYETRTTLDGRWSNFAPGTAMATAANDATDFSQAQLIFAGPNITGNTTTDANNLMFTSEDELRATNPRDTDLFGHLATNQQNATTVPTVDDVDGVGVYPGMVWQDRDIYYQGPIWAKIPHTDGHFHPSPLIGGFGLKSPPPQIFIKNTPVPANPATTFSPARINSFITQYSTGQVAVKIEWEIQKERSKRWNPEVQFTSNYGAQDSLLWAPDNAGAYKEPRAIGSRYLTNHL

SEQ ID NO: 524 - DNA, 2214 bp, Artificial Sequence
  Description of Artificial Sequence: Synthetic polynucleotide
atggctgccgatggttatcttccagattggctcgaggacactctctctgaaggaataagacagtggtggaagctcaaacctggcccaccaccaccaaagcccgcagagcggcataaggacgacagcaggggtcttgtgcttcctgggtacaagtacctcggacccttcaacggactcgacaagggagagccggtcaacgaggcagacgccgcggccctcgagcacgacaaagcctacgaccggcagctcgacagcggagacaacccgtacctcaagtacaaccacgccgacgcggagtttcaggagcgccttaaagaagatacgtcttttgggggcaacctcgggcgagcagtcttccaggccaaaaagaggcttcttgaacctcttggtctggttgaggaagcggctaagacggctcctggaaagaagaggcctgtagagcagtctcctcaggaaccggactcctcctcgggcatcggcaagacaggccagcagcccgctaaaaagagactcaatttcggtcagactggcgacacagagtcagtcccagaccctcaaccaatcggagaacctcccgcagccccctcaggtgtgggatctcttacaatggcttcaggtggtggcgcaccagtggcagacaataacgaaggtgccgatggagtgggtagttcctcgggaaattggcattgcgattcccaatggctgggggacagagtcatcaccaccagcacccgaacctgggccctgcccacctacaacaatcacctctacaagcaaatctccaacgggacatcgggaggagccaccaacgacaacacctacttcggctacagcaccccctgggggtattttgactttaacagattccactgccacttttcaccacgtgactggcagcgactcatcaacaacaactggggattccggcccaagagactcagcttcaagctcttcaacatccaggtcaaggaggtcacgcagaatgaaggcaccaagaccatcgccaataaccttaccagcacggtccaggtcttcacggactcggagtaccagctgccgtacgttctcggctctgcccaccagggctgcctgcctccgttcccggcggacgtgttcatgattccccagtacggctacctaacactcaacaacggtagtcaggccgtgggacgctcctccttctactgcctggaatactttccttcgcagatgctgagaaccggcaacaacttccagtttacttacaccttcgaggacgtgcctttccacagcagctacgcccacagccagagcttggaccggctgatgaatcctctgattgaccagtacctgtactacttgtctcggactcaaacaacaggaggcacggcaaatacgcagactctgggcttcagccaaggtgggcctaatacaatggccaatcaggcaaagaactggctgccaggaccctgttaccgccaacaacgcgtctcaacgacaaccgggcaaaacaacaatagcaactttgcctggactgctgggaccaaataccatctgaatggaagaaattcattggctaatcctggcatcgctatggcaacacacaaagacgacaaggagcgtttttttcccagtaacgggatcctgatttttggcaaacaaaatgctgccagagacaatgcggattacagcgatgtcatgctcaccagcgaggaagaaatcaaaaccactaaccctgtggctacagaggaatacggtatcgtggcagataacttgcagcagcaaaacacggctcctcaaattggaactgtcaacagccagggggccttacccggtatggtttggcagaaccgggacgtgtacctgcagggtcccatctgggccaagattcctcacacggacggcaacttccacccgtctccgctgatgggcggctttggcctgaaacatcctccgcctcagatcctgatcaagaacacgcctgtacctgcggatcctccgaccaccttcaaccagtcaaagctgaactctttcatcacgcaatacagcaccggacaggtcagcgtggaaattgaatgggagctgcagaaggaaaacagcaagcgctggaaccccgagatccagtacacctccaactactacaaatctacaagtgtggactttgctgttaatacagaaggcgtgtactctgaaccccaccccattggcacccgttacctcacccgtcccctgtaa

SEQ ID NO: 525 - protein, 737 aa, Artificial Sequence
  Description of Artificial Sequence: Synthetic polypeptide
MAADGYLPDWLEDTLSEGIRQWWKLKPGPPPPKPAERHKDDSRGLVLPGYKYLGPFNGLDKGEPVNEADAAALEHDKAYDRQLDSGDNPYLKYNHADAEFQERLKEDTSFGGNLGRAVFQAKKRLLEPLGLVEEAAKTAPGKKRPVEQSPQEPDSSSGIGKTGQQPAKKRLNFGQTGDTESVPDPQPIGEPPAAPSGVGSLTMASGGGAPVADNNEGADGVGSSSGNWHCDSQWLGDRVITTSTRTWALPTYNNHLYKQISNGTSGGATNDNTYFGYSTPWGYFDFNRFHCHFSPRDWQRLINNNWGFRPKRLSFKLFNIQVKEVTQNEGTKTIANNLTSTVQVFTDSEYQLPYVLGSAHQGCLPPFPADVFMIPQYGYLTLNNGSQAVGRSSFYCLEYFPSQMLRTGNNFQFTYTFEDVPFHSSYAHSQSLDRLMNPLIDQYLYYLSRTQTTGGTANTQTLGFSQGGPNTMANQAKNWLPGPCYRQQRVSTTTGQNNNSNFAWTAGTKYHLNGRNSLANPGIAMATHKDDKERFFPSNGILIFGKQNAARDNADYSDVMLTSEEEIKTTNPVATEEYGIVADNLQQQNTAPQIGTVNSQGALPGMVWQNRDVYLQGPIWAKIPHTDGNFHPSPLMGGFGLKHPPPQILIKNTPVPADPPTTFNQSKLNSFITQYSTGQVSVEIEWELQKENSKRWNPEIQYTSNYYKSTSVDFAVNTEGVYSEPHPIGTRYLTRPL

SEQ ID NO: 526 - protein, 736 aa, Artificial Sequence
  Description of Artificial Sequence: Synthetic polypeptide
MAADGYLPDWLEDNLSEGIREWWDLKPGAPKPKANQQKQDDGRGLVLPGYKYLGPFNGLDKGEPVNAADAAALEHDKAYDQQLKAGDNPYLRYNHADAEFQERLQEDTSFGGNLGRAVFQAKKRVLEPLGLVEEGAKTAPGKKRPVEQSPQEPDSSSGIGKTGQQPAKKRLNFGQTGDTESVPDPQPIGEPPAAPSGVGSLTMASGGGAPVADNNEGADGVGSSSGNWHCDSQWLGDRVITTSTRTWALPTYNNHLYKQISSASTGASNDNHYFGYSTPWGYFDFNRFHCHFSPRDWQRLINNNWGFRPKRLNFKLFNIQVKEVTDNNGVKTIANNLTSTVQVFTDSDYQLPYVLGSAHQGCLPPFPADVFMIPQYGYLTLNNGSQAVGRSSFYCLEYFPSQMLRTGNNFQFTYTFEDVPFHSSYAHSQSLDRLMNPLIDQYLYYLSRTQTTGGTANTQTLGFSQGGPNTMANQAKNWLPGPCYRQQRVSTTTGQNNNSNFAWTAGTKYHLNGRNSLANPGIAMATHKDDKERFFPSNGILIFGKQNAARDNADYSDVMLTSEEEIKTTNPVATEEYGIVADNLQQQNTAPQIGTVNSQGALPGMVWQNRDVYLQGPIWAKIPHTDGNFHPSPLMGGFGLKHPPPQILIKNTPVPADPPTTFNQSKLNSFITQYSTGQVSVEIEWELQKENSKRWNPEIQYTSNYYKSTSVDFAVNTEGVYSEPHPIGTRYLTRPL

SEQ ID NO: 527 - protein, 736 aa, Artificial Sequence
  Description of Artificial Sequence: Synthetic polypeptide
MAADGYLPDWLEDTLSEGIRQWWKLKPGPPPPKPAERHKDDSRGLVLPGYKYLGPFNGLDKGEPVNEADAAALEHDKAYDRQLDSGDNPYLKYNHADAEFQERLQGDTSFGGNLGRAVFQAKKRVLEPLGLVEEGAKTAPGKKRPVEQSPQEPDSSSGIGETGQQPAKKRLNFGQTGDSESVPDPQPLGEPPATPAAVGPTTMASGGGAPMADNNEGADGVGSSSGNWHCDSQWLGDRVITTSTRTWALPTYNNHLYKQISSASTGASNDNHYFGYSTPWGYFDFNRFHCHFSPRDWQRLINNNWGFRPKRLSFKLFNIQVKEVTDNNGVKTIANNLTSTVQVFTDSEYQLPYVLGSAHQGCLPPFPADVFMIPQYGYLTLNNGSQAVGRSSFYCLEYFPSQMLRTGNNFTFSYTFEDVPFHSSYAHSQSLDRLMNPLIDQYLYYLSRTQTTGGTANTQTLGFSQGGPNTMANQAKNWLPGPCYRQQRVSTTTGQNNNSNFAWTAGTKYHLNGRNSLANPGIAMATHKDDKERFFPSNGILIFGKQNAARDNADYSDVMLTSEEEIKTTNPVATEEYGIVADNLQQQNTAPQIGTVNSQGALPGMVWQNRDVYLQGPIWAKIPHTDGNFHPSPLMGGFGLKHPPPQILIKNTPVPADPPTTFNQSKLNSFITQYSTGQVSVEIEWELQKENSKRWNPEIQYTSNYYKSTSVDFAVNTEGVYSEPHPIGTRYLTRPL

SEQ ID NO: 528 - DNA, 2181 bp, Artificial Sequence
  Description of Artificial Sequence: Synthetic polynucleotide
atgtcttttgttgatcaccctccagattggttggaagaagttggtgaaggtcttcgcgagtttttgggccttgaagcgggcccaccgaaaccaaaacccaatcagcagcatcaagatcaagcccgtggtcttgtgctgcctggttataactatctcggacccggaaacggtctcgatcgaggagagcctgtcaacagggcagacgaggtcgcgcgagagcacgacatctcgtacaacgagcagcttgaggcgggagacaacccctacctcaagtacaaccacgcggacgccgagtttcaggagaagctcgccgacgacacatccttcgggggaaacctcggaaaggcagtctttcaggccaagaaaagggttctcgaaccttttggcctggttgaagagggtgctaagacggcccctaccggaaagcggatagacgaccactttccaaaaagaaagaaggctcggaccgaagaggactccaagccttccacctcgtcagacgccgaagctggacccagcggatcccagcagctgcaaatcccagcacaaccagcctcaagtttgggagctgatacaatgtctgcgggaggtggcggcccattgggcgacaataaccaaggtgccgatggagtgggcaatgcctcgggagattggcattgcgattccacgtggatgggggacagagtcgtcaccaagtccacccgcacctgggtgctgcccagctacaacaaccaccagtaccgagagatcaaaagcggctccgtcgacggaagcaacgccaacgcctactttggatacagcaccccctgggggtactttgactttaaccgcttccacagccactggagcccccgagactggcaaagactcatcaacaactattggggcttcagaccccggtctctcagagtcaaaatcttcaacatccaagtcaaagaggtcacggtgcaggactccaccaccaccatcgccaacaacctcacctccaccgtccaagtgtttacggacgacgactaccaactcccgtacgtcgtcggcaacgggaccgagggatgcctgccggccttccccccgcaggtctttacgctgccgcagtacggctacgcgacgctgaaccgagacaacggagacaacccgacagagcggagcagcttcttttgcctagagtactttcccagcaagatgctgaggacgggcaacaactttgagtttacctacagctttgaagaggtgcccttccactgcagcttcgccccgagccagaacctctttaagctggccaacccgctggtggaccagtacctgtaccgcttcgtgagcacctcggccacgggcgccatccagttccaaaagaacctggcgggcagatacgccaacacctacaaaaactggttcccggggcccatgggccgaacccagggctggaacacgagctctggggtcagcagcaccaacagagtcagcgtcaacaacttttccgtctcaaaccggatgaacctggagggggccagctaccaagtgaacccccagcccaacgggatgacaaacacgctccaaggcagcaaccgctacgcgctggaaaacaccatgatcttcaacgctcaaaacgccacgccgggaactacctcggtgtacccagaggacaatctactgctgaccagcgagagcgagactcagcccgtcaaccgggtggcttacaacacgggcggtcagatggccaccaacgcccagaacgccaccacggctcccacggtcgggacctacaacctccaggaagtgcttcctggcagcgtatggatggagagggacgtgtacctccaaggacccatctgggccaagatcccagagacgggggcgcactttcacccctctccggccatgggcggattcggactcaaacacccgccgcccatgatgctcatcaaaaacacgccggtgcccggcaacatcaccagcttctcggacgtgcccgtcagcagcttcatcacccagtacagcaccgggcaggtcaccgtggagatggaatgggagctcaaaaaggaaaactccaagaggtggaacccagagatccagtacaccaacaactacaacgacccccagtttgtggactttgctccagacggctccggcgaatacagaaccaccagagccatcggaacccgatacctcacccgacccctt

SEQ ID NO: 529 - protein, 726 aa, Artificial Sequence
  Description of Artificial Sequence: Synthetic polypeptide
MSFVDHPPDWLEEVGEGLREFLGLEAGPPKPKPNQQHQDQARGLVLPGYNYLGPGNGLDRGEPVNRADEVAREHDISYNEQLEAGDNPYLKYNHADAEFQEKLADDTSFGGNLGKAVFQAKKRVLEPFGLVEEGAKTAPTGKRIDDHFPKRKKARTEEDSKPSTSSDAEAGPSGSQQLQIPAQPASSLGADTMSAGGGGPLGDNNQGADGVGNASGDWHCDSTWMGDRVVTKSTRTWVLPSYNNHQYREIKSGSVDGSNANAYFGYSTPWGYFDFNRFHSHWSPRDWQRLINNYWGFRPRSLRVKIFNIQVKEVTVQDSTTTIANNLTSTVQVFTDDDYQLPYVVGNGTEGCLPAFPPQVFTLPQYGYATLNRDNGDNPTERSSFFCLEYFPSKMLRTGNNFEFTYSFEEVPFHCSFAPSQNLFKLANPLVDQYLYRFVSTSATGAIQFQKNLAGRYANTYKNWFPGPMGRTQGWNTSSGSSTNRVSVNNFSVSNRMNLEGASYQVNPQPNGMTNTLQGSNRYALENTMIFNAQNATPGTTSVYPEDNLLLTSESETQPVNRVAYNTGGQMATNAQNATTAPTVGTYNLQEVLPGSVWMERDVYLQGPIWAKIPETGAHFHPSPAMGGFGLKHPPPMMLIKNTPVPGNITSFSDVPVSSFITQYSTGQVTVEMEWELKKENSKRWNPEIQYTNNYNDPQFVDFAPDGSGEYRTTRAIGTRYLTRPL

SEQ ID NO: 530 - protein, 735 aa, Artificial Sequence
  Description of Artificial Sequence: Synthetic polypeptide
MAADGYLPDWLEDTLSEGIRQWWKLKPGPPPPKPAERHKDDSRGLVLPGYKYLGPFNGLDKGEPVNEADAAALEHDKAYDRQLDSGDNPYLKYNHADAEFQERLKEDTSFGGNLGRAVFQAKKRILEPLGLVEEPVKTAPGKKRPVEHSPAEPDSSSGTGKSGQQPARKRLNFGQTGDADSVPDPQPLGQPPAAPSGLGTNTMASGSGAPMADNNEGADGVGNSSGNWHCDSTWMGDRVITTSTRTWALPTYNNHLYKQISSQSGASNDNHYFGYSTPWGYFDFNRFHCHFSPRDWQRLINNNWGFRPKRLSFKLFNIQVKEVTQNDGTTTIANNLTSTVQVFTDSEYQLPYVLGSAHQGCLPPFPADVFMVPQYGYLTLNNGSQAVGRSSFYCLEYFPSQMLRTGNNFTFSYTFEDVPFHSSYAHSQSLDRLMNPLIDQYLYYLSRTNTPSGTTTMSRLQFSQAGASDIRDQSRNWLPGPCYRQQRVSKTAADNNNSDYSWTGATKYHLNGRDSLVNPGPAMASHKDDEEKYFPQSGVLIFGKQDSGKTNVDIEKVMITDEEEIRTTNPVATEQYGSVSTNLQSGNTQAATSDVNTQGVLPGMVWQDRDVYLQGPIWAKIPHTDGHFHPSPLMGGFGLKHPPPQILIKNTPVPANPSTTFSAAKFASFITQYSTGQVSVEIEWELQKENSKRWNPEIQYTSNYNKSVNVDFTVDTNGVYSEPRPIGTRYLTRNL

SEQ ID NO: 531 - DNA, 1797 bp, Artificial Sequence
  Description of Artificial Sequence: Synthetic polynucleotide
acggctccgaccggagacaagcggaaaggcgaagacgaacctcgtttgcccgacacttcttcacagactcccaagaaaaacaagaagcctcgcaaggaaagaccttccggcggggcagaagatccgggcgaaggcacctcttccaacgctggagcagcagcacccgcctctagtgtgggatcatctatcatggctgaaggaggtggcggcccagtgggcgatgcaggccagggtgccgatggagtgggcaattcctccggaaattggcattgcgattcccaatggctggaaaacggagtcgtcactcgaaccacccgaacctgggtcttgcccagctacaacaaccacctgtacaaacgaatccaaggacccagcggaggcgacaacaacaacaaattctttggattcagcaccccctggggatactttgactacaatcgattccactgccacttttccccgcgagactggcaacgactcatcaacaacaactggggcatccgtcccaaagcgatgcgctttagactctttaacatccaggttaaagaggtcacggtccaagacttcaacaccaccatcggcaacaacctcaccagtacggtccaggtctttgcggacaaggactaccaactgccgtacgtcctcggatcggctaccgaaggcaccttcccgccgttcccagcggatatctacacgatcccgcagtacgggtactgcacgctaaactacaacaacgaggcggtggatcgttcggccttctactgtctggactactttccctcagacatgctgcggacaggaaataactttgagtttacttacaccttcgaggacgttcctttccatagcatgtttgcccacaaccagacgctagaccggctgatgaatcccctcgtggatcagtacctctgggctttcagctccgtcagccaagcaggctcatctggacgagctcttcattactcgcgggcgactaaaaccaacatggcggctcaatataggaactggttacctgggcctttcttccgtgatcagcaaatctttacgggcgctagcaacatcactaaaaataacgtctttagcgtttgggaaaaaggcaagcaatgggaactcgacaatcggaccaacctaatgcagcccggtcctgcggcagcgaccacctttagcggagaacctgaccgtcaagccatgcaaaacacgctggcttttagcaggaccgtctacgatcaaacgaccgccacgaccgatcgtaaccagatactcatcaccaacgaagacgaaatcagacccaccaactcggtcggtatcgacgcgtggggagcagttcccaccaacaaccagtcgatcgtgacccccggcactcgcgcggccgtcaacaatcaaggggcgcttcccgggatggtgtggcaaaacagagacatttaccctacagggacccatttggccaaaattcccgacactgacaatcacttccatccgtccccgcttattgggcggtttggctgcaagcatccccctccccagattttcattaaaaacacacccgtccctgccaacccttcggaaacgttccagacggccaaagtggcctccttcatcaaccagtactcgaccggacagtgcaccgtcgaaatcttttgggaactcaagaaggaaacctccaagcgctggaaccccgaaatccagttcacctccaactttggcaacgcggccgacatccagtttgccgtctccgacacgggatcctattccgaacctcgtcccatcggtacccgttaccttaccaaacctctgtaa

SEQ ID NO: 532 - DNA, 1989 bp, Artificial Sequence
  Description of Artificial Sequence: Synthetic polynucleotide
atgaggtcgtactacgaggtcatcgttcagctgcccaacgacgtcgagagtcaggtacctggaatctccgattcgttcgtcaactggattacgtcgcgagaatggacgttgcctgaggacgccgattgggatttggaccaggtcgatcaagttcaactgacgctcggcgacaaaatccaacgggagattcgaactcattgggggacgatggccaaagaaccggactttcactattttatccaactggaacaaggtgaggtgttctttcatttacacgtcctgctggaaacgtgttccgtaaagccgatggtactcggaagatatatccgacatattcaacaaaaaattgtgagtaaagtctactgcgccacgagcctacgatggaaggatggatgcgtggtgaccaagaccaaaaatttcgggggcgcgaacaaggtccgggccgagtcgtatattcccgcctacctgatcccgaaacagcaaccggaagtgcagtgggcgtggactaacgtgcccgagtatataaaagcgtgcttgcaccgagaactgcgtgccagtctcgcgcgacttcacttcgaggaggcgggcgtctcgcaatccaaggaaaatctcgcgagaactgcagacggcgctcccgtgatgccgacccgcgtcagcaaacgctacatggagctcgtggattggctcgtggagaaggggatcaccaccgagaaggaatggctgctggaaaacagagaaagctttcggagctttcaggcctcgagcaactcggcgcgtcagatcaagacggccctgcaaggcgccattcaggagatgcttctgaccaagacggcggaggactacctcgtcggaaaggatcccgtctcggacgacgacatccgtcagaaccgcatctacaagattctggaactgaaccactacgacccagcgtacgtggggagtattttggtcgggtggtgccagaagaaatggggcaagcgaaacacgctgtggctgttcggacatgcgaccaccggcaagaccaacatcgcggaggctattgcccatgctgtgccgttctatggatgcgttaactggaccaacgagaactttccgttcaacgactgcgtcgaaaaaatgattatctggtgggaggagggcaaaatgaccgccaaagtggtggaaacagccaaggcgattctgggaggatctcgggtgagagtggaccaaaaatgcaaagcttcggttccgatcgaaccgacgccggtcattattaccagtaacaccaacatgtgttatgtcatcgacgggaacacgaccacgttcgagcataagcagccgttggaggacaggatgtttaagctcgaattgctgactcggttgcctgatgactttggtaaggtgaccaaacaggaggtgcgtcaattcttcaggtggtctcaggatcacctgacccctgtgatcccagaattcctagtgcggaaggcggagtctcgcaaaagacccgccccttccggggaaggctatataagcccgacaaagcggcccgcgctcgcagagcagcagcaggcgtcggagagcgcggacccggttcccaccaggtatcgtatcaaatgctcgaaacattgcggtatggataaaatgttgtttccttgccaaatttgtgaatcgatgaacagagatattaatatttgtgctattcataaaacgaccgactgtaaagagtgtttccccgactacggggataaagatgatgtagaactacccccctgtacagaacacaacgtgtctcgttgttatcaatgtcattcgggcgaattgtatcgcgtgacttcggactctgacgagaaacctgcccccgagagtgatgaaggcaccgagccatcctatgctccctgcacgattcaccacctgatgggcaagagtcacgggttagtcacttgcgcggcgtgtcggttgaaaaatagtacgttgcatgatgacttggatgacggtgatctcgaacaataa

SEQ ID NO: 533 - DNA, 1626 bp, Artificial Sequence
  Description of Artificial Sequence: Synthetic polynucleotide
atgaggtcgtactacgaggtcatcgttcagctgcccaacgacgtcgagagtcaggtacctggaatctccgattcgttcgtcaactggattacgtcgcgagaatggacgttgcctgaggacgccgattgggatttggaccaggtcgatcaagttcaactgacgctcggcgacaaaatccaacgggagattcgaactcattgggggacgatggccaaagaaccggactttcactattttatccaactggaacaaggtgaggtgttctttcatttacacgtcctgctggaaacgtgttccgtaaagccgatggtactcggaagatatatccgacatattcaacaaaaaattgtgagtaaagtctactgcgccacgagcctacgatggaaggatggatgcgtggtgaccaagaccaaaaatttcgggggcgcgaacaaggtccgggccgagtcgtatattcccgcctacctgatcccgaaacagcaaccggaagtgcagtgggcgtggactaacgtgcccgagtatataaaagcgtgcttgcaccgagaactgcgtgccagtctcgcgcgacttcacttcgaggaggcgggcgtctcgcaatccaaggaaaatctcgcgagaactgcagacggcgctcccgtgatgccgacccgcgtcagcaaacgctacatggagctcgtggattggctcgtggagaaggggatcaccaccgagaaggaatggctgctggaaaacagagaaagctttcggagctttcaggcctcgagcaactcggcgcgtcagatcaagacggccctgcaaggcgccattcaggagatgcttctgaccaagacggcggaggactacctcgtcggaaaggatcccgtctcggacgacgacatccgtcagaaccgcatctacaagattctggaactgaaccactacgacccagcgtacgtggggagtattttggtcgggtggtgccagaagaaatggggcaagcgaaacacgctgtggctgttcggacatgcgaccaccggcaagaccaacatcgcggaggctattgcccatgctgtgccgttctatggatgcgttaactggaccaacgagaactttccgttcaacgactgcgtcgaaaaaatgattatctggtgggaggagggcaaaatgaccgccaaagtggtggaaacagccaaggcgattctgggaggatctcgggtgagagtggaccaaaaatgcaaagcttcggttccgatcgaaccgacgccggtcattattaccagtaacaccaacatgtgttatgtcatcgacgggaacacgaccacgttcgagcataagcagccgttggaggacaggatgtttaagctcgaattgctgactcggttgcctgatgactttggtaaggtgaccaaacaggaggtgcgtcaattcttcaggtggtctcaggatcacctgacccctgtgatcccagaattcctagtgcggaaggcggagtctcgcaaaagacccgccccttccggggaaggctatataagcccgacaaagcggcccgcgctcgcagagcagcagcaggcgtcggagagcgcggacccggttcccaccagattggttggagcggttggtcaaaaagggagtgaatgctgcagctga

SEQ ID NO: 534 - DNA, 1323 bp, Artificial Sequence
  Description of Artificial Sequence: Synthetic polynucleotide
atggagctcgtggattggctcgtggagaaggggatcaccaccgagaaggaatggctgctggaaaacagagaaagctttcggagctttcaggcctcgagcaactcggcgcgtcagatcaagacggccctgcaaggcgccattcaggagatgcttctgaccaagacggcggaggactacctcgtcggaaaggatcccgtctcggacgacgacatccgtcagaaccgcatctacaagattctggaactgaaccactacgacccagcgtacgtggggagtattttggtcgggtggtgccagaagaaatggggcaagcgaaacacgctgtggctgttcggacatgcgaccaccggcaagaccaacatcgcggaggctattgcccatgctgtgccgttctatggatgcgttaactggaccaacgagaactttccgttcaacgactgcgtcgaaaaaatgattatctggtgggaggagggcaaaatgaccgccaaagtggtggaaacagccaaggcgattctgggaggatctcgggtgagagtggaccaaaaatgcaaagcttcggttccgatcgaaccgacgccggtcattattaccagtaacaccaacatgtgttatgtcatcgacgggaacacgaccacgttcgagcataagcagccgttggaggacaggatgtttaagctcgaattgctgactcggttgcctgatgactttggtaaggtgaccaaacaggaggtgcgtcaattcttcaggtggtctcaggatcacctgacccctgtgatcccagaattcctagtgcggaaggcggagtctcgcaaaagacccgccccttccggggaaggctatataagcccgacaaagcggcccgcgctcgcagagcagcagcaggcgtcggagagcgcggacccggttcccaccaggtatcgtatcaaatgctcgaaacattgcggtatggataaaatgttgtttccttgccaaatttgtgaatcgatgaacagagatattaatatttgtgctattcataaaacgaccgactgtaaagagtgtttccccgactacggggataaagatgatgtagaactacccccctgtacagaacacaacgtgtctcgttgttatcaatgtcattcgggcgaattgtatcgcgtgacttcggactctgacgagaaacctgcccccgagagtgatgaaggcaccgagccatcctatgctccctgcacgattcaccacctgatgggcaagagtcacgggttagtcacttgcgcggcgtgtcggttgaaaaatagtacgttgcatgatgacttggatgacggtgatctcgaacaataa

SEQ ID NO: 535 - DNA, 960 bp, Artificial Sequence
  Description of Artificial Sequence: Synthetic polynucleotide
atggagctcgtggattggctcgtggagaaggggatcaccaccgagaaggaatggctgctggaaaacagagaaagctttcggagctttcaggcctcgagcaactcggcgcgtcagatcaagacggccctgcaaggcgccattcaggagatgcttctgaccaagacggcggaggactacctcgtcggaaaggatcccgtctcggacgacgacatccgtcagaaccgcatctacaagattctggaactgaaccactacgacccagcgtacgtggggagtattttggtcgggtggtgccagaagaaatggggcaagcgaaacacgctgtggctgttcggacatgcgaccaccggcaagaccaacatcgcggaggctattgcccatgctgtgccgttctatggatgcgttaactggaccaacgagaactttccgttcaacgactgcgtcgaaaaaatgattatctggtgggaggagggcaaaatgaccgccaaagtggtggaaacagccaaggcgattctgggaggatctcgggtgagagtggaccaaaaatgcaaagcttcggttccgatcgaaccgacgccggtcattattaccagtaacaccaacatgtgttatgtcatcgacgggaacacgaccacgttcgagcataagcagccgttggaggacaggatgtttaagctcgaattgctgactcggttgcctgatgactttggtaaggtgaccaaacaggaggtgcgtcaattcttcaggtggtctcaggatcacctgacccctgtgatcccagaattcctagtgcggaaggcggagtctcgcaaaagacccgccccttccggggaaggctatataagcccgacaaagcggcccgcgctcgcagagcagcagcaggcgtcggagagcgcggacccggttcccaccagattggttggagcggttggtcaaaaagggagtgaatgctgcagctga

SEQ ID NO: 536 - DNA, 1608 bp, Artificial Sequence
  Description of Artificial Sequence: Synthetic polynucleotide
atggctgaaggaggtggcggcccagtgggcgatgcaggccagggtgccgatggagtgggcaattcctccggaaattggcattgcgattcccaatggctggaaaacggagtcgtcactcgaaccacccgaacctgggtcttgcccagctacaacaaccacctgtacaaacgaatccaaggacccagcggaggcgacaacaacaacaaattctttggattcagcaccccctggggatactttgactacaatcgattccactgccacttttccccgcgagactggcaacgactcatcaacaacaactggggcatccgtcccaaagcgatgcgctttagactctttaacatccaggttaaagaggtcacggtccaagacttcaacaccaccatcggcaacaacctcaccagtacggtccaggtctttgcggacaaggactaccaactgccgtacgtcctcggatcggctaccgaaggcaccttcccgccgttcccagcggatatctacacgatcccgcagtacgggtactgcacgctaaactacaacaacgaggcggtggatcgttcggccttctactgtctggactactttccctcagacatgctgcggacaggaaataactttgagtttacttacaccttcgaggacgttcctttccatagcatgtttgcccacaaccagacgctagaccggctgatgaatcccctcgtggatcagtacctctgggctttcagctccgtcagccaagcaggctcatctggacgagctcttcattactcgcgggcgactaaaaccaacatggcggctcaatataggaactggttacctgggcctttcttccgtgatcagcaaatctttacgggcgctagcaacatcactaaaaataacgtctttagcgtttgggaaaaaggcaagcaatgggaactcgacaatcggaccaacctaatgcagcccggtcctgcggcagcgaccacctttagcggagaacctgaccgtcaagccatgcaaaacacgctggcttttagcaggaccgtctacgatcaaacgaccgccacgaccgatcgtaaccagatactcatcaccaacgaagacgaaatcagacccaccaactcggtcggtatcgacgcgtggggagcagttcccaccaacaaccagtcgatcgtgacccccggcactcgcgcggccgtcaacaatcaaggggcgcttcccgggatggtgtggcaaaacagagacatttaccctacagggacccatttggccaaaattcccgacactgacaatcacttccatccgtccccgcttattgggcggtttggctgcaagcatccccctccccagattttcattaaaaacacacccgtccctgccaacccttcggaaacgttccagacggccaaagtggcctccttcatcaaccagtactcgaccggacagtgcaccgtcgaaatcttttgggaactcaagaaggaaacctccaagcgctggaaccccgaaatccagttcacctccaactttggcaacgcggccgacatccagtttgccgtctccgacacgggatcctattccgaacctcgtcccatcggtacccgttaccttaccaaacctctgtaa

SEQ ID NO: 537 - DNA, 2232 bp, Artificial Sequence
  Description of Artificial Sequence: Synthetic polynucleotide
atgtctctcatttctgatgcgattccagattggttggagcggttggtcaaaaagggagtgaatgctgcagctgatttctaccatttggaaagcggtcctcctcgtcctaaggcaaatcagcaaactcaagaatctcttgaaaaggacgattcgagaggtctcgtgttcccaggctacaattatctaggccctttcaacggtctagataaaggagaacccgtcaacgaggcagacgctgccgccttagaacacgacaaggcttacgacctcgaaatcaaggacgggcacaacccgtactttgagtacaacgaggccgacagacgtttccaggaacgtctcaaagacgatacctcctttggaggcaatttaggtaaagccatcttccaggccaaaaagagggttctcgaaccctttggtctggtggaagactcaaagacggctccgaccggagacaagcggaaaggcgaagacgaacctcgtttgcccgacacttcttcacagactcccaagaaaaacaagaagcctcgcaaggaaagaccttccggcggggcagaagatccgggcgaaggcacctcttccaacgctggagcagcagcacccgcctctagtgtgggatcatctatcatggctgaaggaggtggcggcccagtgggcgatgcaggccagggtgccgatggagtgggcaattcctccggaaattggcattgcgattcccaatggctggaaaacggagtcgtcactcgaaccacccgaacctgggtcttgcccagctacaacaaccacctgtacaaacgaatccaaggacccagcggaggcgacaacaacaacaaattctttggattcagcaccccctggggatactttgactacaatcgattccactgccacttttccccgcgagactggcaacgactcatcaacaacaactggggcatccgtcccaaagcgatgcgctttagactctttaacatccaggttaaagaggtcacggtccaagacttcaacaccaccatcggcaacaacctcaccagtacggtccaggtctttgcggacaaggactaccaactgccgtacgtcctcggatcggctaccgaaggcaccttcccgccgttcccagcggatatctacacgatcccgcagtacgggtactgcacgctaaactacaacaacgaggcggtggatcgttcggccttctactgtctggactactttccctcagacatgctgcggacaggaaataactttgagtttacttacaccttcgaggacgttcctttccatagcatgtttgcccacaaccagacgctagaccggctgatgaatcccctcgtggatcagtacctctgggctttcagctccgtcagccaagcaggctcatctggacgagctcttcattactcgcgggcgactaaaaccaacatggcggctcaatataggaactggttacctgggcctttcttccgtgatcagcaaatctttacgggcgctagcaacatcactaaaaataacgtctttagcgtttgggaaaaaggcaagcaatgggaactcgacaatcggaccaacctaatgcagcccggtcctgcggcagcgaccacctttagcggagaacctgaccgtcaagccatgcaaaacacgctggcttttagcaggaccgtctacgatcaaacgaccgccacgaccgatcgtaaccagatactcatcaccaacgaagacgaaatcagacccaccaactcggtcggtatcgacgcgtggggagcagttcccaccaacaaccagtcgatcgtgacccccggcactcgcgcggccgtcaacaatcaaggggcgcttcccgggatggtgtggcaaaacagagacatttaccctacagggacccatttggccaaaattcccgacactgacaatcacttccatccgtccccgcttattgggcggtttggctgcaagcatccccctccccagattttcattaaaaacacacccgtccctgccaacccttcggaaacgttccagacggccaaagtggcctccttcatcaaccagtactcgaccggacagtgcaccgtcgaaatcttttgggaactcaagaaggaaacctccaagcgctggaaccccgaaatccagttcacctccaactttggcaacgcggccgacatccagtttgccgtctccgacacgggatcctattccgaacctcgtcccatcggtacccgttaccttaccaaacctctgtaa

SEQ ID NO: 538 - protein, 535 aa, Artificial Sequence
  Description of Artificial Sequence: Synthetic polypeptide
MAEGGGGPVGDAGQGADGVGNSSGNWHCDSQWLENGVVTRTTRTWVLPSYNNHLYKRIQGPSGGDNNNKFFGFSTPWGYFDYNRFHCHFSPRDWQRLINNNWGIRPKAMRFRLFNIQVKEVTVQDFNTTIGNNLTSTVQVFADKDYQLPYVLGSATEGTFPPFPADIYTIPQYGYCTLNYNNEAVDRSAFYCLDYFPSDMLRTGNNFEFTYTFEDVPFHSMFAHNQTLDRLMNPLVDQYLWAFSSVSQAGSSGRALHYSRATKTNMAAQYRNWLPGPFFRDQQIFTGASNITKNNVFSVWEKGKQWELDNRTNLMQPGPAAATTFSGEPDRQAMQNTLAFSRTVYDQTTATTDRNQILITNEDEIRPTNSVGIDAWGAVPTNNQSIVTPGTRAAVNNQGALPGMVWQNRDIYPTGTHLAKIPDTDNHFHPSPLIGRFGCKHPPPQIFIKNTPVPANPSETFQTAKVASFINQYSTGQCTVEIFWELKKETSKRWNPEIQFTSNFGNAADIQFAVSDTGSYSEPRPIGTRYLTKPL

SEQ ID NO: 539 - protein, 440 aa, Artificial Sequence
  Description of Artificial Sequence: Synthetic polypeptide
MELVDWLVEKGITTEKEWLLENRESFRSFQASSNSARQIKTALQGAIQEMLLTKTAEDYLVGKDPVSDDDIRQNRIYKILELNHYDPAYVGSILVGWCQKKWGKRNTLWLFGHATTGKTNIAEAIAHAVPFYGCVNWTNENFPFNDCVEKMIIWWEEGKMTAKVVETAKAILGGSRVRVDQKCKASVPIEPTPVIITSNTNMCYVIDGNTTTFEHKQPLEDRMFKLELLTRLPDDFGKVTKQEVRQFFRWSQDHLTPVIPEFLVRKAESRKRPAPSGEGYISPTKRPALAEQQQASESADPVPTRYRIKCSKHCGMDKMLFPCQICESMNRDINICAIHKTTDCKECFPDYGDKDDVELPPCTEHNVSRCYQCHSGELYRVTSDSDEKPAPESDEGTEPSYAPCTIHHLMGKSHGLVTCAACRLKNSTLHDDLDDGDLEQ

SEQ ID NO: 540 - protein, 319 aa, Artificial Sequence
  Description of Artificial Sequence: Synthetic polypeptide
MELVDWLVEKGITTEKEWLLENRESFRSFQASSNSARQIKTALQGAIQEMLLTKTAEDYLVGKDPVSDDDIRQNRIYKILELNHYDPAYVGSILVGWCQKKWGKRNTLWLFGHATTGKTNIAEAIAHAVPFYGCVNWTNENFPFNDCVEKMIIWWEEGKMTAKVVETAKAILGGSRVRVDQKCKASVPIEPTPVIITSNTNMCYVIDGNTTTFEHKQPLEDRMFKLELLTRLPDDFGKVTKQEVRQFFRWSQDHLTPVIPEFLVRKAESRKRPAPSGEGYISPTKRPALAEQQQASESADPVPTRLVGAVGQKGSECCS

SEQ ID NO: 541 - protein, 662 aa, Artificial Sequence
  Description of Artificial Sequence: Synthetic polypeptide
MRSYYEVIVQLPNDVESQVPGISDSFVNWITSREWTLPEDADWDLDQVDQVQLTLGDKIQREIRTHWGTMAKEPDFHYFIQLEQGEVFFHLHVLLETCSVKPMVLGRYIRHIQQKIVSKVYCATSLRWKDGCVVTKTKNFGGANKVRAESYIPAYLIPKQQPEVQWAWTNVPEYIKACLHRELRASLARLHFEEAGVSQSKENLARTADGAPVMPTRVSKRYMELVDWLVEKGITTEKEWLLENRESFRSFQASSNSARQIKTALQGAIQEMLLTKTAEDYLVGKDPVSDDDIRQNRIYKILELNHYDPAYVGSILVGWCQKKWGKRNTLWLFGHATTGKTNIAEAIAHAVPFYGCVNWTNENFPFNDCVEKMIIWWEEGKMTAKVVETAKAILGGSRVRVDQKCKASVPIEPTPVIITSNTNMCYVIDGNTTTFEHKQPLEDRMFKLELLTRLPDDFGKVTKQEVRQFFRWSQDHLTPVIPEFLVRKAESRKRPAPSGEGYISPTKRPALAEQQQASESADPVPTRYRIKCSKHCGMDKMLFPCQICESMNRDINICAIHKTTDCKECFPDYGDKDDVELPPCTEHNVSRCYQCHSGELYRVTSDSDEKPAPESDEGTEPSYAPCTIHHLMGKSHGLVTCAACRLKNSTLHDDLDDGDLEQ

SEQ ID NO: 542 - protein, 541 aa, Artificial Sequence
  Description of Artificial Sequence: Synthetic polypeptide
MRSYYEVIVQLPNDVESQVPGISDSFVNWITSREWTLPEDADWDLDQVDQVQLTLGDKIQREIRTHWGTMAKEPDFHYFIQLEQGEVFFHLHVLLETCSVKPMVLGRYIRHIQQKIVSKVYCATSLRWKDGCVVTKTKNFGGANKVRAESYIPAYLIPKQQPEVQWAWTNVPEYIKACLHRELRASLARLHFEEAGVSQSKENLARTADGAPVMPTRVSKRYMELVDWLVEKGITTEKEWLLENRESFRSFQASSNSARQIKTALQGAIQEMLLTKTAEDYLVGKDPVSDDDIRQNRIYKILELNHYDPAYVGSILVGWCQKKWGKRNTLWLFGHATTGKTNIAEAIAHAVPFYGCVNWTNENFPFNDCVEKMIIWWEEGKMTAKVVETAKAILGGSRVRVDQKCKASVPIEPTPVIITSNTNMCYVIDGNTTTFEHKQPLEDRMFKLELLTRLPDDFGKVTKQEVRQFFRWSQDHLTPVIPEFLVRKAESRKRPAPSGEGYISPTKRPALAEQQQASESADPVPTRLVGAVGQKGSECCS

SEQ ID NO: 543 - protein, 743 aa, Artificial Sequence
  Description of Artificial Sequence: Synthetic polypeptide
MSLISDAIPDWLERLVKKGVNAAADFYHLESGPPRPKANQQTQESLEKDDSRGLVFPGYNYLGPFNGLDKGEPVNEADAAALEHDKAYDLEIKDGHNPYFEYNEADRRFQERLKDDTSFGGNLGKAIFQAKKRVLEPFGLVEDSKTAPTGDKRKGEDEPRLPDTSSQTPKKNKKPRKERPSGGAEDPGEGTSSNAGAAAPASSVGSSIMAEGGGGPVGDAGQGADGVGNSSGNWHCDSQWLENGVVTRTTRTWVLPSYNNHLYKRIQGPSGGDNNNKFFGFSTPWGYFDYNRFHCHFSPRDWQRLINNNWGIRPKAMRFRLFNIQVKEVTVQDFNTTIGNNLTSTVQVFADKDYQLPYVLGSATEGTFPPFPADIYTIPQYGYCTLNYNNEAVDRSAFYCLDYFPSDMLRTGNNFEFTYTFEDVPFHSMFAHNQTLDRLMNPLVDQYLWAFSSVSQAGSSGRALHYSRATKTNMAAQYRNWLPGPFFRDQQIFTGASNITKNNVFSVWEKGKQWELDNRTNLMQPGPAAATTFSGEPDRQAMQNTLAFSRTVYDQTTATTDRNQILITNEDEIRPTNSVGIDAWGAVPTNNQSIVTPGTRAAVNNQGALPGMVWQNRDIYPTGTHLAKIPDTDNHFHPSPLIGRFGCKHPPPQIFIKNTPVPANPSETFQTAKVASFINQYSTGQCTVEIFWELKKETSKRWNPEIQFTSNFGNAADIQFAVSDTGSYSEPRPIGTRYLTKPL

SEQ ID NO: 544 - protein, 598 aa, Artificial Sequence
  Description of Artificial Sequence: Synthetic polypeptide
TAPTGDKRKGEDEPRLPDTSSQTPKKNKKPRKERPSGGAEDPGEGTSSNAGAAAPASSVGSSIMAEGGGGPVGDAGQGADGVGNSSGNWHCDSQWLENGVVTRTTRTWVLPSYNNHLYKRIQGPSGGDNNNKFFGFSTPWGYFDYNRFHCHFSPRDWQRLINNNWGIRPKAMRFRLFNIQVKEVTVQDFNTTIGNNLTSTVQVFADKDYQLPYVLGSATEGTFPPFPADIYTIPQYGYCTLNYNNEAVDRSAFYCLDYFPSDMLRTGNNFEFTYTFEDVPFHSMFAHNQTLDRLMNPLVDQYLWAFSSVSQAGSSGRALHYSRATKTNMAAQYRNWLPGPFFRDQQIFTGASNITKNNVFSVWEKGKQWELDNRTNLMQPGPAAATTFSGEPDRQAMQNTLAFSRTVYDQTTATTDRNQILITNEDEIRPTNSVGIDAWGAVPTNNQSIVTPGTRAAVNNQGALPGMVWQNRDIYPTGTHLAKIPDTDNHFHPSPLIGRFGCKHPPPQIFIKNTPVPANPSETFQTAKVASFINQYSTGQCTVEIFWELKKETSKRWNPEIQFTSNFGNAADIQFAVSDTGSYSEPRPIGTRYLTKPL

SEQ ID NO: 545 - DNA, 4694 bp, Artificial Sequence
  Description of Artificial Sequence: Synthetic polynucleotide
tggccagtttccaagacaggctcgctcgctcactcgggccggggccccaaaggggcccctagcgaccgcttcgcggtcgcggcccgagtgagcgagcgagcctgtcttggaaactggccagcactccggtgaggtaatgccgtcacgtggtcgggaatgggaacgggaaatctcgcgagaacgtaaacaaatataagacggcgccacacggcgctgcgtcatacgcgcgcgcgcaccggcgagatgaggtcgtactacgaggtcatcgttcagctgcccaacgacgtcgagagtcaggtacctggaatctccgattcgttcgtcaactggattacgtcgcgagaatggacgttgcctgaggacgccgattgggatttggaccaggtcgatcaagttcaactgacgctcggcgacaaaatccaacgggagattcgaactcattgggggacgatggccaaagaaccggactttcactattttatccaactggaacaaggtgaggtgttctttcatttacacgtcctgctggaaacgtgttccgtaaagccgatggtactcggaagatatatccgacatattcaacaaaaaattgtgagtaaagtctactgcgccacgagcctacgatggaaggatggatgcgtggtgaccaagaccaaaaatttcgggggcgcgaacaaggtccgggccgagtcgtatattcccgcctacctgatcccgaaacagcaaccggaagtgcagtgggcgtggactaacgtgcccgagtatataaaagcgtgcttgcaccgagaactgcgtgccagtctcgcgcgacttcacttcgaggaggcgggcgtctcgcaatccaaggaaaatctcgcgagaactgcagacggcgctcccgtgatgccgacccgcgtcagcaaacgctacatggagctcgtggattggctcgtggagaaggggatcaccaccgagaaggaatggctgctggaaaacagagaaagctttcggagctttcaggcctcgagcaactcggcgcgtcagatcaagacggccctgcaaggcgccattcaggagatgcttctgaccaagacggcggaggactacctcgtcggaaaggatcccgtctcggacgacgacatccgtcagaaccgcatctacaagattctggaactgaaccactacgacccagcgtacgtggggagtattttggtcgggtggtgccagaagaaatggggcaagcgaaacacgctgtggctgttcggacatgcgaccaccggcaagaccaacatcgcggaggctattgcccatgctgtgccgttctatggatgcgttaactggaccaacgagaactttccgttcaacgactgcgtcgaaaaaatgattatctggtgggaggagggcaaaatgaccgccaaagtggtggaaacagccaaggcgattctgggaggatctcgggtgagagtggaccaaaaatgcaaagcttcggttccgatcgaaccgacgccggtcattattaccagtaacaccaacatgtgttatgtcatcgacgggaacacgaccacgttcgagcataagcagccgttggaggacaggatgtttaagctcgaattgctgactcggttgcctgatgactttggtaaggtgaccaaacaggaggtgcgtcaattcttcaggtggtctcaggatcacctgacccctgtgatcccagaattcctagtgcggaaggcggagtctcgcaaaagacccgccccttccggggaaggctatataagcccgacaaagcggcccgcgctcgcagagcagcagcaggcgtcggagagcgcggacccggttcccaccaggtatcgtatcaaatgctcgaaacattgcggtatggataaaatgttgtttccttgccaaatttgtgaatcgatgaacagagatattaatatttgtgctattcataaaacgaccgactgtaaagagtgtttccccgactacggggataaagatgatgtagaactacccccctgtacagaacacaacgtgtctcgttgttatcaatgtcattcgggcgaattgtatcgcgtgacttcggactctgacgagaaacctgcccccgagagtgatgaaggcaccgagccatcctatgctccctgcacgattcaccacctgatgggcaagagtcacgggttagtcacttgcgcggcgtgtcggttgaaaaatagtacgttgcatgatgacttggatgacggtgatctcgaacaataaatgattgaaatgtagccatgtctctcatttctgatgcgattccagattggttggagcggttggtcaaaaagggagtgaatgctgcagctgatttctaccatttggaaagcggtcctcctcgtcctaaggcaaatcagcaaactcaagaatctcttgaaaaggacgattcgagaggtctcgtgttcccaggctacaattatctaggccctttcaacggtctagataaaggagaacccgtcaacgaggcagacgctgccgccttagaacacgacaaggcttacgacctcgaaatcaaggacgggcacaacccgtactttgagtacaacgaggccgacagacgtttccaggaacgtctcaaagacgatacctcctttggaggcaatttaggtaaagccatcttccaggccaaaaagagggttctcgaaccctttggtctggtggaagactcaaagacggctccgaccggagacaagcggaaaggcgaagacgaacctcgtttgcccgacacttcttcacagactcccaagaaaaacaagaagcctcgcaaggaaagaccttccggcggggcagaagatccgggcgaaggcacctcttccaacgctggagcagcagcacccgcctctagtgtgggatcatctatcatggctgaaggaggtggcggcccagtgggcgatgcaggccagggtgccgatggagtgggcaattcctccggaaattggcattgcgattcccaatggctggaaaacggagtcgtcactcgaaccacccgaacctgggtcttgcccagctacaacaaccacctgtacaaacgaatccaaggacccagcggaggcgacaacaacaacaaattctttggattcagcaccccctggggatactttgactacaatcgattccactgccacttttccccgcgagactggcaacgactcatcaacaacaactggggcatccgtcccaaagcgatgcgctttagactctttaacatccaggttaaagaggtcacggtccaagacttcaacaccaccatcggcaacaacctcaccagtacggtccaggtctttgcggacaaggactaccaactgccgtacgtcctcggatcggctaccgaaggcaccttcccgccgttcccagcggatatctacacgatcccgcagtacgggtactgcacgctaaactacaacaacgaggcggtggatcgttcggccttctactgtctggactactttccctcagacatgctgcggacaggaaataactttgagtttacttacaccttcgaggacgttcctttccatagcatgtttgcccacaaccagacgctagaccggctgatgaatcccctcgtggatcagtacctctgggctttcagctccgtcagccaagcaggctcatctggacgagctcttcattactcgcgggcgactaaaaccaacatggcggctcaatataggaactggttacctgggcctttcttccgtgatcagcaaatctttacgggcgctagcaacatcactaaaaataacgtctttagcgtttgggaaaaaggcaagcaatgggaactcgacaatcggaccaacctaatgcagcccggtcctgcggcagcgaccacctttagcggagaacctgaccgtcaagccatgcaaaacacgctggcttttagcaggaccgtctacgatcaaacgaccgccacgaccgatcgtaaccagatactcatcaccaacgaagacgaaatcagacccaccaactcggtcggtatcgacgcgtggggagcagttcccaccaacaaccagtcgatcgtgacccccggcactcgcgcggccgtcaacaatcaaggggcgcttcccgggatggtgtggcaaaacagagacatttaccctacagggacccatttggccaaaattcccgacactgacaatcacttccatccgtccccgcttattgggcggtttggctgcaagcatccccctccccagattttcattaaaaacacacccgtccctgccaacccttcggaaacgttccagacggccaaagtggcctccttcatcaaccagtactcgaccggacagtgcaccgtcgaaatcttttgggaactcaagaaggaaacctccaagcgctggaaccccgaaatccagttcacctccaactttggcaacgcggccgacatccagtttgccgtctccgacacgggatcctattccgaacctcgtcccatcggtacccgttaccttaccaaacctctgtaaattaaacccttcaataaaccgtttatgcgtaactgtatttccgtctcctgtcgttattcagtcacatgatgcggcattacctcaccggagtgctggccagtttccaagacaggctcgctcgctcactcgggccggggccccaaaggggcccctagcgaccgcttcgcggtcgcggcccgagtgagcgagcgagcctgtcttggaaactggcca

SEQ ID NO: 546 - DNA, 2211 bp, Artificial Sequence
  Description of Artificial Sequence: Synthetic polynucleotide
atggctgctgatggttatcttccagattggctcgaggacactctctctgaaggaataagacagtggtggaagctcaaacctggcccaccaccaccaaagcccgcagagcggcataaggacgacagcaggggtcttgtgcttcctgggtacaagtacctcggacccttcaacggactcgacaagggagagccggtcaacgaggcagacgcagcggccctcgagcacgacaaggcctacgaccagcagctcaaggccggtgacaacccctacctcaagtacaaccacgccgacgcggagttccagcagcggcttcagggcgacacatcgtttgggggcaacctcggcagagcagtcttccaggccaaaaagagggttcttgaacctcttggtctggttgagcaagcgggtgagacggctcctggaaagaagagaccgttgattgaatccccccagcagcccgactcctccacgggtatcggcaaaaaaggcaagcagccggctaaaaagagactcaattttggtcagactggcgactcagagtcagtccccgacccacaacctctcggagaacctccagcaacccccgctgctgtgggacctactacaatggcttcaggtggtggcgcaccaatggcagacaataacgaaggcgccgacggagtgggtaatgcctcaggaaattggcattgcgattccacatggctgggcgacagagtcatcaccaccagcacccgcacctgggccttgcccacctacaataaccacctctacaagcaaatctccagtgcttcaacgggggccagcaacgacaaccactacttcggctacagcaccccctgggggtattttgacttcaacagattccactgccacttttcaccacgtgactggcagcgactcatcaacaacaattggggattccggcccaagagactcaacttcaaactcttcaacatccaagtcaaggaggtcacgacgaatgatggcgtcacaaccatcgctaataaccttaccagcacggttcaagtcttctcggactcagactatcagctcccgtacgtgctcgggtcggctcacgagggctgcctcccgccgttcccagcagacgtcttcatggtgccacagtatggatacctcaccctgaacaacgggagtcaggcagtaggacgctcttcattttactgcctggagtactttccttctcagatgctgcgtaccggaaacaactttaccttcagctacacttttgaggacgttcctttccacagcagctacgctcacagccagagtctggaccgtctcatgaatcctctcatcgaccagtacctgtattacctgaacagaactcagaatcagtccggaagtgcccaaaacaaggacttgctgtttagccgggggtctccagctggcatgtctgttcagcccaaaaactggctacctggaccctgttatcggcagcagcgcgtttctaaaacaaaaacagacaacaacaacagcaactttacctggactggtgcttcaaaatataaccttaatgggcgtgaatctataatcaaccctggcactgctatggcctcacacaaagacgacaaagacaagttctttcccatgagcggtgtcatgatttttggaaaggagagcgccggagcttcaaacactgcattggacaatgtcatgatcacagacgaagaggaaatcaaagccactaaccccgtggccaccgaaagatttgggactgtggcagtcaatctccagagcagcagcacagaccctgcgaccggagatgtgcatgttatgggagccttacctggaatggtgtggcaagacagagacgtatacctgcagggtcccatttgggccaaaattcctcacacagatggacactttcacccgtctcctcttatgggcggctttggactcaagaacccgcctcctcagatcctcatcaaaaacacgcctgttcctgcgaatcctccggcggagttttcagctacaaagtttgcttcattcatcacccaatactccacaggacaagtgagtgtggaaattgaatgggagctgcagaaagaaaacagcaagcgctggaatcccgaagtgcagtacacatccaattatgcaaaatctgccaacgttgattttactgtggacaacaatggactttatactgagcctcgccccattggcacccgttacctcacccgtcccctgtaa

SEQ ID NO: 547 - protein, 736 aa, Artificial Sequence
  Description of Artificial Sequence: Synthetic polypeptide
MAADGYLPDWLEDTLSEGIRQWWKLKPGPPPPKPAERHKDDSRGLVLPGYKYLGPFNGLDKGEPVNEADAAALEHDKAYDQQLKAGDNPYLKYNHADAEFQQRLQGDTSFGGNLGRAVFQAKKRVLEPLGLVEQAGETAPGKKRPLIESPQQPDSSTGIGKKGKQPAKKRLNFGQTGDSESVPDPQPLGEPPATPAAVGPTTMASGGGAPMADNNEGADGVGNASGNWHCDSTWLGDRVITTSTRTWALPTYNNHLYKQISSASTGASNDNHYFGYSTPWGYFDFNRFHCHFSPRDWQRLINNNWGFRPKRLNFKLFNIQVKEVTTNDGVTTIANNLTSTVQVFSDSDYQLPYVLGSAHEGCLPPFPADVFMVPQYGYLTLNNGSQAVGRSSFYCLEYFPSQMLRTGNNFTFSYTFEDVPFHSSYAHSQSLDRLMNPLIDQYLYYLNRTQNQSGSAQNKDLLFSRGSPAGMSVQPKNWLPGPCYRQQRVSKTKTDNNNSNFTWTGASKYNLNGRESIINPGTAMASHKDDKDKFFPMSGVMIFGKESAGASNTALDNVMITDEEEIKATNPVATERFGTVAVNLQSSSTDPATGDVHVMGALPGMVWQDRDVYLQGPIWAKIPHTDGHFHPSPLMGGFGLKNPPPQILIKNTPVPANPPAEFSATKFASFITQYSTGQVSVEIEWELQKENSKRWNPEVQYTSNYAKSANVDFTVDNNGLYTEPRPIGTRYLTRPL

SEQ ID NO: 548 - DNA, 2211 bp, Artificial Sequence
  Description of Artificial Sequence: Synthetic polynucleotide
atggcttccgatggttatcttccagattggctcgaggacaacctctctgagggcatccgcgagtggtgggacttgaaacctggagccccgaaacccaaagccaaccagcaaaagcaggacgacggccggggtctggtgcttcctggctacaagtacctcggacccttcaacggactcgacaagggggagcccgtcaacgcggcggatgcagcggccctcgagcacgacaaggcctacgaccagcagctcagagcgggtgacaatccgtacctgcggtataaccacgccgacgccgagtttcaggagcgtctgcaagaagatacgtcttttgggggcaacctcgggcgagcagtcttccaggccaagaagagggttctcgaaccttttggtctggttgaggaaggtgctaagacggctcctggaaagaaacgtccggtagagcagtcgccacaagagccagactcctcctcgggcattggcaagacaggccagcagcccgctaaaaagagactcaattttggtcagactggcgactcagagtcagtccccgacccacaacctctcggagaacctccagcaacccccgctgctgtgggacctactacaatggcttcaggcggtggcgcaccaatggcagacaataacgaaggcgccgacggagtgggtaatgcctcaggaaattggcattgcgattccacatggctgggcgacagagtcatcaccaccagcacccgaacatgggccttgcccacctataacaaccacctctacaagcaaatctccagtgcttcaacgggggccagcaacgacaaccactacttcggctacagcaccccctgggggtattttgatttcaacagattccactgccatttctcaccacgtgactggcagcgactcatcaacaacaattggggattccggcccaagagactcaacttcaaactcttcaacatccaagtcaaggaggtcacgacgaatgatggcgtcacaaccatcgctaataaccttaccagcacggttcaagtcttctcggactcggagtaccagcttccgtacgtcctcggctctgcgcaccagggctgcctccctccgttcccggcggacgtgttcatgattccgcagtacggctacctaacgctcaacaatggcagccaggcagtgggacggtcatccttttactgcctggaatatttcccatcgcagatgctgagaacgggcaataactttaccttcagctacaccttcgaggacgtgcctttccacagcagctacgcgcacagccagagcctggaccggctgatgaatcctctcatcgaccagtacctgtattacctgaacagaactcagaatcagtccggaagtgcccaaaacaaggacttgctgtttagccgggggtctccagctggcatgtctgttcagcccaaaaactggctacctggaccctgttaccggcagcagcgcgtttctaaaacaaaaacagacaacaacaacagcaactttacctggactggtgcttcaaaatataaccttaatgggcgtgaatctataatcaaccctggcactgctatggcctcacacaaagacgacaaagacaagttctttcccatgagcggtgtcatgatttttggaaaggagagcgccggagcttcaaacactgcattggacaatgtcatgatcacagacgaagaggaaatcaaagccactaaccccgtggccaccgaaagatttgggactgtggcagtcaatctccagagcagcagcacagaccctgcgaccggagatgtgcatgttatgggagccttacctggaatggtgtggcaagacagagacgtatacctgcagggtcccatttgggccaaaattcctcacacagatggacactttcacccgtctcctcttatgggcggctttggacttaagcacccgcctcctcagatcctcatcaaaaacacgcctgttcctgcgaatcctccggcagagttttcggctacaaagtttgcttcattcatcacccagtattctactggccaagtcagcgtggagattgaatgggagctgcagaaagaaaacagcaaacgctggaatcccgaagtgcagtatacatctaactatgcaaaatctgccaacgttgatttcactgtggacaacaatggactttatactgagcctcgtcccattggcacccgttacctcacccgtcccctgtaa

SEQ ID NO: 549 - protein, 736 aa, Artificial Sequence
  Description of Artificial Sequence: Synthetic polypeptide
MASDGYLPDWLEDNLSEGIREWWDLKPGAPKPKANQQKQDDGRGLVLPGYKYLGPFNGLDKGEPVNAADAAALEHDKAYDQQLRAGDNPYLRYNHADAEFQERLQEDTSFGGNLGRAVFQAKKRVLEPFGLVEEGAKTAPGKKRPVEQSPQEPDSSSGIGKTGQQPAKKRLNFGQTGDSESVPDPQPLGEPPATPAAVGPTTMASGGGAPMADNNEGADGVGNASGNWHCDSTWLGDRVITTSTRTWALPTYNNHLYKQISSASTGASNDNHYFGYSTPWGYFDFNRFHCHFSPRDWQRLINNNWGFRPKRLNFKLFNIQVKEVTTNDGVTTIANNLTSTVQVFSDSEYQLPYVLGSAHQGCLPPFPADVFMIPQYGYLTLNNGSQAVGRSSFYCLEYFPSQMLRTGNNFTFSYTFEDVPFHSSYAHSQSLDRLMNPLIDQYLYYLNRTQNQSGSAQNKDLLFSRGSPAGMSVQPKNWLPGPCYRQQRVSKTKTDNNNSNFTWTGASKYNLNGRESIINPGTAMASHKDDKDKFFPMSGVMIFGKESAGASNTALDNVMITDEEEIKATNPVATERFGTVAVNLQSSSTDPATGDVHVMGALPGMVWQDRDVYLQGPIWAKIPHTDGHFHPSPLMGGFGLKHPPPQILIKNTPVPANPPAEFSATKFASFITQYSTGQVSVEIEWELQKENSKRWNPEVQYTSNYAKSANVDFTVDNNGLYTEPRPIGTRYLTRPL

SEQ ID NO: 550 - DNA, 2211 bp, Artificial Sequence
  Description of Artificial Sequence: Synthetic polynucleotide
atggctgctgatggttatcttccagattggctcgaggacactctctctgaaggaataagacagtggtggaagctcaaacctggcccaccaccaccaaagcccgcagagcggcataaggacgacagcaggggtcttgtgcttcctgggtacaagtacctcggacccttcaacggactcgacaagggagagccggtcaacgaggcagacgcagcggccctcgagcacgacaaggcctacgaccagcagctcaaggccggtgacaacccctacctcaagtacaaccacgccgacgcggagttccagcagcggcttcagggcgacacatcgtttgggggcaacctcggcagagcagtcttccaggccaaaaagagggttcttgaacctcttggtctggttgagcaagcgggtgagacggctcctggaaagaagagaccgttgattgaatccccccagcagcccgactcctccacgggtatcggcaaaaaaggcaagcagccggctaaaaagagactcaattttggtcagactggcgactcagagtcagtccccgacccacaacctctcggagaacctccagcaacccccgctgctgtgggacctactacaatggcttcaggtggtggcgcaccaatggcagacaataacgaaggcgccgacggagtgggtaatgcctcaggaaattggcattgcgattccacatggctgggcgacagagtcatcaccaccagcacccgcacctgggccttgcccacctacaataaccacctctacaagcaaatctccagtgcttcaacgggggccagcaacgacaaccactacttcggctacagcaccccctgggggtattttgacttcaacagattccactgccacttttcaccacgtgactggcagcgactcatcaacaacaattggggattccggcccaagagactcaacttcaaactcttcaacatccaagtcaaggaggtcacgacgaatgatggcgtcacaaccatcgctaataaccttaccagcacggttcaagtcttctcggactcagactatcagctcccgtacgtgctcgggtcggctcacgagggctgcctcccgccgttcccagcagacgtcttcatggtgccacagtatggatacctcaccctgaacaacgggagtcaggcagtaggacgctcttcattttactgcctggagtactttccttctcagatgctgcgtaccggaaacaactttaccttcagctacacttttgaggacgttcctttccacagcagctacgctcacagccagagtctggaccgtctcatgaatcctctcatcgaccagtacctgtattacctgaacagaactcagaatcagtccggaagtgcccaaaacaaggacttgctgtttagccgggggtctccaactggcatgtctgttcagcccaaaaactggctacctggaccctgttatcggcagcagcgcgtttctaaaacaaaaacagacaacaacaacagcaactttacctggactggtgcttcaaaatataaccttaatgggcgtgaatctataatcaaccctggcactgctatggcctcacacaaagacgacaaagacaagttctttcccatgagcggtgtcatgatttttggaaaggagagcgccggagcttcaaacactgcattggacaatgtcatgatcacagacgaagaggaaatcaaagccactaaccccgtggccactgaaagatttgggactgtggcagtcaatctccagagcagcagcacagaccctgcgaccggagatgtgcatgccatgggagccttacctggaatggtgtggcaagacagagacgtatacctgcagggtcctatttgggccaaaattcctcacacggatggacactttcacccgtctcctctcatgggcggctttggactcaagaacccgcctcctcagatcctcatcaaaaacacgcctgttcctgcgaatcctccggcggagttttcagctacaaagtttgcttcattcatcacccagtattccacaggacaagtgagcgtggagattgaatgggagctgcagaaagaaaacagcaaacgctggaatcccgaagtgcagtatacatctaactatgcaaaatctgccaacgttgatttcactgtggacaacaatggactttatactgagcctcgccccattggcacccgttacctcacccgtcccctgtaa

SEQ ID NO: 551 - protein, 736 aa, Artificial Sequence
  Description of Artificial Sequence: Synthetic polypeptide
MAADGYLPDWLEDTLSEGIRQWWKLKPGPPPPKPAERHKDDSRGLVLPGYKYLGPFNGLDKGEPVNEADAAALEHDKAYDQQLKAGDNPYLKYNHADAEFQQRLQGDTSFGGNLGRAVFQAKKRVLEPLGLVEQAGETAPGKKRPLIESPQQPDSSTGIGKKGKQPAKKRLNFGQTGDSESVPDPQPLGEPPATPAAVGPTTMASGGGAPMADNNEGADGVGNASGNWHCDSTWLGDRVITTSTRTWALPTYNNHLYKQISSASTGASNDNHYFGYSTPWGYFDFNRFHCHFSPRDWQRLINNNWGFRPKRLNFKLFNIQVKEVTTNDGVTTIANNLTSTVQVFSDSDYQLPYVLGSAHEGCLPPFPADVFMVPQYGYLTLNNGSQAVGRSSFYCLEYFPSQMLRTGNNFTFSYTFEDVPFHSSYAHSQSLDRLMNPLIDQYLYYLNRTQNQSGSAQNKDLLFSRGSPTGMSVQPKNWLPGPCYRQQRVSKTKTDNNNSNFTWTGASKYNLNGRESIINPGTAMASHKDDKDKFFPMSGVMIFGKESAGASNTALDNVMITDEEEIKATNPVATERFGTVAVNLQSSSTDPATGDVHAMGALPGMVWQDRDVYLQGPIWAKIPHTDGHFHPSPLMGGFGLKNPPPQILIKNTPVPANPPAEFSATKFASFITQYSTGQVSVEIEWELQKENSKRWNPEVQYTSNYAKSANVDFTVDNNGLYTEPRPIGTRYLTRPL

SEQ ID NO: 552 - DNA, 2211 bp, Artificial Sequence
  Description of Artificial Sequence: Synthetic polynucleotide
atggctgccgatggttatcttccagattggctcgaggacaacctctctgagggcattcgcgagtggtgggcgctgaaacctggagccccgaagcccaaagccaaccagcaaaagcaggacgacggccggggtctggtgcttcctggctacaagtacctcggacccttcaacggactcgacaagggggagcccgtcaacgcggcggatgcagcggccctcgagcacgacaaggcctacgaccagcagctcaaagcgggtgacaatccgtacctgcggtataaccacgccgacgccgagtttcaggagcgtctgcaagaagatacgtcttttgggggcaacctcgggcgagcagtcttccaggccaagaagcgggttctcgaacctctcggtctggttgaggaaggcgctaagacggctcctggaaagaaacgtccggtagagcaatcgccacaagagccagactcctcctcgggcatcggcaagacaggccagcagcccgctaaaaagagactcaattttggtcagactggcgactcagagtcagtccccgacccacaacctctcggagaacctccagcaacccccgctgctgtgggacctactacaatggcttcaggcggtggcgcaccaatggcagacaataacgaaggcgccgacggagtgggtaatgcctcaggaaattggcattgcgattccacatggctgggcgacagagtcatcaccaccagcacccgaacatgggccttgcccacctataacaaccacctctacaagcaaatctccagtgcttcgacgggggccagcaacgacaaccactacttcggctacagcaccccctgggggtattttgactttaacagattccactgccacttttcaccacgtgactggcagcgactcatcaacaacaactggggattccggcccaagagactcagcttcaagctcttcaacatccaggtcaaggaggtcacgacgaatgatggcgtcacaaccatcgctaataaccttaccagcacggttcaagtcttctcggactcggagtaccagcttccgtacgtcctcggctctgcgcaccagggctgcctccctccgttcccggcggacgtgttcatgattccgcaatacggctacctgacgctcaacaatggcagccaagccgtgggacgttcatccttttactgcctggaatatttcccttctcagatgctgagaacgggcaacaactttaccttcagctacacctttgaggaagtgcctttccacagcagctacgcgcacagccagagcctggaccggctgatgaatcctctcatcgatcaatacctgtattacctgaacagaactcaaaatcagtccggaagtgcccaaaacaaggacttgctgtttagccgtgggtctccagctggcatgtctgttcagcccaaaaactggctacctggaccctgttatcggcagcagcgcgtttctaaaacaaaaacagacaacaacaacagcaattttacctggactggtgcttcaaaatataacctcaatgggcgtgaatccatcatcaaccctggcactgctatggcctcacataaagacgacgaagacaagttctttcccatgagcggtgtcatgatttttggaaaagagagcgccggagcttcaaacactgcattggacaatgtcatgattacagacgaagaggaaattaaagccactaaccctgtggccaccgaaagatttgggaccgtggcagtcaatttccagagcagcagcacagaccctgcgaccggagatgtgcatgctatgggagcattacctggcatggtgtggcaagatagagacgtgtacctgcagggtcccatttgggccaaaattcctcacacagatggacactttcacccgtctcctcttatgggcggctttggactcaagaacccgcctcctcagatcctcatcaaaaacacgcctgttcctgcgaatcctccggcggagttttcagctacaaagtttgcttcattcatcacccaatactccacaggacaagtgagcgtggagattgaatgggagctgcagaaagaaaacagcaaacgctggaatcccgaagtgcagtatacatctaactatgcaaaatctgccaacattgatttcactgtggacaacaatggactttatactgagcctcgccccattggcacccgttacctcacccgtccccagtaa

SEQ ID NO: 553 - protein, 736 aa, Artificial Sequence
  Description of Artificial Sequence: Synthetic polypeptide
MAADGYLPDWLEDNLSEGIREWWALKPGAPKPKANQQKQDDGRGLVLPGYKYLGPFNGLDKGEPVNAADAAALEHDKAYDQQLKAGDNPYLRYNHADAEFQERLQEDTSFGGNLGRAVFQAKKRVLEPLGLVEEGAKTAPGKKRPVEQSPQEPDSSSGIGKTGQQPAKKRLNFGQTGDSESVPDPQPLGEPPATPAAVGPTTMASGGGAPMADNNEGADGVGNASGNWHCDSTWLGDRVITTSTRTWALPTYNNHLYKQISSASTGASNDNHYFGYSTPWGYFDFNRFHCHFSPRDWQRLINNNWGFRPKRLSFKLFNIQVKEVTTNDGVTTIANNLTSTVQVFSDSEYQLPYVLGSAHQGCLPPFPADVFMIPQYGYLTLNNGSQAVGRSSFYCLEYFPSQMLRTGNNFTFSYTFEEVPFHSSYAHSQSLDRLMNPLIDQYLYYLNRTQNQSGSAQNKDLLFSRGSPAGMSVQPKNWLPGPCYRQQRVSKTKTDNNNSNFTWTGASKYNLNGRESIINPGTAMASHKDDEDKFFPMSGVMIFGKESAGASNTALDNVMITDEEEIKATNPVATERFGTVAVNFQSSSTDPATGDVHAMGALPGMVWQDRDVYLQGPIWAKIPHTDGHFHPSPLMGGFGLKNPPPQILIKNTPVPANPPAEFSATKFASFITQYSTGQVSVEIEWELQKENSKRWNPEVQYTSNYAKSANIDFTVDNNGLYTEPRPIGTRYLTRPQ

SEQ ID NO: 554 - DNA, 2211 bp, Artificial Sequence
  Description of Artificial Sequence: Synthetic polynucleotide
atggctgccgatggttatcttccagattggctcgaggacaacctctctgagggcattcgcgagtggtgggacttgaaacctggagccccgaaacccaaagccaaccagcaaaagcaggacgacggccggggtctggtgcttcctggctacaagtacctcggacccttcaacggactcgacaagggggagcccgtcaacgcggcggatgcagcggccctcgagcacgacaaggcctacgaccagcagctcaaagcgggtgacaatccgtaccttcggtataaccacgccgacgccgagtttcaggagcgtctgcaagaagatacgtcttttgggggcaacctcgggcgagcagtcttccaggccaaaaagagggttctcgaacctctcggtctggttgaggaagcggctaagacggctcctggaaagaaacgtccggtagagcagtcgccacaagagccagactcctcctcgggcattggcaagacaggccagcagcccgctaaaaagagactcaattttggtcagactggcgactcagagtcagtccccgacccacaacctctcggagaacctcccgcagccccctcaggtgtgggatctcttacaatggcttcaggtggtggcgcaccaatggcagacaataacgaaggcgccgacggagtgggtaatgcctcaggaaattggcattgcgattccacatggctgggcgacagagtcatcaccaccagcacccgcacctgggccttgcccacctacaataaccacctctacaagcaaatctccagtgcttcaacgggggccagcaacgacaaccactacttcggctacagcaccccctgggggtattttgacttcaacagattccactgccacttttcaccacgtgactggcaaagactcatcaacaacaattggggattccggcccaagagactcaacttcaagctcttcaacatccaagtcaaggaggtcacgacgaatgatggcgtcacgaccatcgctaataaccttaccagcacggttcaagtcttctcggactcggagtaccagttgccgtacgtcctcggctctgcgcaccagggctgcctccctccgttcccggcggacgtgttcatgattccgcagtacggctacctaacgctcaacaatggcagccaggcagtgggacggtcatccttttactgcctggaatatttcccatcgcagatgctgagaacgggcaacaactttaccttcagctacacctttgaggaagtgcctttccacagcagctacgcgcacagccagagcctggaccggctgatgaatcctctcatcgaccagtacctgtattacctgaacagaactcaaaatcagtccggaagtgcccaaaacaaggacttgctgtttagccgtgggtctccagctggcatgtctgttcagcccaaaaactggctacctggaccctgttaccggcagcagtgcgtttctaaaacaaaaacagacaacaacaacagcaactttacctggactggtgcttcaaaatataaccttaatgggcgtgaatctataatcaaccctggcactgctatggcctcacacaaagacgacaaagacaagttctttcccatgagcggtgtcatgatttttggaaaggagagcgccggagcttcaaacactgcattggacaatgtcatgatcacagacgaagaggaaatcaaagccactaaccccgtggccaccgaaagatttgggactgtggcagtcaatctccagagcagcagcacagaccctgcgaccggagatgtgcatgttatgggagccttacctggaatggtgtggcaagacagagacgtatacctgcagggtcctatttgggccaaaattcctcacacagatggacactttcacccgtctcctcttatgggcggctttggactcaagaacccgcctcctcagatcctcatcaaaaacacgcctgttcctgcgaatcctccggcggagttttcagctacaaagtttgcttcattcatcacccaatactccacaggacaagtgagcgtggagattgaatgggagctgcagaaagaaaacagcaagcgctggaatcccgaagtgcagtacacatccaattatgcaaaatctgccaacgttgatttcactgtggacaacaatggactttatactgagcctcgccccattggcacccgttacctcacccgtcccctgtaa

SEQ ID NO: 555 - protein, 736 aa, Artificial Sequence
  Description of Artificial Sequence: Synthetic polypeptide
MAADGYLPDWLEDNLSEGIREWWDLKPGAPKPKANQQKQDDGRGLVLPGYKYLGPFNGLDKGEPVNAADAAALEHDKAYDQQLKAGDNPYLRYNHADAEFQERLQEDTSFGGNLGRAVFQAKKRVLEPLGLVEEAAKTAPGKKRPVEQSPQEPDSSSGIGKTGQQPAKKRLNFGQTGDSESVPDPQPLGEPPAAPSGVGSLTMASGGGAPMADNNEGADGVGNASGNWHCDSTWLGDRVITTSTRTWALPTYNNHLYKQISSASTGASNDNHYFGYSTPWGYFDFNRFHCHFSPRDWQRLINNNWGFRPKRLNFKLFNIQVKEVTTNDGVTTIANNLTSTVQVFSDSEYQLPYVLGSAHQGCLPPFPADVFMIPQYGYLTLNNGSQAVGRSSFYCLEYFPSQMLRTGNNFTFSYTFEEVPFHSSYAHSQSLDRLMNPLIDQYLYYLNRTQNQSGSAQNKDLLFSRGSPAGMSVQPKNWLPGPCYRQQCVSKTKTDNNNSNFTWTGASKYNLNGRESIINPGTAMASHKDDKDKFFPMSGVMIFGKESAGASNTALDNVMITDEEEIKATNPVATERFGTVAVNLQSSSTDPATGDVHVMGALPGMVWQDRDVYLQGPIWAKIPHTDGHFHPSPLMGGFGLKNPPPQILIKNTPVPANPPAEFSATKFASFITQYSTGQVSVEIEWELQKENSKRWNPEVQYTSNYAKSANVDFTVDNNGLYTEPRPIGTRYLTRPL

SEQ ID NO: 556 - DNA, 2211 bp, Artificial Sequence
  Description of Artificial Sequence: Synthetic polynucleotide
atggctgccgatggttatcttccagattggctcgaggacaacctctctgagggcattcgcgaatggtgggacttgaaacctggagccccgaaacccaaagtcaaccagcaaaagcaggacaacgctcggggtcttgtgcttccgggttacaaatacctcggacccttcaacggactcgacaagggggagcccgtcaacgcggcggacgcagcggccctcgagcacgacaaggcctacgaccagcagctcaaagcgggtgacaatccgtaccttcggtataaccacgccgacgccgagtttcaggagcgtctgcaagaagatacgtcttttgggggcaaccttggacgagcagtcttccaggccaagaagagggttctcgaaccttttggtctggttgaggaaggtgctaagacggctcctggaaagaaacgtccggtagagcagtcgccacaagagccagactcctcctcgggcattggcaagacaggccagcagcccgctaaaaagagactcaattttggtcagactggcgactcagagtcagtccccgacccacaacctctcggagaacctccagcaacccccgctgctgtgggacctactacaatggcttcaggcggtggcgcaccaatggcagacaataacgaaggcgccgacggagtgggtaatgcctcaggaaattggcattgcgattccacatggctgggcgacagagtcatcaccaccagcacccgcacctgggccttgcccacctacaataaccacctctacaagcaaatctccagtgcttcaacgggggccagcaacgacaaccactacttcggctacagcaccccctgggggtattttgacttcaacagattccactgccacttttcaccacgtgactggcaaagactcatcaacaacaattggggattccggcccaagagactcaacttcaagctcttcaacatccaagtcaaggaggtcacgacgaatgatggcgtcacgaccatcgctaataaccttaccagcacggttcaagtcttctcggactcggagtaccagttgccgtacgtcctcggctctgcgcaccagggctgcctccctccgttcccggcggacgtgttcatgattccgcaatacggctacctgacgctcaacaatggcagccaggcagtgggacggtcatccttttactgcctggaatatttcccatcgcagatgctgagaacgggcaataactttaccttcagctacacttttgaggacgttcctttccacagcagctacgctcacagccagagcctggaccggctgatgaatcctctcatcgaccagtacctgtattacctgaacagaactcagaatcagtccggaagtgcccaaaacaaggacttgctgtttagccgtgggtctccaactggcatgtctgttcagcccaaaaactggctacctggaccctgttatcggcagcagcgcgtttctaaaacaaaaacagacaacaacaacagcaactttacctggactggtgcttcaaaatataaccttaatgggcgtgaatctataatcaaccctggcactgctatggcctcacacaaagacgacgaagacaagttctttcccatgagcggtgtcatgatttttggaaaggagagcgccggagcttcaaacactgcattggacaatgtcatgatcacagacgaagaggaaatcaaagccactaaccccgtggccactgaaagatttgggactgtggcagtcaatctccagagcagcagcacagaccctgcgaccggagatgtgcatgccatgggagccttacctggaatggtgtggcaagacagagacgtatacctgcagggtcctatttgggccaaaattcctcacacggatggacactttcacccgtctcctctcatgggcggctttggacttaagcacccgcctcctcagatcctcatcaaaaacacgcctgttcctgcgaatcctccggcagagttttcggctacaaagtttgcttcattcatcacccagtattccacaggacaagtgagcgtggagattgaatgggagctgcagaaagaaaacagcaaacgctggaatcccgaagtgcagtatacatctaactatgcaaaatctgccaacgttgatttcactgtggacaacaatggactttatactgagcctcgccccattggcacccgttacctcacccgtcccctgtaa

SEQ ID NO: 557 - protein, 736 aa, Artificial Sequence
  Description of Artificial Sequence: Synthetic polypeptide
MAADGYLPDWLEDNLSEGIREWWDLKPGAPKPKVNQQKQDNARGLVLPGYKYLGPFNGLDKGEPVNAADAAALEHDKAYDQQLKAGDNPYLRYNHADAEFQERLQEDTSFGGNLGRAVFQAKKRVLEPFGLVEEGAKTAPGKKRPVEQSPQEPDSSSGIGKTGQQPAKKRLNFGQTGDSESVPDPQPLGEPPATPAAVGPTTMASGGGAPMADNNEGADGVGNASGNWHCDSTWLGDRVITTSTRTWALPTYNNHLYKQISSASTGASNDNHYFGYSTPWGYFDFNRFHCHFSPRDWQRLINNNWGFRPKRLNFKLFNIQVKEVTTNDGVTTIANNLTSTVQVFSDSEYQLPYVLGSAHQGCLPPFPADVFMIPQYGYLTLNNGSQAVGRSSFYCLEYFPSQMLRTGNNFTFSYTFEDVPFHSSYAHSQSLDRLMNPLIDQYLYYLNRTQNQSGSAQNKDLLFSRGSPTGMSVQPKNWLPGPCYRQQRVSKTKTDNNNSNFTWTGASKYNLNGRESIINPGTAMASHKDDEDKFFPMSGVMIFGKESAGASNTALDNVMITDEEEIKATNPVATERFGTVAVNLQSSSTDPATGDVHAMGALPGMVWQDRDVYLQGPIWAKIPHTDGHFHPSPLMGGFGLKHPPPQILIKNTPVPANPPAEFSATKFASFITQYSTGQVSVEIEWELQKENSKRWNPEVQYTSNYAKSANVDFTVDNNGLYTEPRPIGTRYLTRPL

SEQ ID NO: 558 - DNA, 2208 bp, Artificial Sequence
  Description of Artificial Sequence: Synthetic polynucleotide
  misc_feature (955)..(955): n is a, c, t, or g
  misc_feature (971)..(972): n is a, c, t, or g
  misc_feature (981)..(981): n is a, c, t, or g
  misc_feature (986)..(986): n is a, c, t, or g
  misc_feature (1235)..(1235): n is a, c, t, or g
  misc_feature (1694)..(1696): n is a, c, t, or g
  misc_feature (1698)..(1698): n is a, c, t, or g
  misc_feature (1763)..(1765): n is a, c, t, or g
  misc_feature (1778)..(1778): n is a, c, t, or g
  misc_feature (2204)..(2204): n is a, c, t, or g
atggctgccgatggttatcttccagattggctcgaggacaacctctctgagggcattcgcgaatggtgggacttgaaacctggagccccgaaacccaaagtcaaccagcaaaagcaggacaacgctcggggtcttgtgcttccgggttacaaatacctcggacccttcaacggactcgacaagggggagcccgtcaacgcggcggacgcagcggccctcgagcacgacaaggcctacgaccagcagctcaaagcgggtgacaatccgtaccttcggtataaccacgccgacgccgagtttcaggagcgtctgcaagaagatacgtcttttgggggcaaccttggacgagcagtcttccaggccaagaagagggttctcgaaccttttggtctggttgaggaaggtgctaagacggctcctggaaagaaacgtccggtagagcagtcgccacaagagccagactcctcctcgggcattggcaagacaggccagcagcccgctaaaaagagactcaattttggtcagactggcgactcagagtcagtccccgacccacaacctctcggagaacctccagcaacccccgctgctgtgggacctactacaatggcttcaggcggtggcgcaccaatggcagacaataacgaaggcgccgacggagtgggtaatgcctcaggaaattggcattgcgattccacatggctgggcgacagagtcatcaccaccagcacccgaacatgggccttgcccacctataacaaccacctctacaagcaaatctccagtgcttcaacgggggccagcaacgacaaccactacttcggctacagcaccccctgggggtattttgatttcaacagattccactgccacttttcaccacgtgactggcagcgactcatcaataacaattggggattccggcccaagagactcaacttcaaactcttcaacntccaagtcaaggaggnnacgacgaangatgncgtcacaaccatcgctaataaccttaccagcacggttcaagtcttctcggactcggagtaccagcttccgtacgtcctcggctctgcgcaccagggctgcctccctccgttcccggcggacgtgttcatgattccgcaatacggctacctgacgctcaacaatggcagccaggcagtgggacggtcatccttttactgcctggaatatttcccatcgcagatgctgagaacgggcaataactttacctncagctacacttttgaggacgttcctttccacagcagctacgctcacagccagagcctggaccggctgatgaatcctctcatcgaccagtacctgtattacctgaacagaactcagaatcagtccggaagtgcccaaaacaaggacttgctgtttagccgtgggtctccaactggcatgtctgttcagcccaaaaactggctacctggaccctgttatcggcagcagcgcgtttctaaaacaaaaacagacaacaacaacagcaactttacctggactggtgcttcaaaatataaccttaatgggcgtgaatctataatcaaccctggcactgctatggcctcacacaaagacgacgaagacaagttctttcccatgagcggtgtcatgatttttggaaaggagagcgccggagcttcaaacactgcattggacaatgtcatgatcacagacgaagagannncnaagccactaaccccgtggccactgaaagatttgggactgtggcagtcaatctccaagcagcacannnaccctgcgaccgnagatgtgcatgccatgggagccttacctggaatggtgtggcaagacagagacgtatacctgcagggtcctatttgggccaaaattcctcacacggatggacactttcacccgtctcctctcatgggcggctttggacttaagcacccgcctcctcagatcctcatcaaaaacacgcctgttcctgcgaatcctccggcagagttttcggctacaaagtttgcttcattcatcacccagtattccacaggacaagtgagcgtggagattgaatgggagctgcagaaagaaaacagcaaacgctggaatcccgaagtgcagtatacatctaactatgcaaaatctgccaacgttgatttcactgtggacaacaatggactttatactgagcctcgccccattggcacccgttacctcacccgtccccngtaa

SEQ ID NO: 559 - protein, 723 aa, Artificial Sequence
  Description of Artificial Sequence: Synthetic polypeptide
MAADGYLPDWLEDNLSEGIREWWDLKPGAPKPKVNQQKQDNARGLVLPGYKYLGPFNGLDKGEPVNAADAAALEHDKAYDQQLKAGDNPYLRYNHADAEFQERLQEDTSFGGNLGRAVFQAKKRVLEPFGLVEEGAKTAPGKKRPVEQSPQEPDSSSGIGKTGQQPAKKRLNFGQTGDSESVPDPQPLGEPPATPAAVGPTTMASGGGAPMADNNEGADGVGNASGNWHCDSTWLGDRVITTSTRTWALPTYNNHLYKQISSASTGASNDNHYFGYSTPWGYFDFNRFHCHFSPRDWQRLINNNWGFRPKRLNFKLFNQVKETTDVTTIANNLTSTVQVFSDSEYQLPYVLGSAHQGCLPPFPADVFMIPQYGYLTLNNGSQAVGRSSFYCLEYFPSQMLRTGNNFTSYTFEDVPFHSSYAHSQSLDRLMNPLIDQYLYYLNRTQNQSGSAQNKDLLFSRGSPTGMSVQPKNWLPGPCYRQQRVSKTKTDNNNSNFTWTGASKYNLNGRESIINPGTAMASHKDDEDKFFPMSGVMIFGKESAGASNTALDNVMITDEEATNPVATERFGTVAVNLQSSPATDVHAMGALPGMVWQDRDVYLQGPIWAKIPHTDGHFHPSPLMGGFGLKHPPPQILIKNTPVPANPPAEFSATKFASFITQYSTGQVSVEIEWELQKENSKRWNPEVQYTSNYAKSANVDFTVDNNGLYTEPRPIGTRYLTRP

SEQ ID NO: 560 - DNA, 2208 bp, Artificial Sequence
  Description of Artificial Sequence: Synthetic polynucleotide
atggctgccgatggttatcttccagattggctcgaggacactctctctgaaggaataagacagtggtggaagctcaaacctggcccaccaccaccaaagcccgcagagcggcataaggacgacagcaggggtcttgtgcttcctgggtacaagtacctcggacccttcaacggactcgacaagggagagccggtcaacgaggcagacgccgcggccctcgagcacgacaaagcctatgaccggcagctcgacagcggagacaacccgtacctcaagtacaaccacgccgacgcggagtttcaggagcgccttaaagaagatacgtcttttgggggcaacctcggacgagcagtcttccaggcgaaaaagagggttcttgaacctctgggcctggttgaggaacctgttaagacggctccgggaaaaaagaggccggtagagcactctcctgtggagccagactcctcctcgggaaccggaaaggcgggtcagcagcctgcaagaaaaagattgaattttggtcagactggagacgcagactcagtacctgacccccagcctctcggacagccaccagcagccccctctggtctgggaactaatacgatggctacaggcagtggcgcaccaatggcagacaataacgagggcgccgacggagtgggtaattcctcgggaaattggcattgcgattccacatggatgggcgacagagtcatcaccaccagcacccgaacctgggccctgcccacctacaacaaccacctctacaaacaaatttccagccaatcaggagcctcgaacgacaatcactactttggctacagcaccccttgggggtattttgacttcaacagattccactgccacttttcaccacgtgactggcaaagactcatcaacaacaactggggattccgacccaagagactcaagttcaagctctttaacattcaagtcaaagaggtcacgcagaatgacggtacgacgacgattgccaataaccttaccagcacggttcaggtgtttactgactcggagtaccagctcccgtacgtcctcggctcggcgcatcaaggatgcctcccgccgttcccagcagacgtcttcatggtgccacagtatggatacctcaccctgaacaacgggagtcaggcagtaggacgctcttcattttactgcctggagtactttccttctcagatgctgcgtaccggtaacaactttaccttcagctacacttttgaggacgttcctttccacagcagctacgctcacagccagagtctggaccgtctcatgaatcctctcatcgaccagtacctgtattacttgagcagaacagacgctccaagtggaaccaccacgcagtcaaggcttcagttttctcaggccggagcgagtgacattcgggaccagtctaggaactggcttcctggaccctgttaccgccagcagcgagtatcaaagacatctgcggataacaacaacagtgaatactcgtggactggagctaccaagtaccacctcaatggcagagactctctggtgaatccgggcccggccatggcaagccacaaggacgatgaagaaaagttttttcctcagagcggggttctcatctttgggaagcaaggctcagagaaaacaagtgtggacattgaaaaggtcatgattacagacgaagaggaaatcaggacaaccaatcccgtggctacggagcagtatggttctgtatctaccaacctccagagaggcaacagacaagcagctaccgcagatgtcaacacacaaggcgttcttccaggcatggtctggcaggacagagatgtgtaccttcaggggcccatctgggcaaagattccacacacggacggacattttcacccctctcccctcatgggtggattcggacttaaacaccctcctccacagattctcatcaagaacaccccggtacctgcgaatccttcgaccaccttcagtgcggcaaagtttgcttccttcatcacacagtactccacgggacaggtcagcgtggagatcgagtgggagctgcagaaggaaaacagcaaacgctggaatcccgaagttcagtacacttccaactacaacaagtctgttaatgtggactttactgtggacactaatggcgtgtattcagagcctcgccccattggcaccagatacctgactcgtaatctgtaa

SEQ ID NO: 561 - protein, 735 aa, Artificial Sequence
  Description of Artificial Sequence: Synthetic polypeptide
MAADGYLPDWLEDTLSEGIRQWWKLKPGPPPPKPAERHKDDSRGLVLPGYKYLGPFNGLDKGEPVNEADAAALEHDKAYDRQLDSGDNPYLKYNHADAEFQERLKEDTSFGGNLGRAVFQAKKRVLEPLGLVEEPVKTAPGKKRPVEHSPVEPDSSSGTGKAGQQPARKRLNFGQTGDADSVPDPQPLGQPPAAPSGLGTNTMATGSGAPMADNNEGADGVGNSSGNWHCDSTWMGDRVITTSTRTWALPTYNNHLYKQISSQSGASNDNHYFGYSTPWGYFDFNRFHCHFSPRDWQRLINNNWGFRPKRLKFKLFNIQVKEVTQNDGTTTIANNLTSTVQVFTDSEYQLPYVLGSAHQGCLPPFPADVFMVPQYGYLTLNNGSQAVGRSSFYCLEYFPSQMLRTGNNFTFSYTFEDVPFHSSYAHSQSLDRLMNPLIDQYLYYLSRTDAPSGTTTQSRLQFSQAGASDIRDQSRNWLPGPCYRQQRVSKTSADNNNSEYSWTGATKYHLNGRDSLVNPGPAMASHKDDEEKFFPQSGVLIFGKQGSEKTSVDIEKVMITDEEEIRTTNPVATEQYGSVSTNLQRGNRQAATADVNTQGVLPGMVWQDRDVYLQGPIWAKIPHTDGHFHPSPLMGGFGLKHPPPQILIKNTPVPANPSTTFSAAKFASFITQYSTGQVSVEIEWELQKENSKRWNPEVQYTSNYNKSVNVDFTVDTNGVYSEPRPIGTRYLTRNL

SEQ ID NO: 562 - DNA, 2208 bp, Artificial Sequence
  Description of Artificial Sequence: Synthetic polynucleotide
atggctgccgatggttatcttccagattggctcgaggacactctctctgaaggaataagacagtggtggaagctcaaacctggcccaccaccaccaaagcccgcagagcggcataaggacgacagcaggggtcttgtgcttcctgggtacaagtacctcggacccttcaacggactcgacaagggagagccggtcaacgaggcagacgccgcggccctcgagcacgacaaagcctatgaccggcagctcgacagcggagacaacccgtacctcaagtacaaccacgccgacgcggagtttcaggagcgccttaaagaagatacgtcttttgggggcaacctcggacgagcagtcttccaggcgaaaaagagggttcttgaacctctgggcctggttgaggaacctgttaagacggctccgggaaaaaagaggccggtagagcactctcctgtggagccagactcctcctcgggaaccggaaaggcgggccagcagcctgcaagaaaaagattgaattttggtcagactggagacgcaaactcagtacctgacccccagcctctcggacagccaccagcagccccctctggtctgggaactaatacgatggctacaggcagtggcgcaccaatggcagacaataacgagggcgccgacggagtgggtaattcctcgggaaattggcattgcgattccacatggatgggcgacagagtcatcaccaccagcacccgaacctgggccctgcccacctacaacaaccacctctacaaacaaatttccagccaatcaggagcctcgaacgacaatcactactttggctacagcaccccttgggggtattttgacttcaacagattccactgccacttttcaccacgtgactggcaaagactcatcaacaacaactggggattccgacccaagagactcaagttcaagctctttaacattcaagtcaaagaggtcacgcagaatgacggtacgacgacgattgccaataaccttaccagcacggttcaggtgtttactgactcggagtaccagctcccgtacgtcctcggctcggcgcatcaaggatgcctcccgccgttcccagcagacgtcttcatggtgccacagtatggatacctcaccctgaacaacgggagtcgggcagtaggacgctcttcattttactgcctggagtactttccttctcagatgctgcgtaccggtaacaactttaccttcagctacacttttgaggacgttcctttccacagcagctacgctcacagccagagtctggaccgtctcatgaatcctctcatcgaccagtacctgtattacttgagcagaacagacactccaagtggaaccaccacgcagtcaaggcttcagttttctcaggccggagcgagtgacattcgggaccagtctaggaactggcttcctggaccctgttaccgccagcagcgagtatcaaagacatctgcggataacaacaacagtgaatactcgtggactggagctaccaagtaccacctcaatggcagagactctctggtgaatccgggcccggccatggcaagccacaaggacgatgaagaaaagttttttcctcagagcggggttctcatctttgggaagcaaggctcagagaaaacaagtgtggacattgaaaaggtcatgattacagacgaagaggaaatcaggacgaccaatcccgtggctacggagcagtatggttctgtatctaccaacctccagagaggcaacagacaagcagctaccgcagatgtcaacacacaaggcgttcttccaggcatggtctggcaggacagagatgtgtaccttcaggggcccatctgggcaaagattccacacacggacggacattttcacccctctcccctcatgggtggattcggacttaaacaccctcctccacagattctcatcaagaacaccccggtacctgcgaatccttcgaccaccttcagtgcggcaaagtttgcttccttcatcacacagtactccacgggacaggtcagcgtggagatcgagtgggagctgcagaaggaaaacagcaaacgctggaatcccgaagttcagtacacttccaactacaacaagtctgttaatgtggactttactgtggacactaatggcgtgtatacagagcctcgccccattggcaccagatacctgactcgtaatctgtaa

SEQ ID NO: 563 - protein, 735 aa, Artificial Sequence
  Description of Artificial Sequence: Synthetic polypeptide
MAADGYLPDWLEDTLSEGIRQWWKLKPGPPPPKPAERHKDDSRGLVLPGYKYLGPFNGLDKGEPVNEADAAALEHDKAYDRQLDSGDNPYLKYNHADAEFQERLKEDTSFGGNLGRAVFQAKKRVLEPLGLVEEPVKTAPGKKRPVEHSPVEPDSSSGTGKAGQQPARKRLNFGQTGDANSVPDPQPLGQPPAAPSGLGTNTMATGSGAPMADNNEGADGVGNSSGNWHCDSTWMGDRVITTSTRTWALPTYNNHLYKQISSQSGASNDNHYFGYSTPWGYFDFNRFHCHFSPRDWQRLINNNWGFRPKRLKFKLFNIQVKEVTQNDGTTTIANNLTSTVQVFTDSEYQLPYVLGSAHQGCLPPFPADVFMVPQYGYLTLNNGSRAVGRSSFYCLEYFPSQMLRTGNNFTFSYTFEDVPFHSSYAHSQSLDRLMNPLIDQYLYYLSRTDTPSGTTTQSRLQFSQAGASDIRDQSRNWLPGPCYRQQRVSKTSADNNNSEYSWTGATKYHLNGRDSLVNPGPAMASHKDDEEKFFPQSGVLIFGKQGSEKTSVDIEKVMITDEEEIRTTNPVATEQYGSVSTNLQRGNRQAATADVNTQGVLPGMVWQDRDVYLQGPIWAKIPHTDGHFHPSPLMGGFGLKHPPPQILIKNTPVPANPSTTFSAAKFASFITQYSTGQVSVEIEWELQKENSKRWNPEVQYTSNYNKSVNVDFTVDTNGVYTEPRPIGTRYLTRNL

SEQ ID NO: 564 - DNA, 2211 bp, Artificial Sequence
  Description of Artificial Sequence: Synthetic polynucleotide
atggctgccgatggttatcttccagattggctcgaggacactctctctgaaggaataagacagtggtggaagctcaaacctggcccaccaccaccaaagcccgcagagcggcataaggacgacagcaggggtcttgtgcttcctgggtacaagtacctcggacccttcaacggactcgacaagggagagccggtcaacgaggcagacgccgcggccctcgagcacgacaaggcctacgaccagcagctcaaagcgggtgacaatccgtacctgcggtataaccacgccgacgccgagtttcaggagcgtctgcaagaagatacgtcttttgggggcaacctcgggcgagcagtcttccaggccaagaagcgggttctcgaacctctcggtctggttgaggaaggcgctaagacggctcctggaaagaaacgtccggtagagcagtcgccacaagagccagactcctcctcgggcatcggcaagacaggccagcagcccgctaaaaagagactcaattttggtcagactggcgactcagagtcagtccccgacccacaacctctcggagaacctccagcaacccccgctgctgtgggacctactacaatggcttcaggcggtggcgcaccaatggcagacaataacgaaggcgccgacggagtgggtaatgcctcaggaaattggcattgcgattccacatggctgggcgacagagtcatcaccaccagcacccgaacatgggccttgcccacctataacaaccacctctacaagcaaatctccagtgcttcgacgggggccagcaacgacaaccactacttcggctacagcaccccctgggggtattttgactttaacagattccactgccacttttcaccacgtgactggcagcgactcatcaacaataactggggattccggcccaagagactcagcttcaagctcttcaacatccaggtcaaggaggtcacgacgaatgatggcgtcacaaccatcgctaataaccttaccagcacggttcaagtcttctcggactcggagtaccagcttccgtacgtcctcggctctgcgcaccagggctgcctccctccgttcccggcggacgtgttcatgattccgcaatacggctacctgacgctcaacaatggcagccaagccgtgggacgttcatccttttactgcctggaatatttcccttctcagatgctgagaacgggcaacaactttaccttcagctacacctttgaggaagtgcctttccacagcagctacgcgcacagccagagcctggaccggctgatgaatcctctcatcgatcaatacctgtattacctgaacagaactcaaaatcagtccggaagtgcccaaaacaaggacttgctgtttagccgtgggtctccagctggcatgtctgttcagcccaaaaactggctacctggaccctgttatcggcagcagcgcgtttctaaaacaaaaacagacaacaacaacagcaattttacctggactggtgcttcaaaatataacctcaatgggcgtgaatccatcatcaaccctggcactgctatggcctcacacaaagacgacgaagacaagttctttcccatgagcggtgtcatgatttttggaaaagagagcgccggagcttcaaacactgcattggacaatgtcatgattacggacgaagaggaaattaaagccactaaccctgtggccaccgaaagatttgggaccgtggcagtcaatttccagagcagcagcacagaccctgcgaccggagatgtgcatgctatgggagcattacctggcatggtgtggcaagatagagacgtgtacctgcagggtcccatttgggccaaaattcctcacacagatggacactttcacccgtctcctcttatgggcggctttggactcaagaacccgcctcctcagatcctcatcaaaaacacgcctgttcctgcgaatcctccggcggagttttcagctacaaagtttgcttcattcatcactcaatactccacaggacaagtgagcgtggaaattgaatgggagctgcagaaagaaaacagcaaacgctggaatcccgaagtgcagtatacatctaactatgcaaaatctgccaacgttgatttcactgtggacaacaatggactttatactgagcctcgccccattggcacccgttacctcacccgtcccctgtaa

SEQ ID NO: 565 - protein, 736 aa, Artificial Sequence
  Description of Artificial Sequence: Synthetic polypeptide
MAADGYLPDWLEDTLSEGIRQWWKLKPGPPPPKPAERHKDDSRGLVLPGYKYLGPFNGLDKGEPVNEADAAALEHDKAYDQQLKAGDNPYLRYNHADAEFQERLQEDTSFGGNLGRAVFQAKKRVLEPLGLVEEGAKTAPGKKRPVEQSPQEPDSSSGIGKTGQQPAKKRLNFGQTGDSESVPDPQPLGEPPATPAAVGPTTMASGGGAPMADNNEGADGVGNASGNWHCDSTWLGDRVITTSTRTWALPTYNNHLYKQISSASTGASNDNHYFGYSTPWGYFDFNRFHCHFSPRDWQRLINNNWGFRPKRLSFKLFNIQVKEVTTNDGVTTIANNLTSTVQVFSDSEYQLPYVLGSAHQGCLPPFPADVFMIPQYGYLTLNNGSQAVGRSSFYCLEYFPSQMLRTGNNFTFSYTFEEVPFHSSYAHSQSLDRLMNPLIDQYLYYLNRTQNQSGSAQNKDLLFSRGSPAGMSVQPKNWLPGPCYRQQRVSKTKTDNNNSNFTWTGASKYNLNGRESIINPGTAMASHKDDEDKFFPMSGVMIFGKESAGASNTALDNVMITDEEEIKATNPVATERFGTVAVNFQSSSTDPATGDVHAMGALPGMVWQDRDVYLQGPIWAKIPHTDGHFHPSPLMGGFGLKNPPPQILIKNTPVPANPPAEFSATKFASFITQYSTGQVSVEIEWELQKENSKRWNPEVQYTSNYAKSANVDFTVDNNGLYTEPRPIGTRYLTRPL

SEQ ID NO: 566 - protein, 735 aa, Artificial Sequence
  Description of Artificial Sequence: Synthetic polypeptide
MAADGYLPDWLEDTLSEGIRQWWKLKPGPPPPKPAERHKDDSRGLVLPGYKYLGPFNGLDKGEPVNEADAAALEHDKAYDRQLDSGDNPYLKYNHADAEFQERLKEDTSFGGNLGRAVFQAKKRVLEPLGLVEEPVKTAPGKKRPVEHSPVEPDSSSGTGKAGQQPARKRLNFGQTGDADSVPDPQPLGQPPAAPSGLGTNTMATGSGAPMADNNEGADGVGNSSGNWHCDSTWMGDRVITTSTRTWALPTYNNHLYKQISSQSGASNDNHYFGYSTPWGYFDFNRFHCHFSPRDWQRLINNNWGFRPKRLKFKLFNIQVKEVTQNDGTTTIANNLTSTVQVFTDSEYQLPYVLGSAHQGCLPPFPADVFMVPQYGYLTLNNGSQAVGRSSFYCLEYFPSQMLRTGNNFTFSYTFEDVPFHSSYAHSQSLDRLMNPLIDQYLYYLSRTDTPSGTTTQSRLQFSQAGASDIRNQSRNWLPGPCYRQQRVSKTSADNNNSEYSWTGATKYHLNGRDSLVNPGPAMASHKDDEEKFFPQSGVLIFGKQGSEKTSVDIEKVMITDEEEIRTTNPVATEQYGSVSTNLQRGNRQAATADVNTQGVLPGMVWQDRDVYLQGPIWAKIPHTDGHFHPSPLMGGFGLKHPPPQILIKNTPVPANPSTTFSAAKFASFITQYSTGQVSVEIEWELQKENSKRWNPEVQYTSNYNKSVNVDFTVDTNGVYSEPRPIGTRYLTRNQ

SEQ ID NO: 567 - DNA, 2208 bp, Artificial Sequence
  Description of Artificial Sequence: Synthetic polynucleotide
atggctgccgatggttatcttccagattggctcgaggacactctctctgaaggaataagacagtggtggaagctcaaacctggcccaccaccaccaaagcccgcagagcggcataaggacgacagcaggggtcttgtgcttcctgggtacaagtacctcggacccttcaacggactcgacaagggagagccggtcaacgaggcagacgccgcggccctcgagcacgacaaagcctatgaccggcagctcgacagcggagacaacccgtacctcaagtacaaccacgccgacgcggagtttcaggaacgccttaaagaagatacgtcttttgggggcaacctcggacgagcagtcttccaggcgaaaaagagggttcttgaacctctgggcctggttgaggaacctgttaagacggctccgggaaaaaagaggccggtagagcactctcctgtggagccagactcctcctcgggaaccggaaaggcgggccagcagcctgcaagaaaaagattgaattttggtcagactggagacgcagactcagtacctgacccccagcctctcggacagccaccagcagccccctctggtctgggaactaatacgatggctacaggcagtggcgcaccaatggcagacaataacgagggcgccgacggagtgggtaattcctcgggaaattggcattgcgattccacatggatgggcgacagagtcatcaccaccagcacccgaacctgggccctgcccacctacaacaaccacctctacaaacaaatttccagccaatcaggagcctcgaacgacaatcactactttggctacagcaccccttgggggtattttgacttcaacagattccactgccacttttcaccacgtgactggcaaagactcatcaacaacaactggggattccgacccaagagactcaagttcaagctctttaacattcaagtcaaagaggtcacgcagaatgacggtacgacgacgattgccaataaccttaccagcacggttcaggtgtttactgactcggagtaccagctcccgtacgtcctcggctcggcgcatcaaggatgcctcccgccgttcccagcagacgtcttcatggtgccacagtatggatacctcaccctgaacaacgggagtcaggcagtaggacgctcttcattttactgcctggagtactttccttctcagatgctgcgtaccggtaacaactttaccttcagctacacttttgaggacgttcctttccacagcagctacgctcacagccagagtctggaccgtctcatgaatcctctcatcgaccagtacctgtattacttgagcagaacagacactccaagtggaaccaccacgcagtcaaggcttcagttttctcaggccggagcgagtgacattcggaaccagtctaggaactggcttcctggaccctgttaccgccagcagcgagtatcaaagacatctgcggataacaacaacagtgaatactcgtggactggagctaccaagtaccacctcaatggcagagactctctggtgaatccgggcccggccatggcaagccacaaggacgatgaagaaaagttttttcctcagagcggggttctcatctttgggaagcaaggctcagagaaaacaagtgtggacattgaaaaggtcatgattacagacgaagaggaaatcaggacaaccaatcccgtggctacggagcagtatggttctgtatctaccaacctccagagaggcaacagacaagcagctaccgcagatgtcaacacacaaggcgttcttccaggcatggtctggcaggacagagatgtgtaccttcaggggcccatctgggcaaagattccacacacggacggacattttcacccctctcccctcatgggtggattcggacttaaacaccctcctccacagattctcatcaagaacaccccggtacctgcgaatccttcgaccaccttcagtgcggcaaagtttgcttccttcatcacacagtactccacgggacaggtcagcgtggagatcgagtgggagctgcagaaggaaaacagcaaacgctggaatcccgaagttcagtacacttccaactacaacaagtctgttaatgtggactttactgtggacactaatggcgtgtattcagagcctcgccccattggcaccagatacctgactcgtaatcagtaa

SEQ ID NO: 568 - DNA, 2208 bp, Artificial Sequence
  Description of Artificial Sequence: Synthetic polynucleotide
atggctgccgatggttatcttccagattggctcgaggacactctctctgaaggaataagacagtggtggaagctcaaacctggcccaccaccaccaaagcccgcagagcggcataaggacgacagcaggggtcttgtgcttcctgggtacaagtacctcggacccttcaacggactcgacaagggagagccggtcaacgaggcagacgccgcggccctcgagcacgacaaagcctatgaccggcagctcgacagcggagacaacccgtacctcaagtacaaccacgccgacgcggagtttcaggagcgccttaaagaagatacgtcttttgggggcaacctcggacgagcagtcttccaggcgaaaaagagggttcttgaacctctgggcctggttgaggaacctgttaagacggctccgggaaaaaagaggccggtagagcactctcctgtggagccagactcctcctcgggaaccggaaaggcgggccagcagcctgcaagaaaaagattgaattttggtcagactggagacgcagactcagtacctgatccccagcctctcggacagccaccagcagccccctctggtctgggaactaatacgatggctacaggcagtggcgcaccaatggcagacaataacgagggcgccgacggagtgggtaattcctcgggaaattggcattgcgattccacatggatgggcgacagagtcatcaccaccagcacccgaacctgggccctgcccacctacaacaaccacctctacaaacaaatttccagccaatcaggagcctcgaacgacaatcactactttggctacagcaccccttgggggtattttgacttcaacagattccactgccacttttcaccacgtgactggcaaagactcatcaacaacaactggggattccgacccaagagactcaagttcaagctctttaacattcaagtcaaagaggtcacgcagaatgacggtacgacgacgattgccaataaccttaccagcacggttcaggtgtttactgactcggagtaccagctcccgtatgtcctcggctcggcgcatcaaggatgcctcccgccgttcccagcagacgtcttcatggtgccacagtatggatacctcaccctgaacaacgggagtcaggcagtaggacgctcttcattttactgcctggagtactttccttctcagatgctgcgtaccggtaacaactttaccttcagctacacttttgaggacgttcctttccacagcagctacgctcacagccagagtctggaccgtctcatgaatcctctcatcgaccagtacctgtattacttgagcagaacagacactccaagtggaaccaccacgcagtcaaggcttcagttttctcaggccggagcgagtgacattcgggaccagtctaggaactggcttcctggaccctgttaccgccagcagcgagtatcaaagacatctgcggataacaacaacagtgaatactcgtggactggagctaccaagtaccacctcaatggcagagactctctggtgaatccgggcccggccatggcaagccacaaggacgatgaagaaaagttttttcctcagagcggggttctcatctttgggaagcaaggctcagagaaaacaagtgtggacattgaaaaggtcatgattacagacgaagaggaaatcaggacaaccaatcccgtggctacggagcagtatggttctgtatctaccaacctccagagaggcaacagacaagcagctaccgcagatgtcaacacacaaggcgttcttccaggcatggtctggcaggacagagatgtgtaccttcaggggcccatctgggcaaagattccacacacggacggacattttcacccctctcccctcatgggtggattcggacttaaacaccctcctccacagattctcatcaagaacaccccggtacctgcgaatccttcgaccaccttcagtgcggcaaagtttgcttccttcatcacacagtactccacgggacaggtcagcgtggagatcgagtgggagctgcagaaggaaaacagcaaacgctggaatcccgaagttcagtacacttccaactacaacaagtctgttaatgtggactttactgtggacactaatggcgtgtattcagagcctcgccccattggcaccagatacctgactcgtaatctgtaa

SEQ ID NO: 569 - protein, 735 aa, Artificial Sequence
  Description of Artificial Sequence: Synthetic polypeptide
MAADGYLPDWLEDTLSEGIRQWWKLKPGPPPPKPAERHKDDSRGLVLPGYKYLGPFNGLDKGEPVNEADAAALEHDKAYDRQLDSGDNPYLKYNHADAEFQERLKEDTSFGGNLGRAVFQAKKRVLEPLGLVEEPVKTAPGKKRPVEHSPVEPDSSSGTGKAGQQPARKRLNFGQTGDADSVPDPQPLGQPPAAPSGLGTNTMATGSGAPMADNNEGADGVGNSSGNWHCDSTWMGDRVITTSTRTWALPTYNNHLYKQISSQSGASNDNHYFGYSTPWGYFDFNRFHCHFSPRDWQRLINNNWGFRPKRLKFKLFNIQVKEVTQNDGTTTIANNLTSTVQVFTDSEYQLPYVLGSAHQGCLPPFPADVFMVPQYGYLTLNNGSQAVGRSSFYCLEYFPSQMLRTGNNFTFSYTFEDVPFHSSYAHSQSLDRLMNPLIDQYLYYLSRTDTPSGTTTQSRLQFSQAGASDIRDQSRNWLPGPCYRQQRVSKTSADNNNSEYSWTGATKYHLNGRDSLVNPGPAMASHKDDEEKFFPQSGVLIFGKQGSEKTSVDIEKVMITDEEEIRTTNPVATEQYGSVSTNLQRGNRQAATADVNTQGVLPGMVWQDRDVYLQGPIWAKIPHTDGHFHPSPLMGGFGLKHPPPQILIKNTPVPANPSTTFSAAKFASFITQYSTGQVSVEIEWELQKENSKRWNPEVQYTSNYNKSVNVDFTVDTNGVYSEPRPIGTRYLTRNL

SEQ ID NO: 570 - DNA, 2601 bp, Artificial Sequence
  Description of Artificial Sequence: Synthetic polynucleotide
ccatcgacgtcagacgcggaagcttcgatcaactacgcggacaggtaccaaaacaaatgttctcgtcacgtgggcatgaatctgatgctgtttccctgcagacaatgcgagagactgaatcagaattcaaatatctgcttcactcacggtgtcaaagactgtttagagtgctttcccgtgtcagaatctcaacccgtttctgtcgtcaaaaaggcgtatcagaaactgtgctacattcatcacatcatgggaaaggtgccagacgcttgcactgcttgcgacctggtcaatgtggacttggatgactgtgtttctgaacaataaatgacttaaaccaggtatgactgccgatggttatcttccagattggctcgaggacaaccttagtgaaggaattcgcgagtggtgggctttgaaacctggagcccctcaacccaaggcaaatcaacaacatcaagacaacgctcgaggtcttgtgcttccgggttacaaataccttggacccggcaacggactcgacaagggggagccggtcaacgcagcagacgcggcggccctcgagcacgacaaggcctacgaccagcagctcaaggccggagacaacccgtacctcaagtacaaccacgccgacgccgagttccaggagcggctcaaagaagatacgtcttttgggggcaacctcgggcgagcagtcttccaggccaaaaagaggcttcttgaacctcttggtctggttgaggaagcggctaagacggctcctggaaagaagaggcctgtagagcagtctcctcaggaaccggactcctccgcgggtattggcaaatcgggtgcacagcccgctaaaaagagactcaatttcggtcagactggcgacacagagtcagtcccagaccctcaaccaatcggagaacctcccgcagccccctcaggtgtgggatctcttacaatggcttcaggtggtggcgcaccagtggcagacaataacgaaggtgccgatggagtgggtagttcctcgggaaattggcattgcgattcccaatggctgggggacagagtcatcaccaccagcacccgaacctgggccctgcccacctacaacaatcacctctacaagcaaatctccaacagcacatctggaggatcttcaaatgacaacgcctacttcggctacagcaccccctgggggtattttgacttcaacagattccactgccacttctcaccacgtgactggcagcgactcatcaacaacaactggggattccggcctaagcaactcaacttcaagctcttcaacattcaggtcaaagaggttacggacaacaatggagtcaagaccatcgccaataaccttaccagcacggtccaggtcttcacggactcagactatcagctcccgtacgtgctcgggtcggctcacgagggctgcctcccgccgttcccagcggacgttttcatgattcctcagtacgggtatctgacgcttaatgatggaagccaggccgtgggtcgttcgtccttttactgcctggaatatttcccgtcgcaaatgctaagaacgggtaacaacttccagttcagctacgagtttgagaacgtacctttccatagcagctacgctcacagccaaagcctggaccgactaatgaatccactcatcgaccaatacttgtactatctctcaaagactattaacggttctggacagaatcaacaaacgctaaaattcagtgtggccggacccagcaacatggctgtccagggaagaaactacatacctggacccagctaccgacaacaacgtgtctcaaccactgtgactcaaaacaacaacagcgaatttgcttggcctggagcttcttcttgggctctcaatggacgtaatagcttgatgaatcctggacctgctatggccagccacaaagaaggagaggaccgtttctttcctttgtctggatctttaatttttggcaaacaaggaactggaagagacaacgtggatgcggacaaagtcatgataaccaacgaagaagaaattaaaactactaacccggtagcaacggagtcctatggacaagtggccacaaaccaccagagtgcccaagcacaggcgcagaccggctgggttcaaaaccaaggaatacttccgggtatggtttggcaggacagagatgtgtacctgcaaggacccatttgggccaaaattcctcacacggacggcaactttcacccttctccgctgatgggagggtttggaatgaagcacccgcctcctcagatcctcatcaaaaacacacctgtacctgcggatcctccaacggccttcaacaaggacaagctgaactctttcatcacccagtattctactggccaagtcagcgtggagatcgagtgggagctgcagaaggaaaacagcaagcgctggaacccggagatccagtacacttccaactattacaagtctaataatgttgaatttgctgttaatactgaaggtgtatatagtgaaccccgccccattggcaccagatacctgactcgtaatctgtaattgcttgttaatcaataaaccgtttaattcgtttcagttgaactgcggcc

SEQ ID NO: 571 - DNA, 2601 bp, Artificial Sequence
  Description of Artificial Sequence: Synthetic polynucleotide
ccatcgacgtcagacgcggaagcttcgatcaactacgcggacaggtaccaaaacaaatgttctcgtcacgtgggcatgaatctgatgctgtttccctgcagacaatgcgagagactgaatcagaattcaaatatctgcttcactcacggtgtcaaagactgtttagagtgctttcccgtgtcagaatctcaacccgtttctgtcgtcaaaaaggcgtatcagaaactgtgctacattcatcacatcatgggaaaggtgccagacgcttgcactgcttgcgacctggtcaatgtggacttggatgactgtgtttctgaacaataaatgacttaaaccaggtatggctgccgatggttatcttccagattggctcgaggacaaccttagtgaaggaattcgcgagtggtgggctttgaaacctggagcccctcaacccaaggcaaatcaacaacatcaagacaacgctcgaggtcttgtgcttccgggttacaaataccttggacccggcaacggactcgacaagggggagccggtcaacgcagcagacgcggcggccctcgagcacgacaaggcctacgaccagcagctcaaggccggagacaacccgtacctcaagtacaaccacgccgacgccgagttccaggagcggctcaaagaagatacgtcttttgggggcaacctcgggcgagcagtcttccaggccaaaaagaggcttcttgaacctcttggtctggttgaggaagcggctaagacggctcctggaaagaagaggcctgtagagcagtctcctcaggaaccggactcctccgcgggtattggcaaatcgggtgcacagcccgctaaaaagagactcaatttcggtcagactggcgacacagagtcagtcccagaccctcaaccaatcggagaacctcccgcagccccctcaggtgtgggatctcttacaatggcttcaggtggtggcgcaccagtggcagacaataacgaaggtgccgatggagtgggtagttcctcgggaaattggcattgcgattcccaatggctgggggacagagtcatcaccaccagcacccgaacctgggccctgcccacctacaacaatcacctctacaagcaaatctccaacagcacatctggaggatcttcaaatgacaacgcctacttcggctacagcaccccctgggggtattttgacttcaacagattccactgccacttctcaccacgtgactggcagcgactcatcaacaacaactggggattccggcctaagcgactcaacttcaagctcttcaacattcaggtcaaagaggttacggacaacaatggagtcaagaccatcgccaataaccttaccagcacggtccaggtcttcacggactcagactatcagctcccgtacgtgctcgggtcggctcacgagggctgcctcccgccgttcccagcggacgttttcatgattcctcagtacgggtatctgacgcttaatgatggaagccaggccgtgggtcgttcgtccttttactgcctggaatatttcccgtcgcaaatgctaagaacgggtaacaacttccagttcagctacgagtttgagaacgtacctttccatagcagctacgctcacagccaaagcctggaccgactaatgaatccactcatcgaccaatacttgtactatctctcaaagactattaacggttctggacagaatcaacaaacgctaaaattcagtgtggccggacccagcaacatggctgtccagggaagaaactacatacctggacccagctaccgacaacaacgtgtctcaaccactgtgactcaaaacaacaacagcgaatttgcttggcctggggcttcttcttgggctctcaatggacgtaatagcttgatgaatcctggacctgctatggccagccacaaagaaggagaggaccgtttctttcctttgtctggatctttaatttttggcaaacaaggaactggaagagacaacgtggatgcggacaaagtcatgataaccaacgaagaagaaattaaaactactaacccggtagcaacggagtcctatggacaagtggccacaaaccaccagagtgcccaagcacaggcgcagaccggctgggttcaaaaccaaggaatacttccgggtatggtttggcaggacagagatgtgtacctgcaaggacccatttgggccaaaattcctcacacgggcggcaactttcacccttctccgctgatgggagggtttggaatgaagcacccgcctcctcagatcctcatcaaaaacacacctgtacctgcggatcctccaacggccttcaacaaggacaagctgaactctttcatcacccagtattctactggccaagtcagcgtggagatcgagtgggagctgcagaaggaaaacagcaagcgctggaacccggagatccagtacacttccaactattacaagtctaataatgttgaatttgctgttaatactggaggtgtatatagtgaaccccgccccattggcaccagatacctgactcgtaatctgtaattgcttgttaatcaataaaccgtttaattcgtttcagttgaactgcggcc

SEQ ID NO: 572 - DNA, 2601 bp, Artificial Sequence
  Description of Artificial Sequence: Synthetic polynucleotide
ccatcgacgtcagacgcggaagcttcgatcaactacgcggacaggtaccaaaacaaatgttctcgtcacgtgggcatgaatctgatgctgtttccctgcagacaatgcgagagactgaatcagaattcaaatatctgcttcactcacggtgtcaaagactgtttagagtgctttcccgtgtcagaatctcaacccgtttctgtcgtcaaaaaggcgtatcagaaactgtgctacattcatcacatcatgggaaaggtgccagacgcttgcactgcttgcgacctggtcaatgtggactcggatgactgtgtttctgaacaataaatgacttaaaccaggtatggctgccgatggttatcttccagattggctcgaggacaaccttagtgaaggaattcgcgagtggtgggctttgaaacctggagcccctcaacccaaggcaaatcaacaacatcaagacaacgctcgaggtcttgtgcttccgggttacaaataccttggacccggcaacggactcgacaagggggagccggtcaacgcagcagacgcggcggccctcgagcacgacaaggcctacgaccagcagctcaaggccggagacaacccgtacctcaagtacaaccacgccgacgccgagttccaggagcggctcaaagaagatacgtcttttgggggcaacctcgggcgagcagtcttccaggccaaaaagaggcttcttgaacctcttggtctggttgaggaagcggctaagacggctcctggaaagaagaggcctgtagagcagtctcctcaggaaccggactcctccgcgggtattgacaaatcgggtgcacagcccgctaaaaagagactcaatttcggtcagactggcgacacagagtcagtcccagaccctcaaccaatcggagaacctcccgcagccccctcaggtgtgggatctcttacaatggcttcaggtggtggcgcaccagtggcagacaataacgaaggtgccgatggagtgggtagttcctcgggaaattggcattgcgattcccaatggctgggggacagagtcatcaccaccagcacccgaacctgggccctgcccacctacaacaatcacctctacaagcaaatctccaacagcacatctggaggatcttcaaatgacaacgcctacttcggctacagcaccccctgggggtattttgacttcaacagattccactgccacttctcaccacgtgactggcagcgactcatcaacaacaactggggattccggcctaagcgactcaacttcaagctcttcaacattcaggtcaaagaggttacggacaacaatggagtcaagaccatcgccaataaccttaccagcacggtccaggtcttcacggactcggactatcagctcccgtacgtgctcgggtcggctcacgagggctgcctcccgccgttcccagcggacgttttcatgattcctcagtacgggtatctgacgcttaatgatggaagccaggccgtgggtcgttcgtccttttactgcctggaatatttcccgtcgcaaatgctaagaacgggtaacaacttccagttcagctacgagtttgagaacgtacctttccatagcagctacgctcacagccaaagcctggaccgactaatgaatccactcatcgaccaatacttgtactatctctcaaagactattaacggttctggacagaatcaacaaacgctaaaattcagtgtggccggacccagcaacatggctgtccagggaagaaactacatacctggacccagctaccgacaacaacgtgtctcaaccactgtgactcaaaacaacaacagcgaatttgcttggcctggagcttcttcttgggctctcaatggacgtaatagcttgatgaatcctggacctgctatggccagccacaaagaaggagaggaccgtttctttcctttgtctggatctttaatttttggcaaacaaggaactggaagagacaacgtggatgcggacaaagtcatgataaccaacgaagaagaaattaaaactactaacccggtagcaacggagtcctatggacaagtggccacaaaccaccagagtgcccaagcacaggcgcagaccggctgggttcaaaaccaaggaatacttccgggtatggtttggcaggacagagatgtgtacctgcaaggacccatttgggccaaaattcctcacacggacggcaactttcacccttctccgctgatgggagggtttggaatgaagcacccgcctcctcagatcctcatcaaaaacacacctgtacctgcggatcctccaacggccttcaacaaggacaagctgaactctttcatcacccagtattctactggccaagtcagcgtggagatcgagtgggagctgcagaaggaaaacagcaagcgctggaacccggagatccagtacacttccaactattacaagtctaataatgttgaatttgctgttaatactgaaggtgtatatagtgaaccccgccccattggcaccagatacctgactcgtaatctgtaattgcttgttaatcaataaaccgtttaattcgtttcagttgaactgcggcc

SEQ ID NO: 573 - DNA, 2601 bp, Artificial Sequence
  Description of Artificial Sequence: Synthetic polynucleotide
ccatcgacgtcagacgcggaagcttcgatcaactacgcggacaggtaccaaaacaaatgttctcgtcacgtgggcatgaatctgatgctgtttccctgcagacaatgcgagagactgaatcagaattcaaatatctgcttcactcacggtgtcaaagactgtttagagtgctttcccgtgtcagaatctcaacccgtttctgtcgtcaaaaaggcgtatcagaaactgtgctacattcatcacatcatgggaaaggtgccagacgcttgcactgcttgcgacctggtcaatgtggacttggatgactgtgtttctgaacaataaatgacttaaaccaggtatggctgccgatggttatcttccagattggctcgaggacaaccttagtgaaggaattcgcgagtggtgggctttgaaacctggagcccctcaacccaaggcaaatcaacaacatcaagacaacgctcgaggtcttgtgcttccgggttacaaataccttggacccggcaacggactcgacaagggggagccggtcaacgcagcagacgcggcggccctcgagcacgacaaggcctacgaccagcagctcaaggccggagacaacccgtacctcaagtacaaccacgccgacgccgagttccaggagcggctcaaagaagatacgtcttttgggggcaacctcgggcgagcagtcctccaggccaaaaagaggcttcttgaacctcttggtctggttgaggaagcggctaagacggctcctggaaagaagaggcctgtagagcagtctcctcaggaaccggactcctccgcgggtattggcaaatcgggtgcacagcccgctaaaaagagactcaatttcggtcagactggcgacacagagtcagtcccagaccctcaaccaatcggagaacctcccgcagccccctcaggtgtgggatctcttacaatggcttcaggtggtggcgcaccagtggcagacaataacgaaggtgccgatggagtgggtagttcctcgggaaattggcattgcgattcccaatggctgggggacagagtcatcaccaccagcacccgaacctgggccctgcccacctacaacaatcacctctacaagcaaatctccaacagcacatctggaggatcttcaaatgacaacgcctacttcggctacagcaccccctgggggtattttgacttcaacagattccactgccacttctcaccacgtgactggcagcgactcatcaacaacaactggggattccggcctaagcgactcaacttcaagctcttcaacattcaggtcaaagaggttacggacaacaatggagtcaagaccatcgccaataaccttaccagcacggtccaggtcttcacggactcagactatcagctcccgtacgtgctcgggtcggctcacgagggctgcctcccgccgttcccagcggacgttttcatgattcctcagtacgggtatctgacgcttaatgatggaagccaggccgtgggtcgttcgtccttttactgcctggaatatttcccgtcgcaaatgctaagaacgggtaacaacttccagttcagctacgagtttgagaacgtacctttccatagcagctacgctcacagccaaagcctggaccgactaatgaatccactcatcgaccaatacttgtactatctctcaaagactattaacggttctggacagaatcaacaaacgctaaaattcagtgtggccggatccagcaacatggctgtccagggaagaaactacatacctggacccagctaccgacaacaacgtgtctcaaccactgtgactcaaaacaacaacagcgaatttgcttggcctggagcttcttcttgggctctcaatggacgtaatagcttgatgaatcctggacctgctatggccagccacaaagaaggagaggaccgtttctttcctttgtctggatctttaatttttggcaaacaaggaactggaagagacaacgtggatgcggacaaagtcatgataaccaacgaagaagaaattaaaactactaacccggtagcaacggagtcctatggacaagtggccacaaaccaccagagtgcccaagcacaggcgcagaccggctgggttcaaaaccaaggaatacttccaggtatggtttggcaggacagagatgtgtacctgcaaggacccatttgggccaaaattcctcacacggacggcaactttcacccttctccgctgatgggagggtttggaatgaagcacccgcctcctcagatcctcatcaaaaacacacctgtacctgcggatcctccaacggccttcaacaaggacaagctgaactctttcatcacccagtattctactggccaagtcagcgtggagatcgagtgggagctgcagaaggaaaacagcaagcgctggaacccggagatccagtacacttccaactattacaagtctaataatgttgaatttgctgttaatactgaaggtgtatatagtgaaccccgccccattggcaccagatacctgactcgtaatctgtaattgcttgttaatcaataaaccgtttaattcgtttcagttgaactgcggcc

SEQ ID NO: 574 - DNA, 2601 bp, Artificial Sequence
  Description of Artificial Sequence: Synthetic polynucleotide
ccatcgacgtcagacgcggaagcttcgatcaactacgcggacaggtaccaaaacaaatgttctcgtcacgtgggcatgaatctgatgctgtttccctgcagacaatgcgagagactgaatcagaattcaaatatctgcttcactcacggtgtcaaagactgtttagagtgctttcccgtgtcagaatctcaacccgtttctgtcgtcaaaaaggcgtatcagaaactgtgctacattcatcacatcatgggaaaggtgccagacgcttgcactgcttgcgacctggtcaatgtggacttggatgactgtgtttctgaacaataaatgacttaaaccaggtatggctgccgatggttatcttccagattggctcgaggacaaccttagtgaaggaattcgcgagtggtgggctttgaaacctggagcccctcaacccaaggcaaatcaacaacatcaagacaacgctcgaggtcttgtgcttccgggttacaaataccttggacccggcaacggactcgacaagggggagccggtcaacgcagcagacgcggcggccctcgagcacgacagggcctacgaccagcagctcaaggccggagacaacccgtacctcaagtacaaccacgccgacgccgagttccaggagcggctcaaagaagatacgtcttttgggggcaacctcgggcgagcagtcttccaggccaaaaagaggcttcttgaacctcttggtctggttgaggaagcggctaagacggctcctggaaagaagaggcctgtagagcagtctcctcaggaaccggactcctccgcgggtattggcaaatcgggtgcacagcccgctaaaaagagactcaatttcggtcagactggcgacacagagtcagtcccagaccctcaaccaatcggagaacctcccgcagccccctcaggtgtgggatctcttacaatggcttcaggtggtggcgcaccagtggcagacaataacgaaggtgccgatggagtgggtagttcctcgggaaattggcattgcgattcccaatggctgggggacagagtcatcaccaccagcacccgaacctgggccctgcccacctacaacaatcacctctacaagcaaatctccaacagcacatctggaggatcttcaaatgacaacgcctacttcggctacagcaccccctgggggtattttgacttcaacagattccactgccacttctcaccacgtgactggcagcgactcatcaacaacaactggggattccggcctaagcgactcaacttcaagctcttcaacattcaggtcaaagaggttacggacaacaatggagtcaagaccatcgccaataaccttaccagcacggtccaggtcttcacggactcagactatcagctcccgtacgtgctcgggtcggctcacgagggctgcctcccgccgttcccagcggacgttttcatgattcctcagtacgggtatctgacgcttaatgatggaagccaggccgtgggtcgttcgtccttttactgcctggaatatttcccgtcgcaaatgctaagaacgggtaacaacttccagttcagctacgagtttgagaacgtacctttccatagcagctacgctcacagccaaagcctggaccgactaatgaatccactcatcgaccaatacttgtactatctctcaaagactattaacggttctggacagaatcaacaaacgctaaaattcagtgtggccggacctagcaacatggctgtccagggaagaaactacatacctggacccagctaccgacaacaacgtgtctcaaccactgtgactcaaaacaacaacagcgaatttgcttggcctggagcttcttcttgggctctcaatggacgtaatagcttgatgaatcctggacctgctatggccagccacaaagaaggagaggaccgtttctttcctttgtctggatctttaatttttggcaaacaaggaactggaagagacaacgtggatgcggacaaagtcatgataaccaacgaagaagaaattaaaactactaacccggtagcaacggagtcctatggacaagtggccacaaaccaccagagtgcccaagcacaggcgcagaccggctgggttcaaaaccaaggaatacttccgggtatggtttggcaggacagagatgtgtacctgcaaggacccatttgggccaaaattcctcacacggacggcaactttcacccttctccgctgatgggagggtttggaatgaagcacccgcctcctcagatcctcatcaaaaacacacctgtacctgcggatcctccaacggccttcaacaaggacaagctgaactctttcatcacccagtattctactggccaagtcagcgtggagatcgagtgggagctgcagaagaaaaacagcaagcgctggaacccggagatccagtacacttccaactattacaagtctaataatgttgaatttgctgttaacactgaaggtgtatatagtgaaccccgccccattggcaccagatacctgactcgtaatctgtaattgcttgttaatcaataaaccgtttaattcgtttcagttgaactgcggcc

SEQ ID NO: 575 - DNA, 2601 bp, Artificial Sequence
  Description of Artificial Sequence: Synthetic polynucleotide
ccatcgacgtcagacgcggaagcttcgatcaactacgcggacaggtaccaaaacaaatgttctcgtcacgtgggcatgaatctgatgctgtttccctgcagacaatgcgagagactgaatcagaattcaaatatctgcttcactcacggtgtcaaagactgtttagagtgctttcccgtgtcagaatctcaacccgtttctgtcgtcaaaaaggcgtatcagaaactgtgctacattcatcacatcatgggaaaggtgccagacgcttgcactgcttgcgacctggtcaatgtggacttggatgactgtgtttctgaacaataaatgacttaaaccaggtatggctgccgatggttatcttccagattggctcgaggacaaccttagtgaaggaattcgcgagtggtgggctttgaaacctggagcccctcaacccaaggcaaatcaacaacatcaagacaacgctcgaggtcttgtgcttccgggttacaaataccttggacccggcaacggactcgacaagggggagccggtcaacgcagcagacgcggcggccctcgagcacgacaaggcctacgaccagcagctcaaggccggagacaacccgtacctcaagtacaaccacgccgacgccgagttccaggagcggctcaaagaagatacgtcttttgggggcaacctcgggcgagcagtcttccaggccaaaaagaggcttcttgaacctcttggtctggttgaggaagcggctaagacggctcctggaaagaagaggcctgtagagcagtctcctcaggaaccggactcctccgcgggtattggcaaatcgggtgcacagcccgctaaaaagagactcaatttcggtcagactggcgacacagagtcagtcccagaccctcaaccaatcggagaacctcccgcagccccctcaggtgtgggatctcttacaatggcttcaggtggtggcgcaccagtggcagacaataacgaaggtgccgatggagtgggtagttcctcgggaaattggcattgcgattcccaatggctgggggacagagtcatcaccaccagcacccgaacctgggccctgcccacctacaacaatcacctctacaagcaaatctccaacagcacatctggaggatcttcaaatgacaacgcctacttcggctacagcaccccctgggggtattttgacttcaacagattccactgccacttctcaccacgtgactggcagcgactcatcaacaacaactggggattccggcctaagcgactcaacttcaagctcttcaacattcaggtcaaagaggttacggacaacaatggagtcaagaccatcgccaataaccttaccagcacggtccaggtcttcacggactcagactatcagctcccgtacgtgctcgggtcggctcacgagggctgcctcccgccgttcccagcggacgttttcatgattcctcagtacgggtatctgacgcttaatgatggaagccaggccgtgggtcgttcgtccttttactgcctggaatatttcccgtcgcaaatgctaagaacgggtaacaacttccagttcagctacgagtttgagaacgtacctttccatagcagctacgctcacagccaaagcctggaccgactaatgaatccactcatcgaccaatacttgtactatctctcaaagactattaacggttctggacagaatcaacaaacgctaaaattcagtgtggccggacccagcaacatggctgtccagggaagaaactacatacctggacccagctaccgacaacaacgtgtctcaaccactgtgactcaaaacaacaacagcgaatttgcttggcctggagcttcttcttgggctctcaatggacgtaatagcttgatgaatcctggacctgctatggccagccacaaagaaggagaggaccgtttctttcctttgtctggatctttaatttttggcaaacaaggaactggaagagacaacgtggatgcggacaaagtcatgataaccaacgaagaagaaattaaaactactaacccggtagcaacggagtcctatggacaagtggccacaaaccaccagagtgcccaagcacgggcgcagaccggctgggttcaaaaccaaggaatacttccgggtatggtttggcaggacagagatgtgtacctgcaaggacccatttgggccaaaattcctcacacggacggcaactttcacccttctccgctgatgggagggtttggaatgaagcacccgcctcctcagatcctcatcaaaaacacacctgtacctgcggatcctccaacggccttcaacaaggacaagctgaactctttcatcacccagtattctactggccaagtcagcgtggagatcgagtgggagctgcagaaggaaaacagcaagcgctggaacccggagatccagtacacttccaactattacaagtctaataatgttgaatttgctgttaatactgaaggtgtatatagtgaaccccgccccattggcaccagatacctgactcgtaatctgtaattgcttgttaatcaataaaccgtttaattcgtttcagttgaactgcggcc

SEQ ID NO: 576 - DNA, 2601 bp, Artificial Sequence
  Description of Artificial Sequence: Synthetic polynucleotide
ccatcgacgtcagacgcggaagcttcgatcaactacgcggacaggtaccaaaacaaatgttctcgtcacgtgggcatgaatctgatgctgtttccctgcagacaatgcgagagactgaatcagaattcaaatatctgcttcactcacggtgtcaaagactgtttagagtgctttcccgtgtcagaatctcaacccgtttctgtcgtcaaaaaggcgtatcagaaactgtgctacattcatcacatcatgggaaaggtgccagacgcttgcactgcttgcgacctggtcaatgtggacttggatgactgtgtttctgaacaataaatgacttaaaccaggtatggctgccgatggttatcttccagattggctcgaggacaaccttagtgaaggaattcgcgagtggtgggctttgaaacctggagcccctcaacccaaggcaaatcaacaacatcaagacaacgctcgaggtcttgtgcttccgggttacaaataccttggacccggcaacggactcgacaagggggagccggtcaacgcagtagacgcggcggccctcgagcacgacaaggcctacgaccagcagctcaaggccggagacaacccgtacctcaagtacaaccacgccgacgccgagttccaggagcggctcaaagaagatacgtcttttgggggcaacctcgggcgagcagtcttccaggccaaaaagaggcttcttgaacctcttggtctggttgaggaagcggctaagacggctcctggaaagaagaggcctgtagagcagtctcctcaggaaccggactcctccgcgggtattggcaaatcgggtgcacagcccgctaaaaagagactcaatttcggtcagactggcgacacagagtcagtcccagaccctcaaccaatcggagaacctcccgcagccccctcaggtgtgggatctcttacaatggcttcaggtggtggcgcaccagtggcagacaataacgaaggtgccgatggagtgggtagttcctcgggaaattggcattgcgattcccaatggctgggggacagagtcatcaccaccagcacccgaacctgggccctgcccacctacaacaatcacctctacaagcaaatctccaacagcacatctggaggatcttcaaatgacaacgcctacttcggctacagcaccccctgggggtattttgacttcaacagattccactgccacttctcaccacgtgactggcagcgactcatcaacaacaactggggatttcggcctaagcgactcaacttcaagctcttcaacattcaggtcaaagaggttacggacaacaatggagtcaagaccatcgccaataaccttaccagcacggtccaggtcttcacggactcagactatcagctcccgtacgtgctcgggtcggctcacgagggctgcctcccgccgttcccagcggacgttttcatgattcctcagtacgggtatctgacgcttaatgatggaagccaggccgtgggtcgttcgtccttttactgcctggaatatttcccgtcgcaaatgctaagaacgggtaacaacttccagttcagctacgagtttgagaacgtacctttccatagcagctacgctcacagccaaagcctggaccgactaatgaatccactcatcgaccaatacttgtactatctctcaaagactattaacggttctggacagaatcaacaaacgctaaaattcagtgtggccggacccagcaacatggctgtccagggaagaaactacatacctggacccagctaccgacaacaacgtgtctcaaccactgtgactcaaaacaacaacagcgaatttgcttggcctggagcttcttcttgggctctcaatggacgtaatagcttgatgaatcctggacctgctatggccagccacaaagaaggagaggaccgtttctttcctttgtctggatctttaatttttggcaaacaaggaactggaagagacaacgtggatgcggacaaagtcatgataaccaacgaagaagaaattaaaactactaacccggtagcaacggagtcctatggacaagtggccacaaaccaccagagtgcccaagcacaggcgcagaccggctgggttcaaaaccaaggaatacttccgggtatggtttggcaggacagagatgtgtacctgcaaggacccatttgggccaaaattcctcacacggacggcaactttcacccttctccgctgatgggagggtttggaatgaagcacccgcctcctcagatcctcatcaaaaacacacctgtacctgcggatcctccaacggccttcaacaaggacaagctgaactctttcatcacccagtattctactggccaagtcagcgtggagatcgagtgggagctgcagaaggaaaacagcaagcgctggaacccggagatccagtacacttccaactattacaagtctaataatgttgaatttgctgttaatactgaaggtgtatatagtgaaccccgccccattggcaccagatacctgactcgtaatctgtaattgcttgttaatcaataaaccgtttaattcgtttcagttgaactgcggcc

SEQ ID NO: 577 - DNA, 2580 bp, Artificial Sequence
  Description of Artificial Sequence: Synthetic polynucleotide
ccatcgacgtcagacgcggaagcttcgatcaactacgcggacaggtaccaaaacaaatgttctcgtcacgtgggcatgaatctgatgctgtttccctgcagacaatgcgagagactgaatcagaattcaaatatctgcttcactcacggtgtcaaagactgtttagagtgctttcccgtgtcagaatctcaacccgtttctgtcgtcaaaaaggcgtatcagaaactgtgctacattcatcacatcatgggaaaggtgccagacgcttgcactgcttgcgacctggtcaatgtggacttggatgactgtgtttctgaacaataaatgacttaaaccaggtatggctgccgatggttatcttccagattggctcgaggacaaccttagtgaaggaattcgcgagtggtgggctttgaaacctggagcccctcaacccaaggcaaatcaacaacatcaagacaacgctcgaggtcttgtgcttccgggttacaaataccttggacccggcaacggactcgacaagggggagccggtcaacgcagcagacgcggcggccctcgagcacgacaaggcctacgaccagcagctcaaggccggagacaacccgtacctcaagtacaaccacgccgacgccgagttccaggagcggctcaaagaagatacgtcttttgggggcaacctcgggcgagcagtcttccaggccaaaaagaggcttcttgaacctcttggtctggttgaggaagcggctaagacggctcctggaaagaagaggcctgtagagcagtctcctcgggaaccggactcctccgcgggtattggcaaatcgggtgcacagcccgctaaaaagagactcaatttcggtcagactggcgacacagagtcagtcccagaccctcaaccaatcggagaacctcccgcagccccctcaggtgtgggatctcttacaatggcttcaggtggtggcgcaccagtggcagacaataacgaaggtgccgatggagtgggtagttcctcgggaaattggcattgcgattcccaatggctgggggacagagtcatcaccaccagcacccgaacctgggccctgcccacctacaacaatcacctctacaagcaaatctccaacagcacatctggaggatcttcaaatgacaacgcctacttcggctacagcaccccctgggggtattttgacttcaacagattccactgccacttctcaccacgtgactggcagcgactcatcaacaacaactggggattccggcctaagcgactcaacttcaagctcttcaacattcaggtcaaagaggttacggacaacaatggagtcaagaccatcgccaataaccttaccagcacggtccaggtcttcacggactcagactatcagctcccgtacgtgctcgggtcggctcacgagggctgcctcccgccgttcccagcggacgttttcatgattcctcagtacgggtatctgacgcttaatgatggaagccaggccgtgggtcgttcgtccttttactgcctggaatatttcccgtcgcaaatgctaagaacgggtaacaacttccagttcagctacgagtttgagaacgtacctttccatagcagctacgctcacagccaaagcctggaccgactaatgaatccactcatcgaccaatacttgtactatctctcaaagactattaacggttctggacagaatcaacaaacgctaaaattcagtgtggccggacccagcaacatggctgtccagggaagaaactacatacctggacccagctaccgacaacaacgtgtctcaaccactgtgactcaaaacaacaacagcgaatttgcttggcctggagcttcttcttgggctctcaatggacgtaatagcttgatgaatcctggacctgctatggccagccacaaagaaggagaggaccgtttctttcctttgtctggatctttaatttttggcaaacaaggaactggaagagacaacgtggatgcggacaaagtcatgataaccaacgaagaagaaattaaaactactaacccggtagcaacggagtcctatggacaagtggccacaaaccaccagagtgcccaagcacaggcgcagaccggctgggttcaaaaccaaggaatacttccgggtatggtttggcaggacagagatgtgtacctgcaaggacccatttgggccaaaattcctcacacggacggcaactttcacccttctccgctgatgggagggtttggaatgaagcacccgcctcctcagatcctcatcaaaaacacacctgtacctgcggatcctccaacggccttcaacaaggacaagctgaactctttcatcacccagtattctactggccaagtcagcgtggagatcgagtgggaactgcagaaggaaaacagcaagcgctggaacccggagatccagtacacttccaactattacaagtctaataatgttgaatttgctgttaatactgaaggtgtatatagtgaaccccgccccattggcaccagatacctgactcgtaatctgtaattgcttgttaatcaataaaccgtttaatt

SEQ ID NO: 578 - DNA, 2601 bp, Artificial Sequence
  Description of Artificial Sequence: Synthetic polynucleotide
ccatcgacgtcagacgcggaagcttcgatcaactacgcggacaggtaccaaaacaaatgttctcgtcacgtgggcatgaatctgatgctgtttccctgcagacaatgcgagagactgaatcagaattcaaatatctgcttcactcacggtgtcaaagactgtttagagtgctttcccgtgtcagaatctcaacccgtttctgtcgtcaaaaaggcgtatcagaaactgtgctacattcatcacatcatgggaaaggtgccagacgcttgcactgcttgcgacctggtcaatgtggacttggatgactgtgtttctgaacaataaatgacttaaaccaggtatggctgccgatggttatcttccagattggctcgaggacaaccttagtgaaggaattcgcgagtggtgggctttgaaacctggagcccctcaacccaaggcaaatcaacaacatcaagacaacgctcgaggtcttgtgcttccgggttacaaataccttggacccggcaacggactcgacaagggggagccggtcaacgcagcagacgcggcggccctcgagcacgacaaggcctacgaccagcagctcaaggccggagacaacccgtacctcaagtacaaccacgccgacgccgagttccaggagcggctcaaagaagatacgtcttttgggggcaacctcgggcgagcagtctttcaggccaaaaagaggcttcttgaacctcttggtctggttgaggaagcggctaagacggctcctggaaagaagaggcctgtagagcagtctcctcaggaaccggactcctccgcgggtattggcaaatcgggtgcacagcccgctaaaaagagactcaatttcggtcagactggcgacacagagtcagtcccagaccctcaaccaatcggagaacctcccgcagccccctcaggtgtgggatctcttacaatggcttcatgtggtggcgcaccagtggcagacaataacgaaggtgccgatggagtgggtagttcctcgggaaattggcattgcgattcccaatggctgggggacagagtcatcaccaccagcacccgaacctgggccctgcccacctacaacaatcacctctacaagcaaatctccaacagcacatctggaggatcttcaaatgacaacgcctacttcggctacagcaccccctgggggtattttgacttcaacagattccactgccacttctcaccacgtgactggcagcgactcatcaacaacaactggggattccggcctaagcgactcaacttcaagctcttcaacattcaggtcaaagaggttacggacaacaatggagtcaagaccatcgccaataaccttaccagcacggtccaggtcttcacggactcagactatcagctcccgtacgtgctcgggtcggctcacgagggctgcctcccgccgttcccagcggacgttttcatgattcctcagtacgggtatctgacgcttaatgatggaagccaggccgtgggtcgttcgtccttttactgcctggaatatttcccgtcgcaaatgctaagaacgggtaacaacttccagttcagctacgagtttgagaacgtacctttccatagcagctacgctcacagccaaagcctggaccgactaatgaatccactcatcgaccaatacttgtactatctctcaaagactattaacggttctggacagaatcaacaaacgctaaaattcagtgtggccggacccagcaacatggctgtccagggaagaaactacatacctggacccagctaccgacaacaacgtgtctcaaccactgtgactcaaaacaacaacagcgaatttgcttggcctggagcttcttcttgggctctcaatggacgtaatagcttgatgaatcctggacctgctatggccagccacaaagaaggagaggaccgtttctttcctttgtctggatctttaatttttggcaaacaaggaactggaagagacaacgtggatgcggacaaagtcatgataaccaacgaagaagaaattaaaactactaacccggtagcaacggagtcctatggacaagtggccacaaaccaccagagtgcccaagcacaggcgcagaccggctgggttcaaaaccaaggaatacttccgggtatggtttggcaggacagagatgtgtacctgcaaggacccatttgggccaaaattcctcacacggacggcaactttcacccttctccgctgatgggagggtttggaatgaagcacccgcctcctcagatcctcatcaaaaacacacctgtacctgcggatcctccaacggccttcaacaaggacaagctgaactctttcatcacccagtattctactggccaagtcagcgtggagatcgagtgggagctgcagaaggaaaacagcaagcgctggaacccggagatccagtacacttccaactattacaagtctaataatgttgaatttgctgttaatactgaaggtgtatatagtgaaccccgccccattggcaccagatacctgactcgtaatctgtaattgcttgttaatcaataaaccgtttaattcgtttcagttgaactgcggcc

SEQ ID NO: 579 - DNA, 2601 bp, Artificial Sequence
  Description of Artificial Sequence: Synthetic polynucleotide
ccatcgacgtcagacgcggaagcttcgatcaactacgcggacaggtaccaaaacaaatgttctcgtcacgtgggcatgaatctgatgctgtttccctgcagacaatgcgagagactgaatcagaattcaaatatctgcttcactcacggtgtcaaagactgtttagagtgctttcccgtgtcagaatctcaacccgtttctgtcgtcaaaaaggcgtatcagaaactgtgctacattcatcacatcatgggaaaggtgccagacgcttgcactgcttgcgacctggtcaatgtggacttggatgactgtgtttctgaacaataaatgacttaaaccaggtatggctgccgatggttatcttccagattggctcgaggacaaccttagtgaaggaattcgcgagtggtgggctttgaaacctggagcccctcaacccaaggcaaatcaacaacatcaagacaacgctcgaggtcttgtgcttccgggttacaaataccttggacccggcaacggactcgacaagggggagccgatcaacgcagcagacgcggcggccctcgagcacgacaaggcctacgaccagcagctcaaggccggagacaacccgtacctcaagtacaaccacgccgacgccgagttccaggagcggctcaaagaagatacgtcttttgggggcaacctcgggcgagcagtcttccaggccaaaaagaggcttcttgaacctcttggtctggttgaggaagcggctaagacggctcctggaaagaagaggcctgtagagcagtctcctcaggaaccggactcctccgcgggtattggcaaatcgggtgcacagcccgctaaaaagagactcaatttcggtcagactggcgacacagagtcagtcccagaccctcaaccaatcggagaacctcccgcagccccctcaggtgtgggatctcttacaatggcttcaggtggtggcgcaccagtggcagacaataacgaaggtgccgatggagtgggtagttcctcgggaaattggcattgcgattcccaatggctgggggacagagtcatcaccaccagcacccgaacctgggccctgcccacctacaacaatcacctctacaagcaaatctccaacagcacatctggaggatcttcaaatgacaacgcctacttcggctacagcaccccctgggggtattttgacttcaacagattccactgccacttctcaccacgtgactggcagcgactcatcaacaacaactggggattccggcctaagcgactcaacttcaagctcttcaacattcaggtcaaagaggttacggacaacaatggagtcaagaccatcgccaataaccttaccagcacggtccaggtcttcacggactcagactatcagctcccgtacgtgctcgggtcggctcacgagggctgcctcccgccgttcccagcggacgttttcatgattcctcagtacgggtatctgacgcttaatgatggaagccaggccgtgggtcgttcgtccttttactgcctggaatatttcccgtcgcaaatgctaagaacgggtaacaacttccagttcagctacgagtttgagaacgtacctttccatagcagctacgctcacagccaaagcctggaccgactaatgaatccactcatcgaccaatacttgtactatctctcaaagactattaacggttctggacagaatcaacaaacgctaaaattcagtgtggccggacccagcaacatggctgtccagggaagaaactacatacctggacccagctaccgacaacaacgtgtctcaaccactgtgactcaaaacaacaacagcgaatttgcttggcctggagcttcttcttgggctctcaatggacgtaatagcttgatgaatcctggacctgctatggccagccacaaagaaggagaggaccgtttctttcctttgtctggatctttaatttttggcaaacaaggaactggaagagacaacgtggatgcggacaaagtcatgataaccaacgaagaagaaattaaaactactaacccggtagcaacggagtcctatggacaagtggccacaaaccaccagagtgcccaagcacaggcgcagaccggctgggttcaaaaccaaggaatacttccgggtatggtttggcaggacagagatgtgtacctgcaaggacccatttgggccaaaattcctcacacgtacggcaactttcacccttctccgctgatgggagggtttggaatgaagcacccgcctcctcagatcctcatcaaaaacacacctgtacctgcggatcctccaacggccttcaacaaggacaagctgaactctttcatcacccagtattctactggccaagtcagcgtggagatcgagtgggagctgcagaaggaaaacagcaagcgctggaacccggagatccagtacacttccaactattacaagtctaataatgttgaatttgctgttaatactgaaggtgtatatagtgaaccccgccccattggcaccagatacctgactcgtaatctgtaattgcttgttaatcaataaaccgtttaattcgtttcagttgaactgcggcc

SEQ ID NO: 580 - DNA, 2601 bp, Artificial Sequence
  Description of Artificial Sequence: Synthetic polynucleotide
ccatcgacgtcagacgcggaagcttcgatcaactacgcggacaggtaccaaaacaaatgttctcgccacgtgggcatgaatctgatgctgtttccctgcagacaatgcgagagactgaatcagaattcaaatatctgcttcactcacggtgtcaaagactgtttagagtgctttcccgtgtcagaatctcaacccgtttctgtcgtcaaaaaggcgtatcagaaactgtgctacattcatcacatcatgggaaaggtgccagacgcttgcactgcttgcgacctggtcaatgtggacttggatgactgtgtttctgaacaataaatgacttaaaccaggtatggctgccgatggttatcttccagattggctcgaggacaaccttagtgaaggaattcgcgagtggtgggctttgaaacctggagcccctcaacccaaggcaaatcaacaacatcaagacaacgctcgaggtcttgtgcttccgggttacaaataccttggacccggcaacggactcgacaagggggagccggtcaacgcagcagacgcggcggccctcgagcacgacaaggcctacgaccagcagctcaaggccggagacaacccgtacctcaagtacaaccacgccgacgccgagttccaggagcggctcaaagaagatacgtcttttgggggcaacctcgggcgagcagtcttccaggccaaaaagaggcttcttgaacctcttggtctggttgaggaagcggctaagacggctcctggaaagaagaggcctgtagagcagtctcctcaggaaccggactcctccgcgggtattggcaaatcgggtgcacagcccgctaaaaagagactcaatttcggtcagactggcgacacagagtcagtcccagaccctcaaccaatcggagaacctcccgctgccccctcaggtgtgggatctcttacaatggcttcaggtggtggcgcaccagtggcagacaataacgaaggtgccgatggagtgggtagttcctcgggaaattggcattgcgattcccaatggctgggggacagagtcatcaccaccagcacccgaacctgggccctgcccacctacaacaatcacctctacaagcaaatctccaacagcacatctggaggatcttcaaatgacaacgcctacttcggctacagcaccccctgggggtattttgacttcaacagattccactgccacttctcaccacatgactggcagcgactcatcaacaacaactggggattccggcctaagcgactcaacttcaagctcttcaacattcaggtcaaagaggttacggacaacaatggagtcaagaccatcgccaataaccttaccagcacggtccaggtcttcacggactcagactatcagctcccgtacgtgctcgggtcggctcacgagggctgcctcccgccgttcccagcggacgttttcatgattcctcagtacgggtatctgacgcttaatgatggaagccaggccgtgggtcgttcgtccttttactgcctggaatatttcccgtcgcaaatgctaagaacgggtaacaacttccagttcagctacgagtttgagaacgtacctttccatagcagctacgctcacagccaaagcctggaccgactaatgaatccactcatcgaccaatacttgtactatctctcaaagactattaacggttctggacagaatcaacaaacgctaaaattcaatgtggccggacccagcaacatggctgtccagggaagaaactacatacctggacccagctaccgacaacaacgtgtctcaaccactgtgactcaaaacaacaacagcgaatttgcctggcctagagcttcttcttgggctctcaatggacgtaatagcttgatgaatcctggacctgctatggccagccacaaagaaggagaggaccgtttctttcctttgtctggatctttaatttttggcaaacaaggaactggaagagacaacgtggatgcggacaaagtcatgataaccaacgaagaagaaattaaaactactaacccggtagcaacggagtcctatggacaagtggccacaaaccaccagagtgcccaagcacaggcgcagaccggctgggttcaaaaccaaggaatacttccgggtatggtttggcaggacagagatgtgtacctgcaaggacccatttgggccaaaattcctcacacggacggcaactttcacccttctccgctgatgggagggtttggaatgaagcacccgcctcctcagatcctcatcaaaaacacacctgtacctgcggatcctccaacggccttcaacaaggacaagctgaactctttcatcacccagtattctactggccaagtcagcatggagatcgagtgggagctgcagaaggaaaacagcaagcgctggaacccggagatccagtacacttccaactattacaagtctaataatgttgaatttgctgttaatactgaaggtgtatatagtgaaccccgccccattggcaccagatacctgactcgtaatctgtaattgcttgttaatcaataaaccgtttaattcgtttcagttgaactgcggcc

SEQ ID NO: 581 - DNA, 2601 bp, Artificial Sequence
  Description of Artificial Sequence: Synthetic polynucleotide
ccatcgacgtcagacgcggaagcttcgatcaactacgcggacaggtaccaaaacaaatgttctcgtcacgtgggcatgaatctgatgctgtttccctgcagacaatgcgagagactgaatcagaattcaaatatctgcttcactcacggtgtcaaagactgtttagagtgctttcccgtgtcagaatctcaacccgtttctgtcgtcaaaaaggcgtatcagaaactgtgctacattcatcacatcatgggaaaggtgccagacgcttgcactgcttgcgacctggtcaatgtggacttggatgactgtgtttctgaacaataaatgacttaaaccaggtatggctgccgatggttatcttccagattggctcgaggacaaccttagtgaaggaattcgcgagtggtgggctttgaaacctggagcccctcaacccaaggcaaatcaacaacatcaagacaacgctcgaggtcttgtgcttccgggttacaaataccttggacccggcaacggactcgacaagggggagccggtcaacgcagcagacgcggcggccctcgagcacgacaaggcctacgaccagcagctcaaggccggagacaacccgtacctcaagtacaaccacgccgacgccgagttccaggagcggctcaaagaagatacgtcttttgggggcaacctcgggcgagcagtcttccaggccaaaaagaggcttcttgaacctcttggtctggttgaggaagcggctaagacggctcctggaaagaagaggcctgtagagcagtctcctcaggaaccggactcctccgcgggtattggcaaatcgggtgcacagcccgctaaaaagagactcaatttcggtcagactggcgacacagagtcagtcccagaccctcaaccaatcggagaacctcccgcagccccctcaggtgtgggatctcttacaatggcttcaggtggtggcgcaccagtggcagacaataacgaaggtgccgatggagtgggtagttcctcgggaaattggcattgcgattcccaatggctgggggacagagtcatcaccaccagcacccgaacctgggccctgcccacctacaacaatcacctctacaagcaaatctccaacagcacatctggaggatcttcaaatgacaacgcctacttcggctacagcaccccctgggggtattttgacttcaacagattccactgccacttctcaccacgtgactggcagcgactcatcaacaacaactggggattccggcctaagcgactcaacttcaagctcttcaacattcaggtcaaagaggttacggacaacaatggagtcaagaccatcgccaataaccttaccagcacggtccaggtcttcacggactcagactatcagctcccgtacgtgctcgggtcggctcacgagggctgcctcccgccgttcccagcggacgttttcatgattcctcagtacgggtatctgacgcttaatgatggaagccaggccgtgggtcgttcgtccttttactgcctggaatatttcccgtcgcaaatgctaagaacgggtaacaacttccagttcagctacgagtttgagaacgtacctttccatagcagctacgctcacagccaaagcctggaccgactaatgaatccactcatcgaccaatacttgtactatctctcaaagactattaacggttctggacagaatcaacaaacgctaaaattcagtgtggccggacccagcaacatggctgtccagggaagaaactacatacctggacccagctaccgacaacaacgtgtctcaaccactgtgactcaaaacaacaacagcgaatttgcttggcctagagcttcttcttgggctctcaatggacgtaatagcttgatgaatcctggacctgctatggccagccacaaagaaggagaggaccgtttctttcctttgtctggatctttaatttttggcaaacaaggaactggaagagacaacgtggatgcggacaaagtcatgataaccaacgaagaagaaattaaaactactaacccggtagcaacggagtcctatggacaagtggccacaaaccaccagagtgcccaagcacaggcgcagaccggctgggttcaaaaccaaggaatacttccgggtatggtttggcaggacagagatgtgtacctgcaaggacccatttgggccaaaattcctcacacggacggcaactttcacccttctccgctgatgggagggtttggaatgaagcacccgcctcctcagatcctcatcaaaaacacacctgtacctgcggatcctccaacggccttcaacaaggacaagctgaactctttcatcacccagtattctactggccaagtcagcgtggagatcgagtgggagctgcagaaggaaaacagcaagcgctggaacccggagatccagtacacttccaactattacaagtctaataatgttgaatttgctgttaatactgaaggtgtatatagtgaaccccgccccattggcaccagatacctgactcgtaatctgtaattgcttgttaatcaataaaccgtttaattcgtttcagttgaactgcggcc

SEQ ID NO: 582 - DNA, 2601 bp, Artificial Sequence
  Description of Artificial Sequence: Synthetic polynucleotide
ccatcgacgtcagacgcggaagcttcgatcaactacgcggacaggtaccaaaacaaatgttctcgtcacgtgggcatgaatctgatgctgtttccctgcagacaatgcgagagactgaatcagaattcaaatatctgcttcactcacggtgtcaaagactgtttagagtgctttcccgtgtcagaatctcaacccgtttctgtcgtcaaaaaggcgtatcagaaactgtgctacattcatcacatcatgggaaaggtgccagacgcttgcactgcttgcgacctggtcaatgtggacttggatgactgtgtttctgaacaataaatgacttaaaccaggtatggctgccgatggttatcttccagattggctcgaggacaaccttagtgaaggaattcgcgagtggtgggctttgaaacctggagcccctcaacccaaggcaaatcaacaacatcaagacaacgctcgaggtcttgtgcttccgggttacaaataccttggacccggcaacggactcgacaagggggagccggtcaacgcagcagacgcggcggccctcgagcacgacaaggcctacgaccagcagctcaaggccggagacaacccgtacctcaagtacaaccacgccgacgccgagttccaggagcggctcaaagaagatacgtcttttgggggcaacctcgggcgagcagtcttccaggccaaaaagaggcttcttgaacctcttggtctggttgaggaagcggctaagacggctcctggaaagaagaggcctgtagagcagtctcctcaggaaccggactcctccgcgggtattggcaaatcgggtgcacagcccgctaaaaagagactcaatttcggtcagactggcgacacagagtcagtcccagaccctcaaccaatcggagaacctcccgcagccccctcaggtgtgggatctcttacaatggcttcaggtggtggcgcaccagtggcagacaataacgaaggtgccgatggagtgggtagttcctcgggaaattggcattgcgattcccaatggctgggggacagagtcatcaccaccagcacccgaacctgggccctgcccacctacaacaatcacctctacaagcaaatctccaacagcacatctggaggatcttcaaatgacaacgcctacttcggctacagcaccccctgggggtattttgacttcaacagattccactgccacttctcaccacgtgactggcagcgactcatcaacaacaactggggattccggcctaagcgactcaacttcaagctcttcaacattcaggtcaaagaggttacggacaacaatggagtcaagaccatcgccaataaccttaccagcacggtccaggtcttcacggactcagactatcagctcccgtacgtgctcgggtcggctcacgagggctgcctcccgccgttcccagcggacgttttcatgattcctcagtacgggtatctgacgcttaatgatggaagccaggccgtgggtcgttcgtccttttactgcctggaatatttcccgtcgcaaatgctaagaacgggtaacaacttccagttcagctacgagtttgagaacgtacctttccatagcagctacgctcacagccaaagcctggaccgactaatgaatccactcatcgaccaatacttgtactatctctcaaagactattaacggttctggacagaatcaacaaacgctaaaattcagtgtggccggacccagcaacatggctgtccagggaagaaactacatacctggacccagctaccgacaacaacgtgtctcaaccactgtgactcaaaacaacaacagcgaatttgcttggcctagagcttcttcttgggctctcaatggacgtaatagcttgatgaatcctggacctgctatggccagccacaaagaaggagaggaccgtttctttcctttgtctggatctttaatttttggcaaacaaggaactggaagagacaacgtggatgcggacaaagtcatgataaccaacgaagaagaaattaaaactactaacccggtagcaacggagtcctatggacaagtggccacaaaccaccagagtgcccaagcacaggcgcagaccggctgggttcaaaaccaaggaatacttccgggtatggtttggcaggacagagatgtgtacctgcaaggacccatttgggccaaaattcctcacacggacggcaactttcacccttctccgctgatgggagggtttggaatgaagcacccgcctcctcagatcctcatcaaaaacacacctgtacctgcggatcctccaacggccttcaacaaggacaagctgaactctttcatcacccagtattctactggccaagtcagcgtggagatcgagtgggagcggcagaaggaaaacagcaagcgctggaacccggagatccagtacacttccaactattacaagtctaataatgttgaatttgctgttaatactgaaggtgtatatagtgaaccccgccccattggcaccagatacctgactcgtaatctgtaattgcttgttaatcaataaaccgtttaattcgtttcagttgaactgcggcc

SEQ ID NO: 583 - DNA, 2601 bp, Artificial Sequence
  Description of Artificial Sequence: Synthetic polynucleotide
ccatcgacgtcagacgcggaagcttcgatcaactacgcggacaggtaccaaaacaaatgttctcgtcacgtgggcatgaatctgatgctgtttccctgcagacaatgcgagagactgaatcagaattcaaatatctgcttcactcacggtgtcaaagactgtttagagtgctttcccgtgtcagaatctcaacccgtttctgtcgtcaaaaaggcgtatcagaaactgtgctacattcatcacatcatgggaaaggtgccagacgcttgcactgcttgcgacctggtcaatgtggacttggatgactgtgtttctgaacaataaatgacttaaaccaggtatggctgccgatggttatcttccagattggctcgaggacaaccttagtgaaggaattcgcgagtggtgggctttgaaacctggagcccctcaacccaaggcaaatcaacaacatcaagacaacgctcgaggtcttgtgcttccgggttacaaataccttggacccggcaacggactcgacaagggggagccggtcaacgcagcagacgcggcggccctcgagcacgacaaggcctacgaccagcagctcaaggccggagacaacccgtacctcaagtacaaccacgccgacgccgagttccaggagcggctcaaagaagatacgtcttttgggggcaacctcgggcgagcagtcttccaggccaaaaagaggcttcttgaacctcttggtctggttgaggaagcggctaagacggctcctggaaagaagaggcctgtagagcagtctcctcaggaaccggactcctccgcgggtattggcaaatcgggtgcacagcccgctaaaaagagactcaatttcggtcagactggcgacacagagtcagtcccagaccctcaaccaatcggagaacctcccgcagccccctcaggtgtgggatctcttacaatggcttcaggtggtggcgcaccagtggcagacaataacgaaggtgccgatggagtgggtagttcctcgggaaattggcattgcgattcccaatggctgggggacagagtcatcaccaccagcacccgaacctgggccctgcccacctacaacaatcacctctacaagcaaatctccaacagcacatctggaggatcttcaaatgacaacgcctacttcggctacagcaccccctgggggtattttgacttcaacagattccactgccacttctcaccacgtgactggcagcgactcatcaacaacaactggggattccggcctaagcgactcaacttcaagctcttcaacattcaggtcaaagaggttacggacaacaatggagtcaagaccatcgccaataaccttaccagcacggtccaggtcttcgcggactcagactatcagctcccgtacgtgctcgggtcggctcacgagggctgcctcccgccgttcccagcggacgttttcatgattcctcagtacgggtatctgacgcttaatgatggaagccaggccgtgggtcgttcgtccttttactgcctggaatatttcccgtcgcaaatgctaagaacgggtaacaacttccagttcagctacgagtttgagaacgtacctttccatagcagctacgctcacagccaaagcctggaccgactaatgaatccactcatcgaccaatacttgtactatctctcaaagactattaacggttctggacagaatcaacaaacgctaaaattcagtgtggccggacccagcaacatggctgtccagggaagaaactacatacctggacccagctaccgacaacaacgtgtctcaaccactgtgactcaaaacaacaacagcgaatttgcttggcctagagcttcttcttgggctctcaatggacgtaatagcttgatgaatcctggacctgctatggccagccacaaagaaggagaggaccgtttctttcctttgtctggatctttaatttttggcaaacaaggaactggaagagacaacgtggatgcggacaaagtcatgataaccaacgaagaagaaattaaaactactaacccggtagcaacggagtcctatggacaagtggccacaaaccaccagagtgcccaagcacaggcgcagaccggctgggttcaaaaccaaggaatacttccgggtatggtttggcaggacagagatgtgtacctgcaaggacccatttgggccaaaattcctcacacggacggcaactttcacccttctccgctgatgggagggtttggaatgaagcacccgcctcctcagatcctcatcaaaaacacacctgtacctgcggatcctccaacggccttcaacaaggacaagctgaactctttcatcacccagtattctactggccaagtcagcgtggagatcgagtgggagctgcagaaggaaaacagcaagcgctggaacccggagatccagtacacttccaactattacaagtctaataatgttgaatttgctgttaatactgaaggtgtatatagtgaaccccgccccattggcaccagatacctgactcgtaatctgtaattgcttgttaatcaataaaccgtttaattcgtttcagttgaactgcggcc

SEQ ID NO: 584 - DNA, 2601 bp, Artificial Sequence
  Description of Artificial Sequence: Synthetic polynucleotide
ccatcgacgtcagacgcggaagcttcgatcaactacgcggacaggtaccaaaacaaatgttctcgtcacgtgggcatgaatctgatgctgtttccctgcagacaatgcgagagactgaatcagaattcaaatatctgcttcactcacggtgtcaaagactgtttagagtgctttcccgtgtcagaatctcaacccgtttctgtcgtcaaaaaggcgtatcagaaactgtgctacattcatcacatcatgggaaaggtgccagacgcttgcactgcttgcgacctggtcaatgtggacttggatgactgtgtttctgaacaataaatgacttaaaccaggtatggctgccgatggttatcttccagattggctcgaggacaaccttagtgaaggaattcgcgagtggtgggctttgaaacctggagcccctcaacccaaggcaaatcaacaacatcaagacaacgctcgaggtcttgtgcttccgggttacaaataccttggacccggcaacggactcgacaagggggagccggtcaacgcagcagacgcggcggccctcgagcacgacaaggcctacgaccagcagctcaaggccggagacaacccgtacctcaagtacaaccacgccgacgccgagttccaggagcggctcaaagaagatacgtcttttgggggcaacctcgggcgagcagtcttccaggccaaaaagaggcttcttgaacctcttggtctggttgaggaagcggctaagacggctcctggaaagaagaggcctgtagagcagtctcctcaggaaccggactcctccgcgggtattggcaaatcgggtgcacagcccgctaaaaagagactcaatttcggtcagactggcgacacagagtcagtcccagaccctcaaccaatcggagaacctcccgcagccccctcaggtgtgggatctcttacaatggcttcaggtggtggcgcaccagtggcagacaataacgaaggtgccgatggagtgggtagttcctcgggaaattggcattgcgattcccaatggctgggggacagagtcatcaccaccagcacccgaacctgggccctgcccacctacaacaatcacctctacaagcaaatctccaacagcacatctggaggatcttcaaatgacaacgcctacttcggctacagcaccccctgggggtattttgacttcaacagattccactgccacttctcaccacgtgactggcagcgactcatcaacaacaactggggattccggcctaagcgactcaacttcaagctcttcaacattcaggtcaaagaggttacggacaacaatggagtcaagaccatcgccaataaccttaccagcacggtccaggtcttcacggactcagactatcagctcccgtacgtgctcgggtcggctcacgagggctgcctcccgccgttcccagcggacgttttcatgattcctcagtacgggtatctgacgcttaatgatggaagccaggccgtgggtcgttcgtccttttactgcctggaatatttcccgtcgcaaatgctaagaacgggtaacaacttccagttcagctacgagtttgagaacgtacctttccatagcagctacgctcacagccaaagcctggaccgactaatgaatccactcatcgaccaatacttgtactatctctcaaagactattaacggttctggacagaatcaacaaacgctaaaattcagtgtggccggacccagcaacatggctgtccagggaagaaactacatacctggacccagctaccgacaacaacgtgtctcaaccactgtgactcaaaacaacaacagcgaaattgcttggcctagagcttcttcttgggctctcaatggacgtaatagcttgatgaatcctggacctgctatggccagccacaaagaaggagaggaccgtttctttcctttgtctggatctttaatttttggcaaacaaggaactggaagagacaacgtggatgcggacaaagtcatgataaccaacgaagaagaaattaaaactactaacccagtagcaacggagtcctatggacaagtggccacaaaccaccagagtgcccaagcacaggcgcagaccggctgggttcaaaaccaaggaatacttccgggtatggtttggcaggacagagatgtgtacctgcaaggacccatttgggccaaaattcctcacacggacggcaactttcacccttctccgctgatgggagggtttggaatgaagcacccgcctcctcagatcctcatcaaaaacacacctgtacctgcggatcctccaacggccttcaacaaggacaagctgaactctttcatcacccagtattctactggccaagtcagcgtggagatcgagtgggagctgcagaaggaaaacagcaagcgctggaacccggagatccagtacacttccaactattgcaagtctaataatgttgaatttgctgttaatactgaaggtgtatatagtgaaccccgccccattggcaccagatacctgactcgtaatctgtaattgcttgttaatcaataaaccgtttaattcgtttcagttgaactgcggcc

SEQ ID NO: 585 - DNA, 2601 bp, Artificial Sequence
  Description of Artificial Sequence: Synthetic polynucleotide
ccatcgacgtcagacgcggaagcttcgatcaactacgcggacaggtaccaaaacaaatgttctcgtcacgtgggcatgaatctgatgctgtttccctgcagacaatgcgagagactgaatcagaattcaaatatctgcttcactcacggtgtcaaagactgtttagagtgctttcccgtgtcagaatctcaacccgtttctgtcgtcaaaaaggcgtatcagaaactgtgctacattcatcacatcatgggaaaggtgccagacgcttgcactgcttgcgacctggtcaatgtggacttggatgtctgtgtttctgaacaataaatgacttaaaccaggtatggctgccgatggttatcttccagattggctcgaggacaaccttagtgaaggaattcgcgagtggtgggctttgaaacctggagcccctcaacccaaggcaaatcaacaacatcaagacaacgctcgaggtcttgtgcttccgggttacaaataccttggacccggcaacggactcgataagggggagccggtcaacgcagcagacgcggcggccctcgagcacgacaaggcctacgaccagcagctcaaggccggagacaacccgtacctcaagtacaaccacgccgacgccgagttccaggagcggctcaaagaagatacgtcttttgggggcaacctcgggcgagcagtcttccaggccaaaaagaggcttcttgaacctcttggtctggttgaggaagcggctaagacggctcctggaaagaagaggcctgtagagcagtctcctcaggaaccggactcctccgcgggtattggcaaatcgggtgcacagcccgctaaaaagagactcaatttcggtcagactggcgacacagagtcagtcccagaccctcaaccaatcggagaacctcccgcagccccctcaggtgtgggatctcttacaatggcttcaggtggtggcgcaccagtggcagacaataacgaaggtgccgatggagtgggtagttcctcgggaaattggcattgcgattcccaatggctgggggacagagtcatcaccaccagcacccgaacctgggccctgcccacctacaacaatcacctctacaagcaaatctccaacagcacatctggaggatcttcaaatgacaacgcctacttcggctacagcaccccctgggggtattttgacttcaacagattccactgccacttctcaccacgtgactggcagcgactcatcaacaacaactggggattccggcctaagcgactcaacttcaagctcttcaacattcaggtcaaagaggttacggacaacaatggagtcaagaccatcgccaataaccttaccagcacggtccaggtcttcacggactcagactatcagctcccgtacgtgctcgggtcggctcacgagggctgcctcccgccgttcccagcggacgttttcatgattcctcagtacgggtatctgacgcttaatgatggaagccaggccgtgggtcgttcgtccttttactgcctggaatatttcccgtcgcaaatgctaagaacgggtaacaacttccagttcagctacgagtttgagaacgtacctttccatagcagctacgctcacagccaaagcctggaccgactaatgaatccactcatcgaccaatacttgtactatctctcaaagactattaacggttctggacagaatcaacaaacgctaaaattcagtgtggccggacccagcaacatggctgtccagggaagaaactacatacctggacccagctaccgacaacaacgtgtctcaaccactgtgactcaaaacaacaacagcgaatttgcttggcctagagcttcttcttgggctctcaatggacgtaatagcttgatgaatcctggacctgctatggccagccacaaagaaggagaggaccgtttctttcctttgtctggatctttaatttttggcaaacaaggaactggaagagacaacgtggatgcggacaaagtcatgataaccaacgaagaagaaattaaaactactaacccggtagcaacggagtcctatggacaagtggccacaaaccaccagagtgcccaagcacaggcgcagaccggctgggttcaaaaccaaggaatacttccgggtatggtttggcaggacagagatgtgtacctgcaaggacccatttgggccaaaattcctcacacggacggcaactttcacccttctccgctgatgggagggtttggaatgaagcacccgcctcctcagatcctcatcaaaaacacacctgtacctgcggatcctccaacggccttcaacaaggacaagctgaactctttcatcacccagtattctactggccaagtcagcgtggagatcgagtgggagctgcagaaggaaaacagcaagcgctggaacccggagatccagtacacttccaactattacaagtctaataatgttgaatttgctgttaatactgaaggtgtatatagtgaaccccgccccattggcaccagatacctgactcgtaatctgtaattgcttgttaatcaataaaccgtttaattcgtttcagttgaactgcggcc

SEQ ID NO: 586 - protein, 736 aa, Artificial Sequence
  Description of Artificial Sequence: Synthetic polypeptide
MTADGYLPDWLEDNLSEGIREWWALKPGAPQPKANQQHQDNARGLVLPGYKYLGPGNGLDKGEPVNAADAAALEHDKAYDQQLKAGDNPYLKYNHADAEFQERLKEDTSFGGNLGRAVFQAKKRLLEPLGLVEEAAKTAPGKKRPVEQSPQEPDSSAGIGKSGAQPAKKRLNFGQTGDTESVPDPQPIGEPPAAPSGVGSLTMASGGGAPVADNNEGADGVGSSSGNWHCDSQWLGDRVITTSTRTWALPTYNNHLYKQISNSTSGGSSNDNAYFGYSTPWGYFDFNRFHCHFSPRDWQRLINNNWGFRPKQLNFKLFNIQVKEVTDNNGVKTIANNLTSTVQVFTDSDYQLPYVLGSAHEGCLPPFPADVFMIPQYGYLTLNDGSQAVGRSSFYCLEYFPSQMLRTGNNFQFSYEFENVPFHSSYAHSQSLDRLMNPLIDQYLYYLSKTINGSGQNQQTLKFSVAGPSNMAVQGRNYIPGPSYRQQRVSTTVTQNNNSEFAWPGASSWALNGRNSLMNPGPAMASHKEGEDRFFPLSGSLIFGKQGTGRDNVDADKVMITNEEEIKTTNPVATESYGQVATNHQSAQAQAQTGWVQNQGILPGMVWQDRDVYLQGPIWAKIPHTDGNFHPSPLMGGFGMKHPPPQILIKNTPVPADPPTAFNKDKLNSFITQYSTGQVSVEIEWELQKENSKRWNPEIQYTSNYYKSNNVEFAVNTEGVYSEPRPIGTRYLTRNL

SEQ ID NO: 587 - protein, 736 aa, Artificial Sequence
  Description of Artificial Sequence: Synthetic polypeptide
MAADGYLPDWLEDNLSEGIREWWALKPGAPQPKANQQHQDNARGLVLPGYKYLGPGNGLDKGEPVNAADAAALEHDKAYDQQLKAGDNPYLKYNHADAEFQERLKEDTSFGGNLGRAVFQAKKRLLEPLGLVEEAAKTAPGKKRPVEQSPQEPDSSAGIGKSGAQPAKKRLNFGQTGDTESVPDPQPIGEPPAAPSGVGSLTMASGGGAPVADNNEGADGVGSSSGNWHCDSQWLGDRVITTSTRTWALPTYNNHLYKQISNSTSGGSSNDNAYFGYSTPWGYFDFNRFHCHFSPRDWQRLINNNWGFRPKRLNFKLFNIQVKEVTDNNGVKTIANNLTSTVQVFTDSDYQLPYVLGSAHEGCLPPFPADVFMIPQYGYLTLNDGSQAVGRSSFYCLEYFPSQMLRTGNNFQFSYEFENVPFHSSYAHSQSLDRLMNPLIDQYLYYLSKTINGSGQNQQTLKFSVAGPSNMAVQGRNYIPGPSYRQQRVSTTVTQNNNSEFAWPGASSWALNGRNSLMNPGPAMASHKEGEDRFFPLSGSLIFGKQGTGRDNVDADKVMITNEEEIKTTNPVATESYGQVATNHQSAQAQAQTGWVQNQGILPGMVWQDRDVYLQGPIWAKIPHTGGNFHPSPLMGGFGMKHPPPQILIKNTPVPADPPTAFNKDKLNSFITQYSTGQVSVEIEWELQKENSKRWNPEIQYTSNYYKSNNVEFAVNTGGVYSEPRPIGTRYLTRNL

SEQ ID NO: 588 - protein, 736 aa, Artificial Sequence
  Description of Artificial Sequence: Synthetic polypeptide
MAADGYLPDWLEDNLSEGIREWWALKPGAPQPKANQQHQDNARGLVLPGYKYLGPGNGLDKGEPVNAADAAALEHDKAYDQQLKAGDNPYLKYNHADAEFQERLKEDTSFGGNLGRAVFQAKKRLLEPLGLVEEAAKTAPGKKRPVEQSPQEPDSSAGIDKSGAQPAKKRLNFGQTGDTESVPDPQPIGEPPAAPSGVGSLTMASGGGAPVADNNEGADGVGSSSGNWHCDSQWLGDRVITTSTRTWALPTYNNHLYKQISNSTSGGSSNDNAYFGYSTPWGYFDFNRFHCHFSPRDWQRLINNNWGFRPKRLNFKLFNIQVKEVTDNNGVKTIANNLTSTVQVFTDSDYQLPYVLGSAHEGCLPPFPADVFMIPQYGYLTLNDGSQAVGRSSFYCLEYFPSQMLRTGNNFQFSYEFENVPFHSSYAHSQSLDRLMNPLIDQYLYYLSKTINGSGQNQQTLKFSVAGPSNMAVQGRNYIPGPSYRQQRVSTTVTQNNNSEFAWPGASSWALNGRNSLMNPGPAMASHKEGEDRFFPLSGSLIFGKQGTGRDNVDADKVMITNEEEIKTTNPVATESYGQVATNHQSAQAQAQTGWVQNQGILPGMVWQDRDVYLQGPIWAKIPHTDGNFHPSPLMGGFGMKHPPPQILIKNTPVPADPPTAFNKDKLNSFITQYSTGQVSVEIEWELQKENSKRWNPEIQYTSNYYKSNNVEFAVNTEGVYSEPRPIGTRYLTRNL

SEQ ID NO: 589 - protein, 736 aa, Artificial Sequence
  Description of Artificial Sequence: Synthetic polypeptide
MAADGYLPDWLEDNLSEGIREWWALKPGAPQPKANQQHQDNARGLVLPGYKYLGPGNGLDKGEPVNAADAAALEHDKAYDQQLKAGDNPYLKYNHADAEFQERLKEDTSFGGNLGRAVLQAKKRLLEPLGLVEEAAKTAPGKKRPVEQSPQEPDSSAGIGKSGAQPAKKRLNFGQTGDTESVPDPQPIGEPPAAPSGVGSLTMASGGGAPVADNNEGADGVGSSSGNWHCDSQWLGDRVITTSTRTWALPTYNNHLYKQISNSTSGGSSNDNAYFGYSTPWGYFDFNRFHCHFSPRDWQRLINNNWGFRPKRLNFKLFNIQVKEVTDNNGVKTIANNLTSTVQVFTDSDYQLPYVLGSAHEGCLPPFPADVFMIPQYGYLTLNDGSQAVGRSSFYCLEYFPSQMLRTGNNFQFSYEFENVPFHSSYAHSQSLDRLMNPLIDQYLYYLSKTINGSGQNQQTLKFSVAGSSNMAVQGRNYIPGPSYRQQRVSTTVTQNNNSEFAWPGASSWALNGRNSLMNPGPAMASHKEGEDRFFPLSGSLIFGKQGTGRDNVDADKVMITNEEEIKTTNPVATESYGQVATNHQSAQAQAQTGWVQNQGILPGMVWQDRDVYLQGPIWAKIPHTDGNFHPSPLMGGFGMKHPPPQILIKNTPVPADPPTAFNKDKLNSFITQYSTGQVSVEIEWELQKENSKRWNPEIQYTSNYYKSNNVEFAVNTEGVYSEPRPIGTRYLTRNL

SEQ ID NO: 590 - protein, 736 aa, Artificial Sequence
  Description of Artificial Sequence: Synthetic polypeptide
MAADGYLPDWLEDNLSEGIREWWALKPGAPQPKANQQHQDNARGLVLPGYKYLGPGNGLDKGEPVNAADAAALEHDRAYDQQLKAGDNPYLKYNHADAEFQERLKEDTSFGGNLGRAVFQAKKRLLEPLGLVEEAAKTAPGKKRPVEQSPQEPDSSAGIGKSGAQPAKKRLNFGQTGDTESVPDPQPIGEPPAAPSGVGSLTMASGGGAPVADNNEGADGVGSSSGNWHCDSQWLGDRVITTSTRTWALPTYNNHLYKQISNSTSGGSSNDNAYFGYSTPWGYFDFNRFHCHFSPRDWQRLINNNWGFRPKRLNFKLFNIQVKEVTDNNGVKTIANNLTSTVQVFTDSDYQLPYVLGSAHEGCLPPFPADVFMIPQYGYLTLNDGSQAVGRSSFYCLEYFPSQMLRTGNNFQFSYEFENVPFHSSYAHSQSLDRLMNPLIDQYLYYLSKTINGSGQNQQTLKFSVAGPSNMAVQGRNYIPGPSYRQQRVSTTVTQNNNSEFAWPGASSWALNGRNSLMNPGPAMASHKEGEDRFFPLSGSLIFGKQGTGRDNVDADKVMITNEEEIKTTNPVATESYGQVATNHQSAQAQAQTGWVQNQGILPGMVWQDRDVYLQGPIWAKIPHTDGNFHPSPLMGGFGMKHPPPQILIKNTPVPADPPTAFNKDKLNSFITQYSTGQVSVEIEWELQKKNSKRWNPEIQYTSNYYKSNNVEFAVNTEGVYSEPRPIGTRYLTRNL

SEQ ID NO: 591 - protein, 736 aa, Artificial Sequence
  Description of Artificial Sequence: Synthetic polypeptide
MAADGYLPDWLEDNLSEGIREWWALKPGAPQPKANQQHQDNARGLVLPGYKYLGPGNGLDKGEPVNAADAAALEHDKAYDQQLKAGDNPYLKYNHADAEFQERLKEDTSFGGNLGRAVFQAKKRLLEPLGLVEEAAKTAPGKKRPVEQSPQEPDSSAGIGKSGAQPAKKRLNFGQTGDTESVPDPQPIGEPPAAPSGVGSLTMASGGGAPVADNNEGADGVGSSSGNWHCDSQWLGDRVITTSTRTWALPTYNNHLYKQISNSTSGGSSNDNAYFGYSTPWGYFDFNRFHCHFSPRDWQRLINNNWGFRPKRLNFKLFNIQVKEVTDNNGVKTIANNLTSTVQVFTDSDYQLPYVLGSAHEGCLPPFPADVFMIPQYGYLTLNDGSQAVGRSSFYCLEYFPSQMLRTGNNFQFSYEFENVPFHSSYAHSQSLDRLMNPLIDQYLYYLSKTINGSGQNQQTLKFSVAGPSNMAVQGRNYIPGPSYRQQRVSTTVTQNNNSEFAWPGASSWALNGRNSLMNPGPAMASHKEGEDRFFPLSGSLIFGKQGTGRDNVDADKVMITNEEEIKTTNPVATESYGQVATNHQSAQARAQTGWVQNQGILPGMVWQDRDVYLQGPIWAKIPHTDGNFHPSPLMGGFGMKHPPPQILIKNTPVPADPPTAFNKDKLNSFITQYSTGQVSVEIEWELQKENSKRWNPEIQYTSNYYKSNNVEFAVNTEGVYSEPRPIGTRYLTRNL

SEQ ID NO: 592 - protein, 736 aa, Artificial Sequence
  Description of Artificial Sequence: Synthetic polypeptide
MAADGYLPDWLEDNLSEGIREWWALKPGAPQPKANQQHQDNARGLVLPGYKYLGPGNGLDKGEPVNAVDAAALEHDKAYDQQLKAGDNPYLKYNHADAEFQERLKEDTSFGGNLGRAVFQAKKRLLEPLGLVEEAAKTAPGKKRPVEQSPQEPDSSAGIGKSGAQPAKKRLNFGQTGDTESVPDPQPIGEPPAAPSGVGSLTMASGGGAPVADNNEGADGVGSSSGNWHCDSQWLGDRVITTSTRTWALPTYNNHLYKQISNSTSGGSSNDNAYFGYSTPWGYFDFNRFHCHFSPRDWQRLINNNWGFRPKRLNFKLFNIQVKEVTDNNGVKTIANNLTSTVQVFTDSDYQLPYVLGSAHEGCLPPFPADVFMIPQYGYLTLNDGSQAVGRSSFYCLEYFPSQMLRTGNNFQFSYEFENVPFHSSYAHSQSLDRLMNPLIDQYLYYLSKTINGSGQNQQTLKFSVAGPSNMAVQGRNYIPGPSYRQQRVSTTVTQNNNSEFAWPGASSWALNGRNSLMNPGPAMASHKEGEDRFFPLSGSLIFGKQGTGRDNVDADKVMITNEEEIKTTNPVATESYGQVATNHQSAQAQAQTGWVQNQGILPGMVWQDRDVYLQGPIWAKIPHTDGNFHPSPLMGGFGMKHPPPQILIKNTPVPADPPTAFNKDKLNSFITQYSTGQVSVEIEWELQKENSKRWNPEIQYTSNYYKSNNVEFAVNTEGVYSEPRPIGTRYLTRNL

SEQ ID NO: 593 - protein, 736 aa, Artificial Sequence
  Description of Artificial Sequence: Synthetic polypeptide
MAADGYLPDWLEDNLSEGIREWWALKPGAPQPKANQQHQDNARGLVLPGYKYLGPGNGLDKGEPVNAADAAALEHDKAYDQQLKAGDNPYLKYNHADAEFQERLKEDTSFGGNLGRAVFQAKKRLLEPLGLVEEAAKTAPGKKRPVEQSPREPDSSAGIGKSGAQPAKKRLNFGQTGDTESVPDPQPIGEPPAAPSGVGSLTMASGGGAPVADNNEGADGVGSSSGNWHCDSQWLGDRVITTSTRTWALPTYNNHLYKQISNSTSGGSSNDNAYFGYSTPWGYFDFNRFHCHFSPRDWQRLINNNWGFRPKRLNFKLFNIQVKEVTDNNGVKTIANNLTSTVQVFTDSDYQLPYVLGSAHEGCLPPFPADVFMIPQYGYLTLNDGSQAVGRSSFYCLEYFPSQMLRTGNNFQFSYEFENVPFHSSYAHSQSLDRLMNPLIDQYLYYLSKTINGSGQNQQTLKFSVAGPSNMAVQGRNYIPGPSYRQQRVSTTVTQNNNSEFAWPGASSWALNGRNSLMNPGPAMASHKEGEDRFFPLSGSLIFGKQGTGRDNVDADKVMITNEEEIKTTNPVATESYGQVATNHQSAQAQAQTGWVQNQGILPGMVWQDRDVYLQGPIWAKIPHTDGNFHPSPLMGGFGMKHPPPQILIKNTPVPADPPTAFNKDKLNSFITQYSTGQVSVEIEWELQKENSKRWNPEIQYTSNYYKSNNVEFAVNTEGVYSEPRPIGTRYLTRNL

SEQ ID NO: 594 - protein, 736 aa, Artificial Sequence
  Description of Artificial Sequence: Synthetic polypeptide
MAADGYLPDWLEDNLSEGIREWWALKPGAPQPKANQQHQDNARGLVLPGYKYLGPGNGLDKGEPVNAADAAALEHDKAYDQQLKAGDNPYLKYNHADAEFQERLKEDTSFGGNLGRAVFQAKKRLLEPLGLVEEAAKTAPGKKRPVEQSPQEPDSSAGIGKSGAQPAKKRLNFGQTGDTESVPDPQPIGEPPAAPSGVGSLTMASCGGAPVADNNEGADGVGSSSGNWHCDSQWLGDRVITTSTRTWALPTYNNHLYKQISNSTSGGSSNDNAYFGYSTPWGYFDFNRFHCHFSPRDWQRLINNNWGFRPKRLNFKLFNIQVKEVTDNNGVKTIANNLTSTVQVFTDSDYQLPYVLGSAHEGCLPPFPADVFMIPQYGYLTLNDGSQAVGRSSFYCLEYFPSQMLRTGNNFQFSYEFENVPFHSSYAHSQSLDRLMNPLIDQYLYYLSKTINGSGQNQQTLKFSVAGPSNMAVQGRNYIPGPSYRQQRVSTTVTQNNNSEFAWPGASSWALNGRNSLMNPGPAMASHKEGEDRFFPLSGSLIFGKQGTGRDNVDADKVMITNEEEIKTTNPVATESYGQVATNHQSAQAQAQTGWVQNQGILPGMVWQDRDVYLQGPIWAKIPHTDGNFHPSPLMGGFGMKHPPPQILIKNTPVPADPPTAFNKDKLNSFITQYSTGQVSVEIEWELQKENSKRWNPEIQYTSNYYKSNNVEFAVNTEGVYSEPRPIGTRYLTRNL

SEQ ID NO: 595 - protein, 736 aa, Artificial Sequence
  Description of Artificial Sequence: Synthetic polypeptide
MAADGYLPDWLEDNLSEGIREWWALKPGAPQPKANQQHQDNARGLVLPGYKYLGPGNGLDKGEPINAADAAALEHDKAYDQQLKAGDNPYLKYNHADAEFQERLKEDTSFGGNLGRAVFQAKKRLLEPLGLVEEAAKTAPGKKRPVEQSPQEPDSSAGIGKSGAQPAKKRLNFGQTGDTESVPDPQPIGEPPAAPSGVGSLTMASGGGAPVADNNEGADGVGSSSGNWHCDSQWLGDRVITTSTRTWALPTYNNHLYKQISNSTSGGSSNDNAYFGYSTPWGYFDFNRFHCHFSPRDWQRLINNNWGFRPKRLNFKLFNIQVKEVTDNNGVKTIANNLTSTVQVFTDSDYQLPYVLGSAHEGCLPPFPADVFMIPQYGYLTLNDGSQAVGRSSFYCLEYFPSQMLRTGNNFQFSYEFENVPFHSSYAHSQSLDRLMNPLIDQYLYYLSKTINGSGQNQQTLKFSVAGPSNMAVQGRNYIPGPSYRQQRVSTTVTQNNNSEFAWPGASSWALNGRNSLMNPGPAMASHKEGEDRFFPLSGSLIFGKQGTGRDNVDADKVMITNEEEIKTTNPVATESYGQVATNHQSAQAQAQTGWVQNQGILPGMVWQDRDVYLQGPIWAKIPHTYGNFHPSPLMGGFGMKHPPPQILIKNTPVPADPPTAFNKDKLNSFITQYSTGQVSVEIEWELQKENSKRWNPEIQYTSNYYKSNNVEFAVNTEGVYSEPRPIGTRYLTRNL

SEQ ID NO: 596 - protein, 736 aa, Artificial Sequence
  Description of Artificial Sequence: Synthetic polypeptide
MAADGYLPDWLEDNLSEGIREWWALKPGAPQPKANQQHQDNARGLVLPGYKYLGPGNGLDKGEPVNAADAAALEHDKAYDQQLKAGDNPYLKYNHADAEFQERLKEDTSFGGNLGRAVFQAKKRLLEPLGLVEEAAKTAPGKKRPVEQSPQEPDSSAGIGKSGAQPAKKRLNFGQTGDTESVPDPQPIGEPPAAPSGVGSLTMASGGGAPVADNNEGADGVGSSSGNWHCDSQWLGDRVITTSTRTWALPTYNNHLYKQISNSTSGGSSNDNAYFGYSTPWGYFDFNRFHCHFSPHDWQRLINNNWGFRPKRLNFKLFNIQVKEVTDNNGVKTIANNLTSTVQVFTDSDYQLPYVLGSAHEGCLPPFPADVFMIPQYGYLTLNDGSQAVGRSSFYCLEYFPSQMLRTGNNFQFSYEFENVPFHSSYAHSQSLDRLMNPLIDQYLYYLSKTINGSGQNQQTLKFNVAGPSNMAVQGRNYIPGPSYRQQRVSTTVTQNNNSEFAWPRASSWALNGRNSLMNPGPAMASHKEGEDRFFPLSGSLIFGKQGTGRDNVDADKVMITNEEEIKTTNPVATESYGQVATNHQSAQAQAQTGWVQNQGILPGMVWQDRDVYLQGPIWAKIPHTDGNFHPSPLMGGFGMKHPPPQILIKNTPVPADPPTAFNKDKLNSFITQYSTGQVSMEIEWELQKENSKRWNPEIQYTSNYYKSNNVEFAVNTEGVYSEPRPIGTRYLTRNL

SEQ ID NO: 597 - protein, 736 aa, Artificial Sequence
  Description of Artificial Sequence: Synthetic polypeptide
MAADGYLPDWLEDNLSEGIREWWALKPGAPQPKANQQHQDNARGLVLPGYKYLGPGNGLDKGEPVNAADAAALEHDKAYDQQLKAGDNPYLKYNHADAEFQERLKEDTSFGGNLGRAVFQAKKRLLEPLGLVEEAAKTAPGKKRPVEQSPQEPDSSAGIGKSGAQPAKKRLNFGQTGDTESVPDPQPIGEPPAAPSGVGSLTMASGGGAPVADNNEGADGVGSSSGNWHCDSQWLGDRVITTSTRTWALPTYNNHLYKQISNSTSGGSSNDNAYFGYSTPWGYFDFNRFHCHFSPRDWQRLINNNWGFRPKRLNFKLFNIQVKEVTDNNGVKTIANNLTSTVQVFTDSDYQLPYVLGSAHEGCLPPFPADVFMIPQYGYLTLNDGSQAVGRSSFYCLEYFPSQMLRTGNNFQFSYEFENVPFHSSYAHSQSLDRLMNPLIDQYLYYLSKTINGSGQNQQTLKFSVAGPSNMAVQGRNYIPGPSYRQQRVSTTVTQNNNSEFAWPRASSWALNGRNSLMNPGPAMASHKEGEDRFFPLSGSLIFGKQGTGRDNVDADKVMITNEEEIKTTNPVATESYGQVATNHQSAQAQAQTGWVQNQGILPGMVWQDRDVYLQGPIWAKIPHTDGNFHPSPLMGGFGMKHPPPQILIKNTPVPADPPTAFNKDKLNSFITQYSTGQVSVEIEWELQKENSKRWNPEIQYTSNYYKSNNVEFAVNTEGVYSEPRPIGTRYLTRNL

SEQ ID NO: 598 - protein, 736 aa, Artificial Sequence
  Description of Artificial Sequence: Synthetic polypeptide
MAADGYLPDWLEDNLSEGIREWWALKPGAPQPKANQQHQDNARGLVLPGYKYLGPGNGLDKGEPVNAADAAALEHDKAYDQQLKAGDNPYLKYNHADAEFQERLKEDTSFGGNLGRAVFQAKKRLLEPLGLVEEAAKTAPGKKRPVEQSPQEPDSSAGIGKSGAQPAKKRLNFGQTGDTESVPDPQPIGEPPAAPSGVGSLTMASGGGAPVADNNEGADGVGSSSGNWHCDSQWLGDRVITTSTRTWALPTYNNHLYKQISNSTSGGSSNDNAYFGYSTPWGYFDFNRFHCHFSPRDWQRLINNNWGFRPKRLNFKLFNIQVKEVTDNNGVKTIANNLTSTVQVFTDSDYQLPYVLGSAHEGCLPPFPADVFMIPQYGYLTLNDGSQAVGRSSFYCLEYFPSQMLRTGNNFQFSYEFENVPFHSSYAHSQSLDRLMNPLIDQYLYYLSKTINGSGQNQQTLKFSVAGPSNMAVQGRNYIPGPSYRQQRVSTTVTQNNNSEFAWPRASSWALNGRNSLMNPGPAMASHKEGEDRFFPLSGSLIFGKQGTGRDNVDADKVMITNEEEIKTTNPVATESYGQVATNHQSAQAQAQTGWVQNQGILPGMVWQDRDVYLQGPIWAKIPHTDGNFHPSPLMGGFGMKHPPPQILIKNTPVPADPPTAFNKDKLNSFITQYSTGQVSVEIEWERQKENSKRWNPEIQYTSNYYKSNNVEFAVNTEGVYSEPRPIGTRYLTRNL

SEQ ID NO: 599 - protein, 736 aa, Artificial Sequence
  Description of Artificial Sequence: Synthetic polypeptide
MAADGYLPDWLEDNLSEGIREWWALKPGAPQPKANQQHQDNARGLVLPGYKYLGPGNGLDKGEPVNAADAAALEHDKAYDQQLKAGDNPYLKYNHADAEFQERLKEDTSFGGNLGRAVFQAKKRLLEPLGLVEEAAKTAPGKKRPVEQSPQEPDSSAGIGKSGAQPAKKRLNFGQTGDTESVPDPQPIGEPPAAPSGVGSLTMASGGGAPVADNNEGADGVGSSSGNWHCDSQWLGDRVITTSTRTWALPTYNNHLYKQISNSTSGGSSNDNAYFGYSTPWGYFDFNRFHCHFSPRDWQRLINNNWGFRPKRLNFKLFNIQVKEVTDNNGVKTIANNLTSTVQVFADSDYQLPYVLGSAHEGCLPPFPADVFMIPQYGYLTLNDGSQAVGRSSFYCLEYFPSQMLRTGNNFQFSYEFENVPFHSSYAHSQSLDRLMNPLIDQYLYYLSKTINGSGQNQQTLKFSVAGPSNMAVQGRNYIPGPSYRQQRVSTTVTQNNNSEFAWPRASSWALNGRNSLMNPGPAMASHKEGEDRFFPLSGSLIFGKQGTGRDNVDADKVMITNEEEIKTTNPVATESYGQVATNHQSAQAQAQTGWVQNQGILPGMVWQDRDVYLQGPIWAKIPHTDGNFHPSPLMGGFGMKHPPPQILIKNTPVPADPPTAFNKDKLNSFITQYSTGQVSVEIEWELQKENSKRWNPEIQYTSNYYKSNNVEFAVNTEGVYSEPRPIGTRYLTRNL

SEQ ID NO: 600 - protein, 736 aa, Artificial Sequence
  Description of Artificial Sequence: Synthetic polypeptide
MAADGYLPDWLEDNLSEGIREWWALKPGAPQPKANQQHQDNARGLVLPGYKYLGPGNGLDKGEPVNAADAAALEHDKAYDQQLKAGDNPYLKYNHADAEFQERLKEDTSFGGNLGRAVFQAKKRLLEPLGLVEEAAKTAPGKKRPVEQSPQEPDSSAGIGKSGAQPAKKRLNFGQTGDTESVPDPQPIGEPPAAPSGVGSLTMASGGGAPVADNNEGADGVGSSSGNWHCDSQWLGDRVITTSTRTWALPTYNNHLYKQISNSTSGGSSNDNAYFGYSTPWGYFDFNRFHCHFSPRDWQRLINNNWGFRPKRLNFKLFNIQVKEVTDNNGVKTIANNLTSTVQVFTDSDYQLPYVLGSAHEGCLPPFPADVFMIPQYGYLTLNDGSQAVGRSSFYCLEYFPSQMLRTGNNFQFSYEFENVPFHSSYAHSQSLDRLMNPLIDQYLYYLSKTINGSGQNQQTLKFSVAGPSNMAVQGRNYIPGPSYRQQRVSTTVTQNNNSEIAWPRASSWALNGRNSLMNPGPAMASHKEGEDRFFPLSGSLIFGKQGTGRDNVDADKVMITNEEEIKTTNPVATESYGQVATNHQSAQAQAQTGWVQNQGILPGMVWQDRDVYLQGPIWAKIPHTDGNFHPSPLMGGFGMKHPPPQILIKNTPVPADPPTAFNKDKLNSFITQYSTGQVSVEIEWELQKENSKRWNPEIQYTSNYCKSNNVEFAVNTEGVYSEPRPIGTRYLTRNL

SEQ ID NO: 601 - protein, 736 aa, Artificial Sequence; identical to SEQ ID NO: 597
  Description of Artificial Sequence: Synthetic polypeptide

SEQ ID NO: 602 - DNA, 2208 bp, Artificial Sequence
  Description of Artificial Sequence: Synthetic polynucleotide
atggctgccgatggttatcttccagattggctcgaggacaaccttagtgaaggaattcgcgagtggtgggctttgaaacctggagcccctcaacccaaggcaaatcaacaacatcaagacaacgctcgaggtcttgtgcttccgggttacaaataccttggacccggcaacggactcgacaagggggagccggtcaacgcagcagacgcggcggccctcgagcacgacaaggcctacgaccagcagctcaaggccggagacaacccgtacctcaagtacaaccacgccgacgccgagttccaggagcggctcaaagaagatacgtcttttgggggcaacctcgggcgagcagtcttccaggccaaaaagaggcttcttgaacctcttggtctggttgaggaagcggctaagacggctcctggaaagaagaggcctgtagagcagtctcctcaggaaccggactcctccgcgggtattggcaaatcgggtgcacagcccgctaaaaagagactcaatttcggtcagactggcgacacagagtcagtcccagaccctcaaccaatcggagaacctcccgcagccccctcaggtgtgggatctcttacaatggcttcaggtggtggcgcaccagtggcagacaataacgaaggtgccgatggagtgggtagttcctcgggaaattggcattgcgattcccaatggctgggggacagagtcatcaccaccagcacccgaacctgggccctgcccacctacaacaatcacctctacaagcaaatctccaacagcacatctggaggatcttcaaatgacaacgcctacttcggctacagcaccccctgggggtattttgacttcaacagattccactgccacttctcaccacgtgactggcagcgactcatcaacaacaactggggattccggcctaagcgactcaacttcaagctcttcaacattcaggtcaaagaggttacggacaacaatggagtcaagaccatcgccaataaccttaccagcacggtccaggtcttcacggactcagactatcagctcccgtacgtgctcgggtcggctcacgagggctgcctcccgccgttcccagcggacgttttcatgattcctcagtacgggtatctgacgcttaatgatggaagccaggccgtgggtcgttcgtccttttactgcctggaatatttcccgtcgcaaatgctaagaacgggtaacaacttccagttcggctacgagtttgagaacgtacctttccatagcagctacgctcacagccaaagcctggaccgactaatgaatccactcatcgaccaatacttgtactatctctcaaagactattaacggttctggacagaatcaacaaacgctaaaattcagtgtggccggacccagcaacatggctgtccagggaagaaactacatacctggacccagctaccgacaacaacgtgtctcaaccactgtgactcaaaacaacaacagcgaatttgcttggcctggagcttcttcttgggctctcaatggacgtaatagcttgatgaatcctggacctgctatggccagccacaaagaaggagaggaccgtttctttcctttgtctggatctttaatttttggcaaacaaggaactggaagagacaacgtggatgcggacaaagtcatgataaccaacgaagaagaaattaaaactactaacccggtagcaacggagtcctatggacaagtggccacaaaccaccagagtgcccaagcacaggcgcagaccggctgggttcaaaaccaaggaatacttccgggtatggtttggcaggacagagatgtgtacctgcaaggacccatttgggccaaaattcctcacacggacggcaactttcacccttctccgctgatgggagggtttggaatgaagcacccgcctcctcagatcctcatcaaaaacacacctgtacctgcggatcctccaacggccttcaacaaggacaagctgaactctttcatcacccagtattctactggccaagtcagcgtggagatcgagtgggagctgcagaaggaaaacagcaagcgctgggacccggagatccagtacacttccaactattacaagtctaataatgttgaatttgctgttaatactgaaggtgtatatagtgaaccccgccccattggcaccagatacctgactcgtaatctg

SEQ ID NO: 603 - DNA, 2208 bp, Artificial Sequence
  Description of Artificial Sequence: Synthetic polynucleotide
atggctgccgatggttatcttccagattggctcgaggacaaccttagtgaaggaattcgcgagtggtgggctttgaaacctggagcccctcaacccaaggcaaatcaacaacatcaagacaacgctcgaggtcttgtgcttccgggttacaaataccttggacccggcaacggactcgacaagggggagccggtcaacgcagcagacgcggcggccctcgagcacgacaaggcctacgaccagcagctcaaggccggagacaacccgtacctcaagtacaaccacgccgacgccgagttccaggagcggctcaaagaagatacgtcttttgggggcaacctcgggcgagcagtcttccaggccaaaaagaggcttcttgaacctcttggtctggttgaggaagcggctaagacggctcctggaaagaagaggcctgtagagcagtctcctcaggaaccggactcctccgcgggtattggcaaatcgggtgcacagcccgctaaaaagagactcaatttcggtcagactggcgacacagagtcagtcccagaccctcaaccaatcggagaacctcccgcagccccctcaggtgtgggatctcttacaatggcttcaggtggtggcgcaccagtggcagacaataacgaaggtgccgatggagtgggtagttcctcgggaaattggcattgcgattcccaatggctgggggacagagtcatcaccaccagcacccgaacctgggccctgcccacctacaacaatcacctctacaagcaaatctccaacagcacatctggaggatcttcaaatgacaacgcctacttcggctacagcaccccctgggggtattttgacttcaacagattccactgccgcttctcaccacgtgactggcagcgactcatcaacaacaactggggattccggcctaagcgactcaacttcaagctcttcaacattcaggtcaaagaggttacggacaacaatggagtcaagaccatcgccaataaccttaccagcacggtccaggtcttcacggactcagactatcagctcccgtacgtgctcgggtcggctcacgagggctgcctcccgccgttcccagcggacgttttcatgattcctcagtacgggtatctgacgcttaatgatggaagccaggccgtgggtcgttcgtccttttactgcctggaatatttcccgtcgcaaatgctaagaacgggtaacaacttccagttcagctacgagtttgagaacgtacctttccatagcagctacgctcacagccaaagcctggaccgactaatgaatccactcatcgaccaatacttgtactatctctcaaagactattaacggttctggacagaatcaacaaacgctaaaattcagtgtggccggacccagcaacatggctgtccagggaagaaactacatacctggacccagctaccgacaacaacgtgtctcaaccactgtgactcaaaacaacaacagcgaatttgcttggcctggagcttcttcttgggctctcaatggacgtaatagcttgatgaatcctggacctgctatggccagccacaaagaaggagaggaccgtttctttcctttgtctggatctttaatttttggcaaacaaggaactggaagagacaacgtggatgcggacaaagtcatgataaccaacgaagaagaaattaaaactactaacccggtagcaacggagtcctatggacaagtggccacaaaccaccagagtgcccaagcacaggcgcagaccggctgggttcaaaaccaaggaatacttccgggtatggtttggcaggacagagatgtgtacctgcaaggacccatttgggccaaaattcctcacacggacggcaactttcacccttctccgctgatgggagggtttggaatgaagcacccgcctcctcagatcctcatcaaaaacgcccctgtacctgcggatcctccaacggccttcaacaaggacaagctgaactctttcatcacccagtattctactggccaagtcagcgtggagatcgagtgggagctgcagaaggaaaacagcaagcgctggaacccggagatccagtacacttccaactattacaagtctaataatgttgaatttgctgttaatactgaaggtgtatatagtgaaccccgccccattggcaccagatacctgactcgtaatctg

SEQ ID NO: 604 - DNA, 2208 bp, Artificial Sequence
  Description of Artificial Sequence: Synthetic polynucleotide
atggctgccgatggttatcttccagattggctcgaggacaaccttagtgaaggaattcgcgagtggtgggctttgaaacctggagcccctcaacccaaggcaaatcaacaacatcaagacaacgctcgaggtcttgtgcttccgggttacaaataccttggacccggcaacggactcgacaagggggagccggtcagcgcagcagacgcggcggccctcgagcacgacaaggcctacgaccagcagctcaaggccggagacaacccgtacctcaagtacaaccacgccgacgccgagttccaggagcggctcaaagaagatacgtcttttgggggcaacctcgggcgagcagtcttccaggccaaaaagaggcttcttgaacctcttggtctggttgaggaagcggctaagacggctcctggaaagaagaggcctgtagagcagtctcctcaggaaccggactcctccgcgggtattggcaaatcgggtgcacagcccgctaaaaagagactcaatttcggtcagactggcgacacagagtcagtcccagaccctcaaccaatcggagaacctcccgcagccccctcaggtgtgggatctcttacaatggcttcaggtggtggcgcaccagtggcagacaataacgaaggtgccgatggagtgggtagttcctcgggaaattggcattgcgattcccaatggctgggggacagagtcatcaccaccagcacccgaacctgggccctgcccacctacaacaatcacctctacaagcaaatctccaacagcacatctggaggatcttcaaatgacaacgcctacttcggctacagcaccccctgggggtattttgacttcaacagattccactgccacttctcaccgcgtgactggcagcgactcatcaacaacaactggggattccggcctaagcgactcaacttcaagctcttcaacattcaggtcaaagaggttacggacaacaatggagtcaagaccatcgccaataaccttaccagcacggtccaggtcttcacggactcagactatcagctcccgtacgtgctcgggtcggctcacgagggctgcctcccgccgttcccagcggacgttttcatgattcctcagtacgggtatctgacgcttaatgatggaagccaggccgtgggtcgttcgtccttttactgcctggaatatttcccgtcgcaaatgctaagaacgggtaacaacttccagttcagctacgagtttgagaacgtacctttccatagcagctacgctcacagccaaagcctggaccgactaatgaatccactcatcgaccaatacttgtactatctctcaaagactattaacggttctggacagaatcaacaaacgctaaaattcagtgtggccggacccagcaacatggctgtccagggaagaaactacatacctggacccagctaccgacaacaacgtgtctcaaccactgtgactcaaaacaacaacagcgaatttgcttggcctggagcttcttcttgggctctcaatggacgtaatagcttgatgaatcctggacctgctatggccagccacaaagaaggagaggaccgtttctttcctttgtctggatctttaatttttggcaaacaaggaactggaagagacaacgtggatgcggacaaagtcatgataaccaacgaagaagaaattaaaactactaacccggtagcaacggagtcctatggacaagtggccacaaaccaccagagtgcccaagcacaggcgcagaccggctgggttcaaaaccaaggaatacttccgggtatggtttggcaggacagagatgtgtacctgcaaggacccatttgggccaaaattcctcacacggacggcaactttcacccttctccgctgatgggagggtttggaatgaagcacccgcctcctcagatcctcatcaaaaacacacctgtacctgcggatcctccaacggccttcaacaaggacaagctgaactctttcatcacccagtattctactggccaagtcagcgtggagatcgagtgggagctgcagaaggaaaacagcaagcgctggaacccggagatccagtacacttccaactattacaagtctaataatgttgaatttgctgttaatactgaaggtgtatatagtgaaccccgccccattggcaccagatacctgactcgtaatctg

SEQ ID NO: 605 - DNA, 2208 bp, Artificial Sequence
  Description of Artificial Sequence: Synthetic polynucleotide
atggctgccgatggttatcttccagattggctcgaggacaaccttagtgaaggaattcgcgagtggtgggctttgaaacctggagcccctcaacccaaggcaaatcaacaacatcaagacaacgctcgaggtcttgtgcttccgggttacaaataccttggacccggcaacggactcgacaagggggagccggtcaacgcagcagacgcggcggccctcgagcacgacaaggcctacgaccagcagctcaaggccggagacaacccgtacctcaagtacaaccacgccgacgccgagttccaggagcggctcaaagaagatacgtcttttgggggcaacctcgggcgagcagtcttccaggccaaaaagaggcttcttgaacctcttggtctggttgaggaagcggctaagacggctcctggaaagaagaggcctgtagagcagtctcctcaggaaccggactcctccgcgggtattggcaaatcgggtgcacagcccgctaaaaagagactcaatttcggtcagactggcgacacagagtcagtcccagaccctcaaccaatcggagaacctcccgcagccccctcaggtgtgggatctcttacaatggcttcaggtggtggcgcaccagtggcagacaataacgaaggtgccgatggagtgggtagttcctcgggaaattggcattgcgattcccaatggctgggggacagagtcatcaccaccagcacccgaacctgggccctgcccacctacaacaatcacctctacaagcaaatctccaacagcacatctggaggatcttcaaatgacaacgcctacttcggctacagcaccccctgggggtattttgacttcaacagattccactgccacttctcaccacgtgactggcagcgactcatcaacaacaactggggattccggcctaagcgactcaacttcaagctcttcaacattcaggtcaaagaggttacggacaacaatggagtcaagaccatcgccaataaccttaccagcacggtccaggtcttcacggactcagactatcagctcccgtacgtgctcgggtcggctcacgagggctgcctcccgccgttcccagcggacgttttcatgattcctcagtacgggtatctgacgcttaatgatggaagccaggccgtgggtcgttcgtccttttactgcctggaatatttcccgtcgcaaatgctaagaacgggtaacaacttccagttcagctacgagtttgagaacgtacctttccatagcagctacgctcacagccaaagcctggaccgactaatgaatccactcatcgaccaatacttgtactatctctcaaagactattaacggttctggacagaatcaacaaacgctaaaattcagtgtggccggacccagcaacacggctgtccagggaagaaactacatacctggacccagctaccgacaacaacgtgtctcaaccactgtgactcaaaacaacaacagcgaatttgcttggcctggagcttcttcttgggctctcaatggacgtaatagcttgatgaatcctggacctgctatggccagccacaaagaaggagaggaccgtttctttcctttgtctggatctttaatttttggcaaacaaggaactggaagagacaacgtggatgcggacaaagtcatgataaccaacgaagaagaaattaaaactactaacccggtagcaacggagtcctatggacaagtggccacaaaccaccagagtgcccaagcacaggcgcagaccggctgggttcaaaaccaaggaatacttccgggtatggtttggcaggacagagatgtgtacctgcaaggacccatttgggccaaaattcctcacacggacggcaactttcacccttctccgctgatgggagggtttggaatgaagcacccgcctcctcagatcctcatcaaaaacacacctgtacctgcggatcctccaacggccttcaacaaggacaagctgaactctttcatcacccagtattctactggccaagtcagcgtggagatcgagtgggagctgcagaaggaaaacagcaagcgctggaacccggagatccagtacacttccaactattacaagtctaataatgttgaatttgctgttaatactgaaggtgtatatagtgaaccccgccccattggcaccagatacctgactcgtaatctg

SEQ ID NO: 606 - DNA, 2208 bp, Artificial Sequence
  Description of Artificial Sequence: Synthetic polynucleotide
atggctgccgatggttatcttccagattggctcgaggacaaccttagtgaaggaattcgcgagtggtgggctttgaaacctggagcccctcaacccaaggcaaatcaacaacatcaagacaacgctcgaggtcttgtgcttccgggttacaaataccttggacccggcaacggactcgacaagggggagccggtcaacgcagcagacgcggcggccctcgagcacgacaaggcctacgaccagcagctcaaggccggagacaacccgtacctcaagtacaaccacgccgacgccgagttccaggagcggctcaaagaagatacgtcttttgggggcaacctcgggcgagcagtcttccaggccaaaaagaggcttcttgaacctcttggtctggttgaggaagcggctaagacggctcctggaaagaagaggcctgtagagcagtctcctcaggaaccggactcctccgcgggtattggcaaatcgggtgcacagcccgctaaaaagagactcaatttcggtcagactggcgacacagagtcagtcccagaccctcaaccaatcggagaacctcccgcagccccctcaggtgtgggatctcttacaatggcttcaggtggtggcgcaccagtggcagacaataacgaaggtgccgatggagtgggtagttcctcgggaaattggcattgcgattcccaatggctgggggacagagtcatcaccaccagcacccgaacctgggccctgcccacctacaacaatcacctctacaagcaaatctccaacagcacatctggaggatcttcaaatgacaacgcctacttcggctacagcaccccctgggggtattttgacttcaacagattccactgccacttctcaccacgtgactggcagcgactcatcaacaacaactggggattccggcctaagcggctcaacttcaagctcttcaacattcaggtcaaagaggttacggacaacaatggagtcaagaccatcgccaataaccttaccagcacggtccaggtcttcacggactcagactatcagctcccgtacgtgctcgggtcggctcacgagggctgcctcccgccgttcccagcggacgttttcatgattcctcagtacgggtatctgacgcttaatgatggaagccaggccgtgggtcgttcgtccttttactgcctggaatatttcccgtcgcaaatgctaagaacgggtagcaacttccagttcagctacgagtttgagaacgtacctttccatagcagctacgctcacagccaaagcctggaccgactaatgaatccactcatcgaccaatacttgtactatctctcaaagactattaacggttctggacagaatcaacaaacgctaaaattcagtgtggccggacccagcaacatggctgtccagggaagaaactacatacctggacccagctaccgacaacaacgtgtctcaaccactgtgactcaaaacaacaacagcgaatttgcttggcctggagcttcttcttgggctctcaatggacgtaatagcttgatgaatcctggacctgctatggccagccacaaagaaggagaggaccgtttctttcctttgtctggatctttaatttttggcaaacaaggaactggaagagacaacgtggatgcggacaaagtcatgataaccaacgaagaagaaattaaaactactaacccggcagcaacggagtcctatggacaagtggccacaaaccaccagagtgcccaagcacaggcgcagaccggctgggttcaaaaccaaggaatacttccgggtatggtttggcaggacagagatgtgtacctgcaaggacccatttgggccaaaattcctcacacggacggcaactttcacccttctccgctgatgggagggtttggaatgaagcacccgcctcctcagatcctcatcaaaaacacacctgtacctgcggatcctccaacggccttcaacaaggacaagctgaactctttcatcacccagtattctactggccaagtcagcgtggagatcgagtgggagctgcagaaggaaaacagcaagcgctggaacccggagatccagcacacttccaactattacaagtctaataatgttgaatttgctgttaatactgaaggtgtatatagtgaaccccgccccattggcaccagatacctgactcgtaatctg

SEQ ID NO: 607 - DNA, 2208 bp, Artificial Sequence
  Description of Artificial Sequence: Synthetic polynucleotide
atggctgccgatggttatcttccagattggctcgaggacaaccttagtgaaggaattcgcgagtggtgggctttgaaacctggagcccctcaacccaaggcaaatcaacaacatcaagacaacgctcgaggtcttgtgcttccgggttacaaataccttggacccggcaacggactcgacaagggggagccggtcaacgcagcagacgcggcggccctcgagcacgacaaggcctacgaccagcagctcaaggccggagacaacccgtacctcaagtacaaccacgccgacgccgagttccaggagcggctcaaagaagatacgtcttttgggggcaacctcgggcgagcagtcttccaggccaaaaagaggcttcttgaacctcttggtctggttgaggaagcggctaagacggctcctggaaagaagaggcctgtagagcagtctcctcaggaaccggactcctccgcgggtattggcaaatcgggtgcacagcccgctaaaaagagactcaatttcggtcagactggcgacacagagtcagtcccagaccctcaaccaatcggagaacctcccgcagccccctcaggtgtgggatctcttacaatggcttcaggtggtggcgcaccagtggcagacaataacgaaggtgccgatggagtgggtagttcctcgggaaattggcattgcgattcccaatggctgggggacagagtcatcaccaccagcacccgaacctgggccctgcccacctacaacaatcacctctacaagcaaatctccaacagcacatctggaggatcttcaaatgacaacgcctacttcggctacagcaccccctgggggtattttgacttcaacagattccactgccacttctcaccacgtgactggcagcgactcatcaacaacaactggggattccggcctaagcgactcaacttcaggctcttcaacattcaggtcaaagaggttacggacaacaatggagtcaagaccatcgccaataaccttaccagcacggtccaggtcttcacggactcagactatcagctcccgtacgtgctcgggtcggctcacgagggctgcctcccgccgttcccagcggacgttttcatgattcctcagtacgggtatctgacgcttaatgatggaagccaggccgtgggtcgttcgtccttttactgcctggaatatttcccgtcgcaaatgctaagaacgggtaacaacttccagttcagctacgagtttgagaacgtacctttccatagcagctacgctcacagccaaagcctggaccgactaatgaatccactcatcgaccaatacttgtactatctctcaaagactattaacggttctggacagaatcaacaaacgctaaaattcagtgtggccggacccagcaacatggctgtccagggaagaaactacatacctggacccagctaccgacaacaacgtgtctcaaccactgtgactcaaaacaacaacagcgaatttgcttggcctggagcttcttcttgggctctcaatggacgtaatagcttgatgaatcctggacctgctatggccagccacaaagaaggagaggaccgtttctttcctttgtctggatctttaatttttggcaaacaaggaactggaagagacaacgtggatgcggacaaagtcatgataaccaacgaagaagaaattaaaactactaacccggtagcaacggagtcctatggacaagtggccacaaaccaccagagtgcccaagcacaggcgcagaccggctgggttcaaagccaaggaatacttccgggtatggtttggcaggacagagatgtgtacctgcaaggacccatttgggccaaaattcctcacacggacggcaactttcacccttctccgctgatgggagggtttggaatgaagcacccgcctccccagatcctcatcaaaaacacacctgtacctgcggatcctccaacggccttcaacaaggacaagctgaactctttcatcacccagtattctactggccaagtcagcgtggagatcgagtgggagctgcagaaggaaaacagcaagcgctggaacccggagatccagtacacttccaactattacaagtctaataatgttgaatttgctgttaatactgaaggtgtatatagtgaaccccgccccattggcaccagatacctgactcgtaatctg

SEQ ID NO: 608 - DNA, 2205 bp, Artificial Sequence
  Description of Artificial Sequence: Synthetic polynucleotide
atggctgccgatggttatcttccagattggctcgaggacaaccttagtgaaggaattcgcgagtggtgggctttgaaacctggagcccctcaacccaaggcaaatcaacaacatcaagacaacgcccgaggtcttgtgcttccgggttacaaataccttggacccggcaacggactcgacaagggggagccggtcaacgcagcagacgcggcggccctcgagcacgacaaggcctacgaccagcagctcaaggccggagacaacccgtacctcaagtacaaccacgccgacgccgagttccaggagcggctcaaagaagatacgtcttttgggggcaacctcgggcgagcagtcttccaggccaaaaagaggcttcttgaacctcttggtctggttgaggaagcggctaagacggctcctggaaagaagaggcctgtagagcagtctcctcaggaaccggactcctccgcgggtattggcaaatcgggtgcacagcccgctaaaaagagactcaatttcggtcagactggcgacacagagtcagtcccagaccctcaaccaatcggagaacctcccgcagccccctcaggtgtgggatctcttacaatggcttcaggtggtggcgcaccagtggcagacaataacgaaggtgccgatggagtgggtagttcctcgggaaattggcattgcgattcccaatggctgggggacagagtcatcaccaccagcacccgaacctgggccctgcccacctacaacaatcacctctacaagcaaatctccaacagcacatctggaggatcttcaaatgacaacgcctacttcggctacagcaccccctggaggtattttgacttcaacagattccactgccacttctcaccacgtgactggcagcgactcatcaacaactggggattccggcctaagcgactcaacttcaagctcttcaacattcaggtcaaagaggttacggacaacaatggagtcaagaccatcgccaataaccttaccagcacggtccaggccttcacggactcagactatcagctcccgtacgtgctcgggtcggctcacgagggctgcctcccgccgttcccagcggacgttttcatgattcctcagtacgggtatctgacgcttaatgatggaagccaggccgtgggtcgttcgtccttttactgcctggaatatttcccgtcgcaaatgctaagaacgggtaacaacttccagttcagctacgagtttgagaacgtacctttccatagcagctacgctcacagccaaagcctggaccgactaatgaatccactcatcgaccaatacttgtactatctctcaaagactattaacggttctggacagaatcaacaaacgctaaaattcagtgtggccggacccagcaacatggctgtccagggaagaaactacatacctggacccagctaccgacaacaacgtgtctcaaccactgtgactcaaaacaacaacagcgaatttgcttggcctggagcttcttcttgggctctcaatggacgtaatagcttgatgaatcctggacctgctatggccagccacaaagaaggagaggaccgtttctttcctttgtctggatctttaatttttggcaaacaaggaactggaagagacaacgtggatgcggacaaagtcatgataaccaacgaagaagaaattaaaactactaacccggtagcaacggagtcctatggacaagtggccacaaaccaccagagtgcccaagcacaggcgcagaccggctgggttcaaaaccaaggaatacttccgggtatggtttggcaggacagagatgtgtacctgcaaggacccatttgggccaaaattcctcacacggacggcaactttcacccttctccgctgatgggagggtttggaatgaagcacccgcctcctcagatcctcatcaaaaacacacctgtacctgcggatcctccaacggccttcaacaaggacgagctgaactctttcatcacccagtattctactggccaagtcagcgtggagatcgagtgggagctgcagaaggaaaacagcaagcgctggaacccggagatccagtacacttccaactattacaagtctaataatgttgaatttgctgttaatactgaaggtgtatatagtgaaccccgccccattggcaccagatacctgactcgtaatctg

SEQ ID NO: 609 - DNA, 2205 bp, Artificial Sequence
  Description of Artificial Sequence: Synthetic polynucleotide
atggctgccgatggttatcttccagattggctcgaggacaaccttagtgaaggaattcgcgagtggtgggctttgaaacctggagcccctcaacccaaggcaaatcaacaacatcaagacaacgctcgaggtcttgtgcttccgggttacaaataccttggacccggcaacggactcgacaagggggagccggtcaacgcagcagacgcggcggccctcgagcacgacaaggcctacgaccagcagctcaaggccggagacaacccgtacctcaagtacaaccacgccgacgccgagttccaggagcggctcaaagaagatacgtcttttgggggcaacctcgggcgagcagtcttccaggacaaaaagaggcttcttgaacctcttggtctggttgaggaagcggctaagacggctcctggaaagaagaggcctgtagagcagtctcctcaggaaccggactcctccgcgggtattggcaaatcgggtgcacagcccgctaaaaagagactcaatttcggtcagactggcgacacagagtcagtcccagaccctcaaccaatcggagaacctcccgcagccccctcaggtgtgggatctcttacaatggcttcaggtggtggcgcaccagtggcagacaataacgaaggtgccgatggagtgggtagttcctcgggaaattggcattgcgattcccaatggctgggggacagagtcatcaccaccagcacccgaacctgggccctgcccacctacaacaatcacctctacaagcaaatctccaacagcacatctggaggatcttcaaatgacaacgcctacttcggctacagcaccccctgggggtattttgacttcaacagattccactgccacttctcaccacgtgactggcagcgactcatcaacaactggggattccggcctaagcgactcaacttcaagctcttcaacattcaggtcaaagaggttacggacaacaatggagtcaagaccatcgccaataaccttaccagcacggtccaggtcttcacggactcagactatcagctcccgtacgtgctcgggtcggctcacgagggctgcctcccgccgttcccagcggacgttttcatgattcctcagtacgggtatctgacgcttaatgatggaagccaggccgtgggtcgttcgtccttttactgcctggaatatttcccgtcgcaaatgctaagaacgggtaacaacttccaattcagctacgagtttgagaacgtacctttccatagcagctacgctcacagccaaagcctggaccgactaatgaatccactcatcgaccaatacttgtactatctctcaaagactattaacggttctggacagaatcaacaaacgctaaaattcagtgtggccggacccagcaacatggctgtccagggaagaaactacatacctggacccagctaccgacaacaacgtgtctcaaccactgtgactcaaaacaacaacagcgaatttgcttggcctggagcttcttcttgggctctcaatggacgtaatagcttgatgaatcctggacctgctatggccagccacaaagaaggagaggaccgtttctttcctttgtctggatctttaatttttggcaaacaaggaactggaagagacaacgtggatgcggacaaagtcatgataaccaacgaagaagaaattaaaactactaacccggtagcaacggagtcctatggacaagtggccacaaaccaccagagtgcccaagcacaggcgcagaccggctgggttcaaaaccaaggaatacttccgggtatggtttggcaggacagagatgtgtacctgcaaggacccatttgggccaaaattcctcacacggacggcaactttcacccttctccgctgatgggagggtttggaatgaagcacccgcctcctcagatcctcatcaaaaacacacctgtacctgcggatcctccaacggccttcaacaaggacaagctgaactctttcatcacccagtattctactggccaagtcagcgtggagatcgagtgggagctgcagaaggaaaacagcaagcgctggaacccggagatccagtacacttccaactattacaagtctaataatgttgaatttgctgttaatactgaaggtgtatatagtgaaccccgccccattggcaccagatacctgactcgtaatctg

SEQ ID NO: 610 - DNA, 2208 bp, Artificial Sequence
  Description of Artificial Sequence: Synthetic polynucleotide
atggctgccgatggttatcttccagattggctcgaggacaaccttagtgaaggaattcgcgagtggtgggctttgaaacctggagcccctcaacccaaggcaaatcaacaacatcaagacaacgctcgaggtcttgtgcttccgggttacaaataccttggacccggcaacggactcgacaagggggagccggtcaacgcagcagacgcggcggccctcgagcacgacaaggcctacgaccagcagctcaaggccggagacaacccgtacctcaagtacaaccacgccgacgccgagttccaggagcggctcaaagaagatacgtcttttgggggcaacctcgggcgagcagtcttccaggccaaaaagaggcttcttgaacctcttggtctggttgaggaagcggctaagacggctcctggaaagaagaggcctgtagagcagtctcctcaggaaccggactcctccgcgggtattggcaaatcgggtgcacagcccgctaaaaagagactcaatttcggtcagactggcgacacagagtcagtcccagaccctcaaccaatcggagaacctcccgcagccccctcaggtgtgggatctcttacaatggcttcaggtggtggcgcaccagtggcagacaataacgaaggtgccgatggagtgggtagttcctcgggaaattggcattgcgattcccaatggctgggggacagagccatcaccaccagcacccgaacctgggccctgcccacctacaacaatcacctctacaagcaaatctccaacagcacatctggaggatcttcaaatgacaacgcctacttcggctacagcaccccctgggggtattttgacttcaacagattccactgccacttctcaccacgtgactggcagcggctcatcaacaacaactggggattccggcctaagcgactcaacttcaagctcttcaacattcaggtcaaagaggttacggacaacaatggagtcaagaccatcgccaataaccttaccagcacggtccaggtcttcacggactcagactatcagctcccgtacgtgctcgggtcggctcacgagggctgcctcccgccgttcccagcggacgttttcatgattcctcagtacgggtatctgacgcttaatgatggaagccaggccgtgggtcgttcgtccttttactgcctggaatatttcccgtcgcaaatgctaagaacgggtaacaacttccagttcagctacgagtttgagaacgtacctttccatagcagctacgctcacagccaaagcctggaccgactaatgaatccactcatcgaccaatacttgtactatctctcaaagactattaacggttctggacagaatcaacaaacgctaaaattcagtgtggccggacccagcaacatggctgtccagggaagaaactacatacctggacccagctaccgacaacaacgtgtctcaaccactgtgactcaaaacaacaacagcgaatttgcttggcctggagcttcttcttgggctctcaatggacgtaatagcttgatgaatcctggacctgctatggccagccacaaagaaggagaggaccgtttctttcctttgtctggatctttaatttttggcaaacaaggaactggaagagacaacgtggatgcggacaaagtcatgacaaccaacgaagaagaaattaaaactactaacccggtagcaacggagtcctatggacaagtggccacaaaccaccagagtgcccaagcacaggcgcagaccggctgggttcaaaaccaaggaatacttccgggtatggtttggcaggacagagatgtgtacctgcaaggacccatttgggccaaaattcctcacacggacggcaactttcacccttctccgctgatgggagggtttggaatgaagcacccgcctcctcagatcctcatcaaaaacacacctgtacctgcggatcctccaacggccttcaacaaggacaagctgaactctttcatcacccagtattctactggccaagtcagcgtggagatcgagtgggagctgcagaaggaaaacagcaagcgctggaacccggagatccagtacacttccaactattacaagtctaataatgttgaatttgctgttaatactgaaggtgtatatagtgaaccccgccccattggcaccagatacctgactcgtaatctg

SEQ ID NO: 611 - DNA, 2208 bp, Artificial Sequence
  Description of Artificial Sequence: Synthetic polynucleotide
atggctgccgatggttatcttccagattggctcgaggacaaccttagtgaaggaattcgcgagtggtgggctttgaaacctggagcccctcaacccaaggcaaatcaacaacatcaagacaacgctcgaggtcttgtgcttccgggttacaaataccttggacccggcaacggactcgacaagggggagccggtcaatgcagcagacgcggcggccctcgagcacgacaaggcctacgaccagcagctcaaggccggagacaacccgtacctcaagtacaaccacgccgacgccgagttccaggagcggctcaaagaagatacgtcttttgggggcaacctcgggcgagcagtcttccagaccaaaaagaggcttcttgaacctcttggtctggttgaggaagcggctaagacggctcctggaaagaagaggcctgtagagcagtctcctcaggaaccgggctcctccgcgggtattggcaaatcgggtgcacagcccgctaaaaagagactcaatttcggtcagactggcgacacagagtcagtcccagaccctcaaccaatcggagaacctcccgcagccccctcaggtgtgggatctcttacaatggcttcaggtggtggcgcaccagtggcagacaataacgaaggtgccgatggagtgggtagttcctcgggaaattggcattgcgattcccaatggctgggggacagagtcatcaccaccagcacccgaacctgggccctgcccacctacaacaatcacctctacaagcaaatctccaacagcacatctggaggatcttcaaatgacaacgcctacttcggctacagcaccccctgggggtattttgacttcaacagattccactgccacttctcaccacgtgactggcagcgactcatcaacaacaactggggattccggcctaagcgactcaacttcaagctcttcaacattcaggtcaaagaggttacggacaacaatggagtcaagaccatcgccaataaccttaccagcacggtccaggtcttcacggactcagactatcagctcccgtacgtgctcgggtcggctcacgagggctgcctcccgccgttcccagcggacgttttcatgattcctcagtacgggtatctgacgcttaatgatggaagccaggccgtgggtcgttcgtccttttactgcctggaatatttcccgtcgcaaatgctaagaacgggtaacaacttccagttcagctacgagtttgagaacgtacctttccatagcagctacgctcacagccaaagcctggaccgactaatgaatccactcatcgaccaatacttgcactatctctcaaagactattaacggttctggacagaatcaacaaacgctaaaattcagtgtggccggacccagcaacatggctgtccagggaagaaactacatacctggacccagctaccgacaacaacgtgtctcaaccactgtgactcaaaacaacaacagcgaatttgcttggcctggagcttcttcttgggctctcaatggacgtaatagcttgatgaatcctggacctgctatggccagccacaaagaaggagaggaccgtttctttcctttgtctggatctttaatttttggcaaacaaggaactggaagagacaacgtggatgcggacaaagtcatgataaccaacgaagaagaaattaaaactactaacccggtagcaacggagtcctatggacaagtggccacaaaccaccagagtgcccaagcacaggcgcagaccggctgggttcaaaaccaaggaatacttccgggtatggtttggcaggacagagatgtgtacctgcaaggacccatttgggccaaaattcctcacacggacggcaactttcacccttctccgctgatgggagggtttggaatgaagcacccgcctcctcagatcctcatcaaaaacacacctgtacctgcggatcctccaacggccttcaacaaggacaagctgaactctttcatcacccagtattctactggccaagtcagcgtggagatcgagtgggagctgcagaaggaaaacagcaagcgctggaacccggagatccagtacacttccaactattacaagtctaataatgttgaatttgctgttaatactgaaggtgtatatagtgaaccccgccccattggcaccagatacctgactcgtaatctg

SEQ ID NO: 612 - DNA, 2208 bp, Artificial Sequence
  Description of Artificial Sequence: Synthetic polynucleotide
atggctgccgatggttattttccagattggctcgaggacaaccttagtgaaggaattcgcgagtggtgggctttgaaacctggagcccctcaacccaaggcaaatcaacaacatcaagacaacgctcgaggtcttgtgcttccgggttacaaataccttggacccggcaacggactcgacaagggggagccggtcaacgcagcagacgcggcggccctcgagcacgacaaggcctacgaccagcagctcaaggccggagacaacccgtacctcaagtacaaccacgccgacgccgagttccaggagcggctcaaagaagatacgtcttttgggggcaacctcgggcgagcagtcttccaggccaaaaagaggcttcttgaacctcttggtctggttgaggaagcggctaagacggctcctggaaagaagaggcctgtagagcagtctcctcaggaaccggactcctccgcgggtattggcaaatcgggtgcacagcccgctaaaaagagactcaatttcggtcagactggcgacacagagtcagtcccagaccctcaaccaatcggagaatctcccgcagccccctcaggtgtgggatctcttacaatggcttcaggtggtggcgcaccagtggcagacaataacgaaggtgccgatggagtgggtagttcctcgggaaattggcattgcgattcccaatggctgggggacagagtcatcaccaccagcacccgaacctgggccctgcccacctacaacaatcacctctacaagcaaatctccaacagcacatctggaggatcttcaaatgacaacgcctacttcggctacagcaccccctgggggtattttgacttcaacagattccactgccacttctcaccacgtgactggcagcgactcatcaacaacaactggggattccggcctaagcgactcaacttcaagctcttcaacattcaggtcaaagaggttacggacaacaatggagtcaagaccatcgccaataaccttaccagcacggtccaggtcttcacggactcagactatcagctcccgtacgtgctcgggtcggctcacgagggctgcctcccgccgttcccagcggacgttttcatgattcctcagtacgggtatctgacgcttaatgatggaagccaggccgtgggtcgttcgtccttttactgcctggaatatctcccgtcgcaaatgctaagaacgggtaacaacttccagttcagctacgagtttgagaacgtacctttccatagcagctacgctcacagccaaagcctggaccgactaatgaatccactcatcgaccaatacttgcactatctctcaaagactattaacggttctggacagaatcaacaaacgctaaaattcagtgtggccggacccagcaacatggctgtccagggaagaaactacatacctggacccagctaccgacaacaacgtgtctcaaccactgtgactcaaaacaacaacagcgaatttgcttggcctggagcttcttcttgggctctcaatggacgtaatagcttgatgaatcctggacctgctgtggccagccacaaagaaggagaggaccgtttctttcctttgtctggatctttaatttttggcaaacaaggaactggaagagacaacgtggatgcggacaaagtcatgataaccaacgaagaagaaattaaaactactaacccggtagcaacggagtcctatggacaagtggccacaaaccaccagagtgcccaagcacaggcgcagaccggctgggttcaaaaccaaggaatacttccgggtatggtttggcaggacagagatgtgtacctgcaaggacccatttgggccaaaattcctcacacggacggcaactttcacccttctccgctgatgggagggtttggaatgaagcacccgcctcctcagatcctcatcaaaaacacacctgtacctgcggatcctccaacggccttcaacaaggacaagctgaactctttcatcacccagtattctactggccaagtcagcgtggagatcgagtgggagctgcagaaggaaaacagcaagcgctggaacccggagatccagtacacttccaactattacaagtctaataatgttgaatttgctgttaatactgaaggtgtatatagtgaaccccgccccattggcaccagatacctgactcgtaatctg

SEQ ID NO: 613 - DNA, 2208 bp, Artificial Sequence
  Description of Artificial Sequence: Synthetic polynucleotide
atggctgccgatggttatcttccagattggctcgaggacaaccttagtgaaggaattcgcgagtggtgggctttgaaacctggagcccctcaacccaaggcaaatcaacaacatcaagacaacgctcgaggtcttgtgcttccgggttacaaataccttggacccggcaacggactcgacaagggggagccggtcaacgcagcagacgcggcggccctcgagcacgacaaggcctacgaccagcagctcaaggccggagacaacccgtacctcaagtacaaccacgccgacgccgagttccaggagcggctcaaagaagatacgtcttttgggggcaacctcgggcgagcagtcttccaggccaaaaagaggcttcttgaacctcttggtccggttgaggaagcggctaagacggctcctggaaagaagaggcctgtagagcagtctcctcaggaaccggactcctccgcgggtattggcaaatcgggtgcacagcccgctaaaaagagactcaatttcggtcagactggcgacacagagtcagtcccagaccctcaaccaatcggagaacctcccgcagccccctcaggtgtgggatctcttacaatggcttcaggtggtggcgcaccagtggcagacaataacgaaggtgccgatggagtgggtagttcctcgggaaattggcattgcgattcccaatggctgggggacagagtcatcaccaccagcacccgaacctgggccctgcccacctacaacaatcacctctacaagcaaatctccaacagcacatctggaggatcttcaaatgacaacgcctacttcggctacagcaccccctgggggtattttgacttcaacagattccactgccacttctcaccacgtgactggcagcgactcatcaacaacaactggggattccggcctaagcgactcaacttcaagctcttcaacattcaggtcaaagaggttacggacaacaatggagtcaagaccatcgccaataaccttaccagcacggtccaggtcttcacggactcagactatcagctcccgtacgtgctcgggtcggctcacgagggctgcctcccgccgttcccagcggacgttttcatgattcctcagtacgggtatctgacgcttaatgatggaagccaggccgtgggtcgttcgtccttttactgcctggaatatttcccgtcgcaaatgctaagaacgggtaacaacttccagttcagctacgagtttgagaacgtacctttccatagcagctacgctcacagccaaagcctggaccgactaatgaatccactcatcgaccaatacttgtactatctctcaaagactattaacggttctggacagaatcaacaaacgctaaaattcagtgtggccggacccagcaacatggctgtccagggaagaaactacatacctggacccagctaccgacaacaacgtgtctcaaccactgtgactcaaaacaacaacagcgaatttgcttggcctggagcttcttcttgggctctcaatggacgtaatagcttgatgaatcctggacctgctatggccagccacaaagaaggagaggaccgtttctttcctttgtctggatctttaatttttggcaaacaaggaactggaagagacaacgtggatgcggacaaagtcatgataaccaacgaagaagaaattaaaactactaacccggtagcaacggagtcctatggacaagcggccacaaaccaccagagtgcccaagcacaggcgcagaccggctgggttcaaaaccaaggaatacttccgggtatggtttggcaggacagagatgtgtacctgcaaggacccatttgggccaaaattcctcacacggacggcaactttcacccttctccgctgatgggagggtttggaatgaagcacccgcctcctcagatcctcatcaaaaacacacctgtacctgcggatcctccaacggccttcaacaaggacaagctgaactctttcatcacccagtattctactggccaagtcagcgtggagatcgagtgggagctgcagaaggaaaacagcaagcgctggaacccggagatccagtacacttccaactattacaagtctaataatgttgaatttgctgttaatactgaaggtgtatatagtgaaccccgccccattggcaccagatacctgactcgtaatctg

SEQ ID NO: 614 - DNA, 2208 bp, Artificial Sequence
  Description of Artificial Sequence: Synthetic polynucleotide
atggctgccgatggttatcttccagattggctcgaggacaaccttagtgaaggaattcgcgagtggtgggctttgaaacctggagcccctcaacccaaggcaaatcaacaacatcaagacaacgctcggggtcttgtgcttccgggttacaaataccttggacccggcaacggactcgacaagggggagccggtcaacgcagcagacgcggcggccctcgagcacgacaaggcctacgaccagcagctcaaggccggagacaacccgtacctcaagtacaaccacgccgacgccgagttccaggagcggctcaaagaagatacgtcttttgggggcaacctcgggcgagcagtcttccaggccaaaaagaggcttcttgaacctcttggtccggttgaggaagcggctaagacggctcctggaaagaagaggcctgtagagcagtctcctcaggaaccggactcctccgcgggtattggcaaatcgggtgcacagcccgctaaaaagagactcaatttcggtcagactggcgacacagagtcagtcccagaccctcaaccaatcggagaacctcccgcagccccctcaggtgtgggatctcttacaatggcttcaggtggtggcgcaccagtggcagacaataacgaaggtgccgatggagtgggtagttcctcgggaaattggcattgcgattcccaatggctgggggacagagtcatcaccaccagcacccgaacctgggccctgcccacctacaacaatcacctctacaagcaaatctccaacagcacatctggaggatcttcaaatgacaacgcctacttcggctacagcaccccctgggggtattttgacttcaacagattccactgccacttctcaccacgtgactggcggcgactcatcaacaacaactggggattccggcctaagcgactcaacttcaagctcttcaacattcaggtcaaagaggttacggacaacaatggagtcaagaccatcgccaataaccttaccagcacggtccaggtcttcacggactcagactatcagctcccgtacgtgctcgggtcggctcacgagggctgcctcccgccgttcccagcggacgttttcatgattcctcagtacgggtatctgacgcttaatgatggaagccaggccgtgggtcgttcgtccttttactgcctggaatatttcccgtcgcaaatgctaagaacgggtaacaacttccagttcagctacgagtttgagaacgtacctttccatagcagctacgctcacagccaaagcctggaccgactaatgaatccactcatcgaccaatacttgtactatctctcaaagactattaacggttctggacagaatcaacaaacgctaaaattcagtgtggccggacccagcaacatggctgtccagggaagaaactacatacctggacccagctaccgacaacaacgtgtctcaaccactgtgactcaaaacaacaacagcgaatttgcttggcctggagcttcttcttgggctctcaatggacgtaatagcttgatgaatcctggacctgctatggccagccacaaagaaggagaggaccgtttctttcctttgtctggatctttaatttttggcaaacaaggaactggaagagacaacgtggatgcggacaaagtcatgataaccaacgaagaagaaattaaaactactaacccggtagcaacggagtcctatggacaagtggccacaaaccaccagagtgcccaagcacaggcgcagaccggctgggttcaaaaccaaggaatacttccgggtatggtttggcaggacagagatgtgtacctgcaaggacccatttgggccaaaattcctcacacggacggcaactttcacccttctccgctgatgggagggtttggaatgaagcacccgcctcctcagatcctcatcaaaaacacacctgtacctgcggatcctccaacggccttcaacaaggacaagctgaactctttcatcacccagtattctactggccaagtcagcgtggagatcgagtgggagctgcagaaggaaaacagcaagcgctggaacccggagatccagtacacttccaactattacaagtctaataatgttgaatttgctgttaatactgaaggtgtatatagtgaaccccgccccattggcaccagatacctgactcgtaatctg

SEQ ID NO: 615 - DNA, 2208 bp, Artificial Sequence
  Description of Artificial Sequence: Synthetic polynucleotide
atggctgccgatggttatcttccagattggctcgaggacaaccttagtgaaggaattcgcgagtggtgggctttgaaacctggagcccctcaacccaaggcaaatcaacaacatcaagacaacgctcgaggtcttgtgcttccgggttacaaataccttggacccggcaacggactcgacaagggggagccggtcaacgcagcagacgcggcggccctcgagcacgacaaggcctacgaccagcagctcaaggccggagacaacctgtacctcaagtacaaccacgccgacgccgagttccaggagcggctcaaagaagatacgtcttttgggggcaacctcgggcgagcagtcttccaggccaaaaagaggcttcttgaacctcttggtctggttgaggaagcggctaagacggctcctggaaagaagaggcctgtagagcagtctcctcaggaaccggactcctccgcgggtattggcaaatcgggtgcacagcccgctaaaaagagactcaatttcggtcagactggcgacacagagtcagtcccagaccctcaaccaatcggagaacctcccgcagccccctcaggtgtgggatctcttacaatggcttcaggtggtggcgcaccagtggcagacaataacgaaggtgccgatggagtgggtagttcctcgggaaattggcattgcgattcccaatggctgggggacagagtcatcaccaccagcacccgaacctgggccctgcccacctacaacaatcacctctacaagcaaatctccaacagcacatctggaggatcttcaaatgacaacgcctacttcggctacagcaccccctgggggtattttgacttcaacagattccactgccacttctcaccacgtgactggcagcgactcatcaacaacaactggggattccggcctaagcgactcaacttcaagctcttcaacattcaggtcaaagaggttacggacaacaatggagtcaagaccatcgccaataaccttaccagcacggtccaggtcttcacggactcagactatcagctcccgtacgtgctcgggtcggctcacgagggctgcctcccgccgttcccagcggacgttttcatgattcctcagtacgggtatctgacgcttaatgatggaagccaggccgtgggtcgttcgtccttttactgcctggaatatttcccgtcgcaaatgctaagaacgggtaacaacttccagttcagctacgagtttgagaacgtacctttccatagcagctacgctcacagccaaagcctggaccgactaatgaatccactcatcgaccaatacttgcactatctctcaaagactattaacggttctggacagaatcaacaaacgctaaaattcagtgtggccggacccagcaacatggctgtccagggaagaaactacatacctggacccagctaccgacaacaacgtgtctcaaccactgtgactcaaaacaacaacagcgaatttgcttggcctggagcttcttcttgggctctcaatggacgtaatagcttgatgaatcctggacctgctatggccagccacaaagaaggagaggaccgtttctttcctttgtctggatctttaatttttggcaaacaaggaactggaagagacaacgtggatgcggacaaagtcatgataaccaacgaagaagaaattaaaactactaacccggtagcaacggagtcctatggacaagtggccacaaaccaccagagtgcccaagcacaggcgcagaccggctgggttcaaaaccaaggaatacttccgggtatggtttggcaggacagagatgtgtacctgcaaggacccatttgggccaaaattcctcacacggacggcaactttcacccttctccgctgatgggagggtttggaatgaagcacccgcctcctcagatcctcatcaaaaacacacctgtacctgcggatcctccaacggccttcaacaaggacaagctgaactctttcatcacccagtattctactggccaagtcagcgtggagatcgagtgggagctgcagaaggaaaacagcaagcgctggaacccggagatccagtacacttccaactattacaagtctaataatgttgaatttgctgttaatactgaaggtgtatatagtgaaccccgccccattggcaccagatacctgactcgtaatctg

SEQ ID NO: 616 - DNA, 2208 bp, Artificial Sequence
  Description of Artificial Sequence: Synthetic polynucleotide
atggctgccgatggttatcttccagattggctcgaggacaaccttagtgaaggaattcgcgagtggtgggctttgaaacctggagcccctcaacccaaggcaaatcaacaacatcaagacaacgctcgaggtcttgtgcttccgggttacaaataccttggacccggcaacggactcgacaagggggagccggtcaacgcagcagacgcggcggccctcgagcacgacaaggcctacgaccagcagctcaaggccggagacaacccgtacctcaagtacaaccacgccgacgccgagttccaggagcggctcaaagaagatacgtcttttgggggcaacctcgggcgagcagtcttccaggccaaaaagaggcttcttgaacctcttggtctggttgaggaagcggctaagacggctcctggaaagaagaggcctgtagagcagtctcctcaagaaccggactcctccgcgggtattggcaaatcgggtgcacagcccgctaaaaagagactcaatttcggtcagactggcgacacagagtcagtcccagaccctcaaccaatcggagaacctcccgcagccccctcaggtgtgggatctcttacaatggcttcaggtggtggcgcaccagtggcagacaataacgaaggtgccgatggagtgggtagttcctcgggaaattggcattgcgattcccaatggctgggggacagagtcatcaccaccagcacccgaacctgggccctgcccacctacaacaatcacctctacaagcaaatctccaacagcacatctggaggatcttcaaatgacaacgcctacttcggctacagcaccccctgggggtattttgacttcaacagattccactgccacttctcaccacgtgactggcagcgactcatcaacaacaactggggattccggcctaagcgactcaacttcaagctcttcaacattcaggtcaaagaggttacggacaacaatggagtcaagaccatcgccaataaccttaccagcacggtccaggtcttcacggactcagactatcagctcccgtacgtgctcgggtcggctcacgagggctgcctcccgccgttcccagcggacgttttcatgattcctcagtacgggtatctgacgcttaatgatggaagccaggccgtgggtcgttcgtccttttactgcctggaatatttcccgtcgcaaatgctaagaacgggtaacaacttccagttcagctacgagtttgagaacgtacctttccatagcagctacgctcacagccaaagcctggaccgactaatgaatccactcatcgaccaatacttgcactatctctcaaagactattaacggttctggacagaatcaacaaacgctaaaattcagtgtggccggacccagcaacatggctgtccagggaagaaactacatacctggacccagctaccgacaacaacgtgtctcaaccactgtgactcaaaacaacaacagcgaatttgcttggcctggagcttcttcttgggctctcaatggacgtaatagcttgatgaatcctggacctgctatggccagccacaaagaaggagaggaccgtttctttcctttgtctggatctttaatttttggcaaacaaggaactggaagagacaacgtggatgcggacaaagtcatgataaccaacgaagaagaaattaaaactactaacccggtagcaacggagtcctatggacaagtggccacaaaccaccagagtgcccaagcacaggcgcagaccggctgggttcaaaaccaaggaatacttccgggtatggtttggcaggacagagatgtgtacctgcaaggacccatttgggccaaaattcctcacacggacggcaactttcacccttctccgctgatgggagggtttggaatgaagcacccgcctcctcagatcctcatcaaaaacacacctgtacctgcggatcctccaacggccttcaacaaggacaagctgaactctttcatcacccagtattctactggccaagtcagcgtggagatcgagtgggagctgcagaaggaaaacagcaagcgctggaacccggagatccagtacacttccaactattacaagtctaataatgttgaatttgctgttaatactgaaggtgtatatagtgaaccccgccccattggcaccagatacctgactcgtaatctg

SEQ ID NO: 617 - DNA, 2208 bp, Artificial Sequence
  Description of Artificial Sequence: Synthetic polynucleotide
  misc_feature (1325)..(1325): n is a, c, t, or g
atggctgccgatggttatcttccagattggctcgaggacaaccttagtgaaggaattcgcgagtggtgggctttgaaacctggagcccctcaacccaaggcaaatcaacaacatcaagacaacgctcgaggtcttgtgcttccgggttacaaataccttggacccggcaacggactcgacaagggggagccggtcaacgcagcagacgcggcggccctcgagcacgacaaggcctacgaccagcagctcaaggccggagacaacccgtacctcaagtacaaccacgccgacgccgagttccaggagcggctcaaagaagatacgtcttttgggggcaacctcgggcgagcagtcttccaggccaaaaagaggcttcttgaacctcttggtctggttgaggaagcggctaagacggctcctggaaagaagaggcctgtagagcagtctcctcaggaaccggactcctccgcgggtattggcaaatcgggtgcacagcccgctaaaaagagactcaatttcggtcagactggcgacacagagtcagtcccagaccctcaaccaatcggagaacctcccgcagccccctcaggtgtgggatctcttacaatggcttcaggtggtggcgcaccagtggcagacaataacgaaggtgccgatggagtgggtagttcctcgggaaattggcattgcgattcccaatggctgggggacagagtcatcaccaccagcacccgaacctgggccctgcccacctacaacaatcacctctacaagcaaatctccaccagcacatctggaggatcttcaaatgacaacgcctacttcggctacagcaccccctgggggtattttgacttcaacagattccactgccacttctcaccacgtgactggcagcgactcatcaacaacaactggggattccggcctaagcgactcaacttcaagctcttcaacattcaggtcaaagaggttacggacaacaatggagtcaagaccatcgccaataaccttaccagcacggtccaggtcttcacggactcagactatcagctcccgtacgtgctcgggtcggctcacgagggctgcctcccgccgttcccagcggacgttttcatgattcctcagtacgggtatctgacgcttaatgatggaagccaggccgtgggtcgttcgtccttttactgcctggaatatttcccgtcgcaaatgctaagaacgggtaacaacttccagttcagctacgagtttgagaacgtacctttccatagcagctacgctcacagccaaagcctggaccgactaatgaatccactcatcgaccnatacttgcactatctctcaaagactattaacggttctggacagaatcaacaaacgctaaaattcagtgtggccggacccagcaacatggctgtccagggaagaaactacatacctggacccagctaccgacaacaacgtgtctcaaccactgtgactcaaaacaacaacagcgaatttgcttggcctggagcttcttcttgggctctcaatggacgtaatagcttgatgaatcctggacctgctatggccagccacaaagaaggagaggaccgtttctttcctttgtctggatctttaatttttggcaaacaaggaactggaagagacaacgtggatgcggacaaagtcatgataaccaacgaagaagaaattaaaactactaacccggtagcaacggagtcctatggacaagtggccacaaaccaccagagtgcccaagcacaggcgcagaccggctgggttcaaaaccaaggaatacttccggatatggtttggcaggacagagatgtgtacctgcaaggacccatttgggccaaaattcctcacacggacggcaactttcacccttctccgctgatgggagggtttggaatgaagcacccgcctcctcagatcctcatcaaaaacacacctgtacctgcggatcctccaacggccttcaacaaggacaagctgaactctttcatcacccagtattctactggccaagtcagcgtggagatcgagtgggagctgcagaaggaaaacagcaagcgctggaacccggagatccagtacacttccaactattacaagtctaataatgttgaatttgctgttaatactgaaggtgtatatagtgaaccccgccccattggcaccagatacctgactcgtaatctg

SEQ ID NO: 618 - DNA, 2208 bp, Artificial Sequence
  Description of Artificial Sequence: Synthetic polynucleotide
atggctgccgatggttatcttccagattggctcgaggacaaccttagtgaaggaattcgcgagtggtgggctttgaaacctggagcccctcaacccaaggcaaatcaacaacatcaagacaacgctcgaggtcttgtgcttccgggttacaaataccttggacccggcaacggactcgacaagggggagccggtcaacgcagcagacgcggcggccctcgagcacgacaaggcctacgaccagcagctcaaggccggagacaacccgtacctcaagtacaaccacgccgacgccgagttccaggagcggctcaaagaagatacgtcttttgggggcaacctcgggcgagcagtcttccaggccaaaaagaggcttcttgaacctcttggtctggttgaggaagcggctaagacggctcctggaaagaagaggcctgtagagcagtctcctcaggaaccggactcctccgcgggtattggcaaatcgggtgcacagcccgctaaaaagagactcaatttcggtcagactggcgacacagagtcagtcccagaccctcaaccaatcggagaacctcccgcagccccctcaggtgtgggatctcttacaatggcttcaggtggtggcgcaccagtggcagacaataacgaaggtgccgatggagtgggtagttcctcgggaaattggcattgcgattcccaatggctgggggacagagtcatcaccaccagcacccgaacctgggccctgcccacctacaacaatcacctctacaagcaaatctccaacagcacatctggaggatcttcaaatgacaacgcctacttcggctacagcaccccctgggggtattttgacttcaacagattccactgccacttctcaccacgtgactggcagcgactcatcaacaacaactggggattccggcctaagcgactcaacttcaagctcttcaacattcaggtcaaagaggttacggacaacaatggagtcaagaccatcgccaataaccttaccagcacggtccaggtcttcacggactcagactatcagctcccgtacgtgctcgggtcggctcacgagggctgcctcccgccgttcccagcggacgttttcatgattcctcagtacgggtatctgacgcttaatgatggaagccaggccgtgggtcgttcgtccttttactgcctggaatatttcccgtcgcaaatgctaagaacgggtaacaacttccagttcagctacgagtttgagaacgtacctttccatagcagctacgctcacagccaaagcctggaccgactaatgaatccactcatcgaccaatacttgcactatctctcaaagactattaacggttctggacagaatcaacaaacgctaaaattcagtgtggccggacccagcaacatggctgtccagggaagaaactacatacctggacccagctaccgacaacaacgtgtctcaaccactgtgactcaaaacaacaacagcgaatttgcttggcctggagcttcttcttgggctctcaatggacgtaatagcttgatgaatcctggacctgctatggccagctacaaagaaggagaggacagtttctttcctttgtctggatctttaatttttggcaaacaaggaactggaagagacaacgtggatgcggacaaagtcatgataaccaacgaagaagaaattaaaactactaacccggtagcaacggagtcctatggacaagtggccacaaaccaccagagtgcccaagcacaggcgcagaccggctgggttcaaaaccaaggaatacttccgggtatggtttggcaggacagagatgtgtacctgcaaggacccatttgggccaaaattcctcacacggacggcaactttcacccttctccgctgatgggagggtttggaatgaagcacccgcctcctcagaccctcatcaaaaacacacctgtacctgcggatcctccaacggccttcaacaaggacaagctgaactctttcatcacccagtattctactggccaagtcagcgtggagatcgagtgggagctgcagaaggaaaacagcaagcgctggaacccggagatccagtacacttccaactattacaagtctaataatgttgaatttgctgttaatactgaaggtgtatatagtgaaccccgccccattggcaccagatacctgactcgtaatctg

SEQ ID NO: 619 - DNA, 2208 bp, Artificial Sequence; identical to SEQ ID NO: 602
  Description of Artificial Sequence: Synthetic polynucleotide

SEQ ID NO: 620 - DNA, 2208 bp, Artificial Sequence
  Description of Artificial Sequence: Synthetic polynucleotide
atggctgccgatggttatcttccagattggctcgaggacaaccttagtgaaggaattcgcgagtggtgggctttgaaacctggagcccctcaacccagggcaaatcaacaacatcaagacaacgctcgaggtcttgtgcttccgggttacaaataccttggacccggcaacggactcgacaagggggagccggtcaacgcagccgacgcggcggccctcgagcacgacaaggcctacgaccagcagctcaaggccggagacaacccgtacctcaagtacaaccacgccgacgccgagttccaggagcggctcaaagaagatacgtcttttgggggcaacctcgggcgagcagtcttccaggccaaaaagaggcttcttgaacctcttggtctggttgaggaagcggctaagacggctcctggaaagaagaggcctgtagagcagtctcctcaggaaccggactcctccgcgggtattggcaaatcgggtgcacagcccgctaaaaagagactcaatttcggtcagactggcgacacagagtcagtcccagaccctcaaccaatcggagaacctcccgcagccccctcaggtgtgggatctcttacaatggcttcaggtggtggcgcaccagtggcagacaataacgaaggtgccgatggagtgggtagttcctcgggaaattggcattgcgattcccaatggctgggggacagagtcatcaccaccagcacccgaacctgggccctgcccacctacaacaatcacctctacaagcaaatctccaacagcacatctggaggatcttcaaatgacaacgcctacttcggctacagcaccccctgggggtattttgacttcaacagattccactgccacttctcaccacgtgactggcagcgactcatcaacaacaactggggattccggcctaagcgactcaacttcaagctcttcaacattcaggtcaaagaggttacggacaacaatggagtcaagaccatcgccaataaccttaccagcacggtccaggtcttcacggactcagactgtcagctcccgtacgtgctcgggtcggctcacgagggctgcctcccgccgttcccagcggacgttttcatgattcctcagtacgggtatctgacgcttaatgatggaagccaggccgtgggtcgttcgtccttttactgcctggaatatttcccgtcgcaaatgctaagaacgggtaacaacttccagttcagctacgagtttgagaacgtacctttccatagcagctacgctcacagccaaagcctggaccgactaacgaatccactcatcgaccaatacttgtactatctctcaaagactattaacggttctggacagaatcaacaaacgctaaaattcagtgtggccggacccagcaacatggctgtccagggaagaaactacatacctggacccagctaccgacaacaacgtgtctcaaccactgtgactcaaaacaacaacagcgaatttgcttggcctggagcttcttcttgggctctcaatggacgtaatagcttgatgaatcctggacctgctatggccagccacaaagaaggagaggaccgtttctttcctttgtctggatctttaatttttggcaaacaaggaactggaagagacaacgtggatgcggacaaagtcatgataaccaacgaagaagaaattaaaactactaacccggtagcaacggagtcccatggacaagtggccacaaaccaccagagtgcccaagcacaggcgcagaccggctgggttcaaaaccaaggaatacttccgggtatggtttggcaggacagagatgtgtacctgcaaggacccatttgggccaaaattcctcacacggacggcaactttcacccttctccgctgatgggagggtttggaatgaagcacccgcctcctcagatcctcatcaaaaacacacctgtacctgcggatcctccaacggccttcaacaaggacaagctgaactctttcatcacccagtattctactggccaagtcagcgtggagatcgagtgggagctgcagaaggaaaacagcaagcgctggaacccggagatccagtacacttccaactattacaagtctaataatgttgaatttgctgttaatactgaaggtgtatatagtgaaccccgccccattggcaccagatacctgactcgtaatctg

SEQ ID NO: 621 - DNA, 2208 bp, Artificial Sequence
  Description of Artificial Sequence: Synthetic polynucleotide
atggctgccgatggttatcttccagattggctcgaggacaaccttagtgaaggaattcgcgagtggtgggctttgaaacctggagcccctcaacccaaggcaaatcaacaacatcaagacaacgctcgaggtcttgtgcttccgggttacaaataccttggacccggcaacggactcgacaagggggagccggtcaacgcagcagacgcggcggccctcgagcacgacaaggcctacgaccagcagctcaaggccggagacaacccgtacctcaagtacaaccacgccgacgccgagttccaggagcggctcaaagaagatacgtcttttgggggcaacctcgggcgagcagtcttccaggccaaaaagaggcttcttgaacctcttggtctggttgaggaagcggctaagacggctcctggaaagaagaggcctgtagagcagtctcctcaggaaccggactcctccgcgggtattggcaaatcgggtgcacagcccgctaagaagagactcaatttcggtcagactggcgacacagagtcagtcccagaccctcaaccaatcggagaacctcccgcagccccctcaggtgtgggatctcttacaatggcttcaggtggtggcgcaccagtggcagacaataacgaaggtgccgatggagtgggtagttcctcgggaaattggcattgcgattcccaatggctgggggacagagtcatcaccaccagcacccgaacctgggccctgcccacctacaacaatcacctctacaagcaaatctccaacagcacatctggaggatcttcaaatgacaacgcctacttcggctacagcaccccctgggggtattttgacttcaacagattccactgccacttctcaccacgtgactggcagcgactcatcaacaacaactggggattccggcctaagcgactcaacttcaagctcttcaacattcaggtcaaagaggttacggacaacaatggagtcaagaccatcgccaataaccttaccagcacggtccaggtcttcacggactcagactatcagctcccgtacgtgctcgggtcggctcacgagggctgcctcccgccgttcccagcggacgttttcatgattcctcagtacgggtatctgacgcttaatgatggaagccaggccgtgggtcgttcgtccttttactgcctggaatatttcccgtcgcaaatgctaagaacgggtaacaacttccagttcagctacgagtttgagaacgtacctttccatagcagctacgctcacagccaaagcctggaccgactaatgaatccacccatcgaccaatacttgtactatctctcaaagactattaacggttctggacagaatcaacaaacgctaaaattcagtgtggccggacccagcaacatggctgtccagggaagaaactacatacctggacccagctaccgacaacaacgtgtctcaaccactgtgactcaaaacaacaacagcgaatttgcttggcctggagcttcttcttgggctctcaatggacgtaatagcttgatgaatcctggacctgctatggccagccacaaagaaggagaggaccgtttctttcctttgtctggatctttaatttttggcaaacaaggaactggaagagacaacgtggatgcggacaaagtcatgataaccaacgaagaagaaattaaaactactaacccggtagcaacggagtcctatggacaagtggccacaaaccaccagagtgcccaagcacaggcgcagaccggctgggttcaaaaccaaggaatacttccgggtatggtttggcaggacagagatgtgtacctgcaaggacccatttgggccaaaattcctcacacggacggcaactttcacccttctccgctgatgggagggtttggaatgaagcacccgcctcctcagatcctcatcaaaaacacacctgtacctgcggatcctccaacggccttcaacaaggacaagctgaactctttcatcacccagtattctactggccaagtcagcgtggagatcgagtgggagctgcagaaggaaaacagcaagcgctggaacccggagatccagtacacttccaactattacaagtctaataatgttgaatttgctgttaatactgaaggtgtatatggtgaaccccgccccattggcaccagatacctgactcgtaatctg

SEQ ID NO: 622 - DNA, 2208 bp, Artificial Sequence
  Description of Artificial Sequence: Synthetic oligonucleotide
atggctgccgatggttatcttccagattggctcgaggacaaccttagtgaaggaattcgcgagtggtgggctttgaaacctggagcccctcaacccaaggcaaatcaacaacatcaagacaacgctcgaggtcttgtgcttccgggttacaaataccttggacccggcaacggactcgacaagggggagccggtcaacgcagcagacgcggcggccctcgagcacgacaaggcctacgaccagcagctcaaggccggagacaacccgtacctcaagtacaaccacgccgacgccgagttccaggagcggctcaaagaagatacgtcttttgggggcaacctcgggcgagcagtcttccaggccaaaaagaggcttcttgaacctcttggtctggttgaggaagcggctaagacggctcctggaaagaagaggcctgtagagcagtctcctcaggaaccggactcctccgcgggtattggcaaatcgggtgcacagcccgctaaaaagagactcaatttcggtcagactggcgacacagagtcagtcccagaccctcaaccaatcggagaacctcccgcagccccctcaggtgtgggatctcttacaatggcttcaggtggtggcgcaccagtggcagacaataacgaaggtgccgatggagtgggtagttcctcgggaaattggcattgcgattcccaatggctgggggacagagtcatcaccaccagcacccgaacctgggccctgcccacctacaacaatcacctctacaagcaaatctccaacagcacatctggaggatcttcaaatgacaacgcctacttcggctacagcaccccctgggggtattttgacttcaacagattccactgccacttctcaccacgtgaccggcagcgactcatcaacaacaactggggattccggcctaagcgactcaacttcaagctcttcaacattcaggtcaaagaggttacggacaacaatggagtcaagaccatcgccaataaccttaccagcacggtccaggtcttcacggactcagactatcagctcccgtacgtgctcgggtcggctcacgagggctgcctcccgccgttcccagcggacgttttcatgattcctcagtacgggtatctgacgcttaatgatggaagccaggccgtgggtcgttcgtccttttactgcctggaatatttcccgtcgcaaatgctaagaacgggtaacaacttccagttcagctacgagtttgagaacgtacctttccatagcagctacgctcacagccaaagcctggaccgactaatgaatccactcatcgaccaatacttgtactatctctcaaagactattaacggttctggacagaatcaacaaacgctaaaattcagtgtggccggacccagcaacatggctgtccagggaagaaactacatacctggacccagctaccgacaacaacgtgtctcaaccactgtgactcaaaacaacaacagcgaatttgcttggcctggagcttcttcttgggctctcaatggacgtaatagcttgatgaatcctggacctgctatggccagccacaaagaaggagaggaccgtttctttcctttgtctggatctttaatttttggcaaacaaggaactggaagagacaacgtggatgcggacaaagtcatgataaccaacgaagaagaaattaaaactactaacccggtagcaacggagtcctatggacaagtggccacaaaccaccagagtgcccaagcacaggcgcagaccggctgggttcaaaaccaaggaatacttccgggtatggtttggcaggacagagatgtgtacctgcaaggacccatttgggccaaaattcctcacacggacggcaactttcacccttctccgctgatgggagggtttggaatgaagcacccgcctcctcagatcctcatcaaaaacacacctgtacctgcggatcctccaacggccttcaacaaggacaagctgaactctttcatcacccagtattctactggccaagtcagcgtggagatcgagtgggagctgcagaaggaaaacagcaagcgctggaacccggagatccagtacacttccaactattacaagtctaataatgttgaatttgctgttaatactgaaggtgtatatagtgaaccccgccccattggcaccagatacctgactcgtaatctg

SEQ ID NO: 623 - DNA, 2208 bp, Artificial Sequence
  Description of Artificial Sequence: Synthetic polynucleotide
atggctgccgatggttatcttccagattggctcgaggacaaccttagtgaaggaattcgcgagtggtgggctttgaaacctggagcccctcaacccaaggcaaatcaacaacatcaagacaacgctcgaggtcttgtgcttccgggttacaaataccttggacccggcaacggactcgacaagggggagccggtcaacgcagcagacgcggcagccctcgagcacgacaaggcctacgaccagcagctcaaggccggagacaacccgtacctcaagtacaaccacgccgacgccgagttccaggagcggctcaaagaagatacgtcttttgggggcaacctcgggcgagcagtcttccaggccaaaaagaggcttcttgaacctcttggtctggttgaggaagcggctaagacggctcctggaaagaagaggcctgtagagcagtctcctcaggaaccggactcctccgcgggtattggcaaatcgggtgcacagcccgctaaaaagagactcaatttcggtcagactggcgacacagagtcagtcccagaccctcaaccaatcggagaacctcccgcagccccctcaggtgtgggatctcttacaatggcttcaggtggtggcgcaccagtggcagacaataacgaaggtgccgatggagtgggtagttcctcgggaaattggcattgcaattcccaatggctgggggacagagtcatcaccaccagcacccgaacctgggccctgcccacctacaacaatcacctctacaagcaaatctccaacagcacatctggaggatcttcaaatgacaacgcctacttcggctacagcaccccctgggggtattttgacttcaacagattccactgccacttctcaccacgtgactggcagcgactcatcaacaacaactggggattccggcctaagcgactcaacttcaagctcttcaacattcaggtcaaagaggttacggacaacaatggagtcaagaccatcgccaataaccttaccagcacggtccaggtcttcacggactcagactatcagctcccgtacgtgctcgggtcggctcacgagggctgcctcccgccgttcccagcggacgttttcatgattcctcagtacgggtatctgacgcttaatgatggaagccaggccgtgggtcgttcgtccttttactgcctggaatatttcccgtcgcaaatgctaagaacgggtaacaacttccagttcagctacgagtttgagaacgtacctttccatagcagctacgctcacagccaaagcctggaccgactaatgaatccactcatcgaccaatacttgtactatctctcaaagactattaacggttctggacagaatcaacaaacgctaaaattcagtgtggccggacccggcaacatggctgtccagggaagaaactacatacctggacccagctaccgacaacaacgtgtctcaaccactgtgactcaaaacaacaacagcgaatttgcttggcctggagcttcttcttgggctctcaatggacgtaatagcttgatgaatcctggacctgctatggccagccacaaagaaggagaggaccgtttctttcctttgtctggatctttaatttttggcaaacaaggaactggaagagacaacgtggatgcggacaaagtcatgataaccaacgaagaagaaattaaaactactaacccggtagcaacggagtcctatggacaagtggccacaaaccaccagagtgcccaagcacaggcgcagaccggctgggttcaaaaccaaggaatacttccgggtatggtttggcaggacagagatgtgtacctgcaaggacccatttgggccaaaattcctcacacggacggcaactttcacccttctccgctgatgggagggtttggaatgaagcacccgcctcctcagatcctcatcaagaacacacctgtacctgcggatcctccaacggccttcaacaaggacaagctgaactctttcatcacccagtattctactggccaagtcagcgtggagatcgagtgggagctgcagaaggaaaacagcaagcgctggaacccggagatccagtacacttccaactattacaagtctaataatgttgaatttgctgttaatactgaaggtgtatatagtgaaccccgccccattggcaccagatacctgactcgtaatctg

SEQ ID NO: 624 - DNA, 2208 bp, Artificial Sequence
  Description of Artificial Sequence: Synthetic polynucleotide
atggctgccgatggttatcttccagattggctcgaggacaaccttagtgaaggaattcgcgagtggtgggctttgaaacctggagcccctcaacccaaggcaaatcaacaacatcaagacaacgctcgaggtcttgtgcttccgggttacagataccttggacccggcaacggactcgacaagggggagccggtcaacgcagcagacgcggcggccctcgagcacgacaaggcctacgaccagcagctcaaggccggagacaacccgtacctcaagtacaaccacgccgacgccgagttccaggagcggctcaaagaagatacgtcttttgggggtaacctcgggcgagcagtcttccaggccaaaaagaggcttcttgaacctcttggtctggttgaggaagcggctaagacggctcctggaaagaagaggcctgtagagcagtctcctcaggaaccggactcctccgcgggtatcggcaaatcgggtgcacagcccgctaaaaagagactcaatttcggtcagactggcgacacagagtcagtcccagaccctcaaccaatcggagaacctcccgcagccccctcaggtgtgggatctcttacaatggcttcaggtggtggcgcaccagtggcagacaataacgaaggtgccgatggagtgggtagttcctcgggaaattggcattgcgattcccaatggctgggggacagagtcatcaccaccagcacccgaacctgggccctgcccacctacaacaatcacctctacaagcaaatctccaacagcacatctggaggatcttcaaatgacaacgcctacttcggctacagcaccccctgggggtattttgacttcaacagattccactgccacttctcaccacgtgactggcagcgactcatcaacaacaactggggattccggcctaagcgactcaacttcaagctcttcaacattcaggtcaaagaggttacggacaacaatggagtcaagaccgtcgccaataaccttaccagcacggtccaggtcttcacggactcagactatcagctcccgtacgtgctcgggtcggctcacgagggctgcctcccgccgttcccagcggacgttttcatgattcctcagtacgggtatctgacgcttaatgatggaagccaggccgtgggtcgttcgtccttttactgcctggaatatttcccgtcgcaaatgctaagaacgggtaacaacttccagttcagctacgagtttgagaacgtacctttccatagcagctacgctcacagccaaagcctggaccgactaatgaatccactcatcgaccaatacttgtactatctctcaaagactattaacggttctggacagaatcaacaaacgctaaaattcagtgtggccggacccagcaacatggctgtccagggaagaaactacatacctggacccagctaccgacaacaacgtgtctcaaccactgtgactcaaaacaacaacagcgaatttgcttggcctggagcttcttcttgggctctcaatggacgtaatagcttgatgaatcctggacctgctatggccagccacaaagaaggagaggaccgtttctttcctttgtctggatctttaatttttggcaaacaaggaactggaagagacaacgtggatgcggacaaagtcatgataaccaacgaagaagaaattaaaactactaacccggtagcaacggagtcctatggacaagtggccacaaaccaccagagtgcccaagcacaggcgcagaccggctgggttcaaaaccaaggaatacttccgggtatggtttggcaggacagagatgtgtacctgcaaggacccatttgggccaaaattcctcacacggacggcaactttcacccttctccgctgatgggagggtttggaatgaagcacccgcctcctcagatcctcatcaaaaacacacctgtacctgcggatcctccaacggccttcaacaaggacaagctgaactctttcatcacccagtattctactggccaagtcagcgtggagatcgagtgggagctgcagaaggaaaacagcaagcgctggaacccggagatccagtacacttccaactattacaagtctaataatgttgaatttgctgttaatactgaaggtgtatatagtggaccccgccccattggcaccagatacctgactcgtaatctg

SEQ ID NO: 625 - DNA, 2208 bp, Artificial Sequence
  Description of Artificial Sequence: Synthetic polynucleotide
atggctgccgatggttatcttccagattggctcgaggacaaccttagtgaaggaattcgcgagtggtgggctttgaaacctggagcccctcaacccaaggcaaatcaacaacatcaagacaacgctcgaggtcttgtgcttccgggttacaaataccttggacccggcaacggactcgacaagggggagccggtcaacgcagcagacgcggcggccctcgagcacgacaaggcctacgaccagcagctcaaggccggagacaacccgtacctcaagtacaaccacgccgacgccgagttccaggagcggctcaaagaagatacgtcttttgggggcaacctcgggcgagcagtcttccaggccaaaaagaggcttcttgaacctcttggtctggttgaggaagcggctaagacggctcctggaaagaagaggcctgtagagcagtctcctcaggaaccggactcctccgcgggtattggcaaatcgggtgcacagcccgctaaaaagagactcaatttcggtcagactggcgacacagagtcagtcccagaccctcaaccaatcggagaacctcccgcagccccctcaggtgtgggatctcttacaatggcttcaggtggtggcgcaccagtggcagacaataacgaaggtgccgatggagtgggtagttcctcgggaaattggcattgcgattcccaatggctgggggacagagtcatcaccaccagcacccgaacctgggccctgcccacctacaacaatcacctctacaagcaaatctccaacagcacatctggaggatcttcaaatgacaacgcctacttcggctacagcaccccctgggggtattttgacttcaacagattccactgccacttctcaccacgtgactggcagcgactcatcaacaacaactggggattccggcctaagcgactcaacttcaagctcttcaacattcaggtcaaagaggttacggacaacaatggagtcaagaccatcgccaataaccttaccagcacggtccaggtcttcacggactcagactatcagctcccgtacgtgctcgggtcggctcacgagggctgcctcccgccgttcccagcggacgttttcatgattcctcagtacgggtatctgacgcttaatgatggaagccaggccgtgggtcgttcgtccttttactgcctggaatatttcccgtcgcaaatgctaagaacgggtaacaacttccagttcagctacgagtttgagaacgtacctttccatagcagctacgctcacagccaaagcctggaccgactaatgaatccactcatcgaccaatacttgtactatctctcaaagactattaacggttctggacagaatcaacaaacgctaaaattcagtgtggccggacccagcaacatggctgtccagggaagaaactacatacctggacccagctaccgacaacaacgtgtctcaaccactgtgactcaaaacaacaacagcgaatttgcttggcctggagcttcttcttgggctctcaatggacgtaatagcttgatgaatcctggacctgctatggccagccacaaagaaggagaggaccgtttctttcctttgtctggatctttaatttttggcaaacaaggaactggaagagacaacgtggatgcggacaaagtcatgataaccaacgaagaagaaattaaaactactaacccggtagcaacggagtcctatggacaagtggccacaaaccaccagagtgcccaagcacaggcgcagaccggctgggttcaaaaccaaggaatacttccgggtatggtttggcaggacagagatgtgtacctgcaaggacccatttgggccaaaattcctcacacggacggcaactttcacccttctccgctgatgggagggtttggaatgaagcacccgcctcctcagatcctcatcaaaaacacacctgtacctgcggatcctccaacggccttcaacaaggacaagctgaactctttcatcacccagtattctactggccaagtcagcgtggagatcgagtgggagctgcagaaggaaaacagcaagcgctggaacccggagatccagtacacttccaactattacaagtctaataatgttgaatttgctgttaatactgaaggtgtatatagtgaaccccgccccattggcaccagatacctgactcgtaatctg

SEQ ID NO: 626 - DNA, 2208 bp, Artificial Sequence
  Description of Artificial Sequence: Synthetic polynucleotide
atggctgccgatggttatcttccagattggctcgaggacaaccttagtgaaggaattcgcgagtggtgggctttgaaacctggagcccctcaacccaaggcaaatcaacaacgtcaagacaacgctcgaggtcttgtgcttccgggttacaaataccttggacccggcaacggactcgacaagggggagccggtcaacgcagcagacgcggcggccctcgagcacgacaaggcctacgaccagcagctcaaggccggaggcaacccgtgcctcaagtacaaccacgccgacgccgagttccaggagcggctcaaagaagatacgtcttttgggggcaacctcgggcgagcagtcttccaggccaaaaagaggcttcttgaacctcttggtctggttgaggaagcggctaagacggctcctggaaagaagaggcctgtagagcagtctcctcaggaaccggactcctccgcgggtattggcagatcgggtgcacagcccgctaaaaagagactcaatttcggtcagactggcgacacagagtcagtcccagaccctcaaccaatcggagaacctcccgcagccccctcaggtgtgggatctcttacaatggcttcaggtggtggcgcaccagtggcagacaataacgaaggtgccgatggagtgggtagttcctcgggaaattggcattgcgattcccaatggctgggggacagagtcatcaccaccagcacccgaacctgggccctgcccacctacaacaatcacctctacaagcaaatctccaacagcacatctggaggatcttcaaatgacaacgcctacttcggctacagcaccccctgggggtattttgacttcaacagattccactgccacttctcaccacgtgactggcagcgactcatcaacaacaactggggattccggcctaagcgactcaacttcaagctcttcaacattcaggtcaaagaggttacggacaacaatggagtcaaggccatcgccaataaccttaccagcacggtccaggtcttcacggactcagactatcagctcccgtacgtgctcgggtcggctcacgagggctgcctcccgccgttcccagcggacgttttcatgattcctcagtacgggtatctgacgcttaatgatggaagccaggccgtgggtcgttcgtccttttactgcctggaatatttcccgtcgcaaatgctaagaacgggtaacaacttccagttcagctacgagtttgagaacgtacctttccatagcagctacgctcacagccaaagcctggaccgactaatgaatccactcatcgaccaatacttgtactatctctcaaagactattgacggttctggacagaatcaacaaacgctaaaattcagtgtggccggacccagcaacatggctgtccagggaagaaactacatacctggacccagctaccgacaacaacgtgtctcaaccactgtgactcaaaacaacaacagcgaatttgcttggcctggagcttcttcttgggctctcaatggacgtaatagcttgatggatcctggacctgctatggccagccacaaagaaggagaggaccgtttctttcctttgtctggatctttaatttttggcaaacaaggaactggaagagacaacgtggatgcggacaaagtcatgataaccaacgaagaagaaattaaaactactaacccggtagcaacggagtcctatggacaagtggccacaaaccaccagagtgcccaagcacaggcgcagaccggctgggttcaaaaccaaggaatacttccgggtatggtttggcaggacagagatgtgtacctgcaaggacccatttgggccaaaattcctcacacgggcggcaactttcacccttctccgctgatgggagggtttggaatgaagcacccgcctcctcagatcctcatcaaaaacacacctgtacctgcggatcctccaacggccttcaacaaggacaagctgaactctttcatcacccagtattctactggccaagtcagcgtggagatcgagtgggagctgcagaaggaaaacagcaagcgctggaacccggagatccagtacacttccaactattacaagtctaataatgttgaatttgctgttaatactgaaggtgtatatagtgaaccccgccccattggcaccagatacctgactcgtaatctg

SEQ ID NO: 627 - DNA, 2208 bp, Artificial Sequence
  Description of Artificial Sequence: Synthetic polynucleotide
atggctgccgatggttatcttccagattggctcgaggacaaccttagtgaaggaattcgcgagtggtgggctttgaaacctggagcccctcaacccaaggcaaatcaacaacatcaagacaacgctcgaggtcttgtgcttccgggttacaaataccttggacccggcaacggactcgacaagggggagccggtcaacgcagcagacgcggcggccctcgagcacgacaaggcctacgaccagcagctcaaggccggagacaacccgtacctcaagtacaaccacgccgacgccgagttccaggagcggctcaaagaagatacgtcttttgggggcaacctcgggcgagcagtcttccaggccaaaaagaggcttcttgaacctcttggtctggttgaggaagcggctaagacggctcctggaaagaagaggcctgtagagcagtctcctcaggaaccggactcctccgcgggtattggcaaatcgggtgcacagcccgctaaaaagagactcaatttcggtcagactggcgacacagagtcagtcccagaccctcaaccaatcggagaacctcccgcagccccctcaggtgtgggatctcttacaatggcttcaggtggtggcgcaccagtggcagacaataacgaaggtgccgatggagtgggtagttcctcgggaaattggcattgcgattcccaatggctgggggacagagtcatcaccaccagcacccgaacctgggccctgcccacctacaacaatcacctctacaagcaaatctccaacagcacatctggaggatcttcaaatgacaacgcctacttcggctacagcaccccctgggggtattttgacttcaacagattccactgccacttctcaccacgtgactggcagcgactcatcaacaacaactggggattccggcctaagcgactcaacttcaagctcttcaacattcaggtcaaagaggttacggacaacaatggagtcaagaccatcgccaataaccttaccagcacggtccaggtcttcacggactcagactatcagctcccgtacgtgctcgggtcggctcacgagggctgcctcccgccgttcccagcggacgttttcatgattcctcagtacgggtatctgacgcttaatgatggaagccaggccgtgggtcgttcgtccttttactgcctggaatatttcccgtcgcaaatgctaagaacgggtaacaacttccagttcagctacgagtttgagaacgtacctttccatagcagctacgctcacagccaaagcctggaccgactaatgaatccactcatcgaccaatacttgtactatctctcaaagactattaacggttctggacagaatcaacaaacgctaaaattcagtgtggccggacccagcaacatggctgtccagggaagaaactacatacctggacccagctaccgacaacaacgtgtctcaaccactgtgactcaaaacaacaacagcgaatttgcttggcctggagcttcttcttgggctctcaatggacgtaatagcttgatgaatcctggacctgctatggccagccacaaagaaggagaggaccgtttctttcctttgtctggatctttaatttttggcaaacaaggaactggaagagacaacgtggatgcggacaaagtcatgataaccaacgaagaagaaattaaaactactaacccggtagcaacggagtcctatggacaagtggccacaaaccaccagagtgcccaagcacaggcgcagaccggctgggttcaaaaccaaggaatacttccgggtatggtttggcaggacagagatgtgtacctgcaaggacccatttgggccaaaattcctcacacggacggcaactttcacccttctccgctgatgggagggtttggaatgaagcacccgcctcctcagatcctcatcaaaaacacacctgtacctgcggatcctccaacggccttcaacaaggacaagctgaactctttcatcacccagtattctactggccaagtcagcgtggagatcgagtgggagctgcagaaggaaaacagcaagcgctggaacccggagatccagtacacttccaactattacaagcctaataatgttgaatttgctgttaatactgaaggtgtatatagtgaaccccgccccattggcaccagatacctgactcgtaatctg

SEQ ID NO: 628 - DNA, 2208 bp, Artificial Sequence
  Description of Artificial Sequence: Synthetic polynucleotide
atggctgccgatggttatcttccagattggctcgaggacaaccttagtgaaggaattcgcgagtggtgggctttgaaacctggagcccctcaacccaaggcaaatcaacaacatcaagacaacgctcgaggtcttgtgcttccgggttacaaataccttggacccggcaacggactcgacaagggggagccggtcaacgcagcagacgcggcggccctcgagcacaacaaggcctacgaccagcagctcaaggccggagacaacccgtacctcaagtgcaaccacgccgacgccgagttccaggagcggctcaaagaagatacgtcttttgggggcaacctcgggcgagcagtcttccaggccaaaaagaggcctcttgaacctcttggtctggttgaggaagcggctaagacggctcctggaaagaagaggcctgtagagcagtctcctcaggaaccggactcctccgcgggtattggcaaatcgggtgcacagcccgctaaaaagagactcaatttcggtcagactggcgacacagagtcagtcccagaccctcaaccaatcggagaacctcccgcagccccctcaggtgtgagatctcttacaatggcttcaggtggtggcgcaccagtggcagacaataacgaaggtgccgatggagtgggtagttcctcgggaaattggcattgcgattcccaatggctgggggacagagtcatcaccaccagcacccgaacctgggccctgcccacctacaacaatcacctctacaagcaaatctccaacagcacatctggaggatcttcaaatgacaacgcctacctcggctacagcaccccctgggggtattttgacttcaacagattccactgccacttctcaccacgtgactggcagcgactcatcaacaacaactggggattccggcctaagcgactcaacttcaagctcttcaacattcaggtcaaagaggttacggacaacaatggagtcaagaccatcgccaataaccttaccagcacggtccaggtcttcacggactcagactatcagctcccgtacgtgctcgggtcggctcacgagggctgcctcccgccgttcccagcggacgttttcatgattcctcagtacgggtatctgacgcttaatgatggaagccaggccgtgggtcgttcgtccttttactgcctggaatatttcccgtcgcaaatgctaagaacgggtaacaacttccagttcagctacgagtttgagaacgtacctttccatagcagctacgctcacagccaaagcctggaccgactaatgaatccactcatcgaccaatacttgtactatctctcaaagactattaacggttctggacagaatcaacaaacgctaaaattcagtgtggccggacccagcaacatggctgtccagggaagaaactacatacctggacccagctaccgacaacaacgtgtctcaaccactgtgactcaaaacaacaacagcgaatttgcttggcctggagcttcttcttgggctctcaatggacgtaatagcttgatgaatcctggacctactatggccagccacaaagaaggagaggaccgtttctttcctttgtctggatctttaatttttggcaaacaaggaactggaagagacaacgtggatgcggacaaagtcatgataaccaacgaagaagaaattaaaactactaacccggtagcaacggagtcctatggacaagtggccacaaaccaccagagtgcccaagcacaggcgcagaccggctgggttcaaaaccaaggaatacttccgggtatggtttggcaggacagagatgtgtacctgcaaggacccatttgggccaaaattcctcacacggacggcaactttcacccttctccgctgatgggagggtttggaatgaagcacccgcctcctcagatcctcatcaaaaacacacctgtacctgcggatcctccaacggccttcaacaaggacaagctgaactctttcatcacccagtattctactggccaagtcagcgtggagatcgagtgggagctgcagaaggaaaacagcaagcgctggaacccggagatccagtacacttccaactattacaagtctaataatgttgaatttgctgttaatactgaaggtgtatatagtgaaccccgccccattggcaccagatacctgactcgtaatctg

SEQ ID NO: 629 - DNA, 2208 bp, Artificial Sequence
  Description of Artificial Sequence: Synthetic polynucleotide
atggctgccgatggttatcttccagattggctcgaggacaaccttagtgaaggaattcgcgagtggtgggctttgaaacctggagcccctcaacccaaggcaaatcaacaacatcaagacaacgctcgaggtcttgtgcttccgggttacaaataccttggacccggcaacggactcgacaagggggagccggtcaacgcagcagacgcggcggccctcgtgcacgacaaggcctacgaccagcagctcaaggccggagacaacccgtacctcaagtgcaaccacgccgacgccgagttccaggagcggctcaaagaagatacgtcttttgggggcaacctcgggcgagcagtcttccaggccaaaaagaggcttcttgaacctcttggtctggttgaggaagcggctaagacggctcctggaaagaagaggcctgtagagcagtctcctcaggaaccggactcctccgcgggtattggcaaatcgggtgcacagcccgctaaaaagagactcaatttcggtcagactggcgacacagagtcagtcccagaccctcaaccaatcggagaacctcccgcagccccctcaggtgtgggatctcttacaatggcttcaggtggtggcgcaccagtggcagacaataacgaaggtgccgatggagtgggtagttcctcgggaaattggcattgcgattcccaatggctgggggacagagtcatcaccaccagcacccgaacctgggccctgcccacctacaacaatcacctctacaagcaaatctccaacagcacatctggaggatcttcaaatgacaacgcctacctcggctacagcaccccctgggggtattttgacttcaacagattccactgccacttctcaccacgtgactggcagcgactcatcaacaacaactggggattccggcctaagcgactcaacttcaagctcttcaacattcaggtcaaagaggttacggacaacaatggagtcaagaccatcgccaataaccttaccagcacggtccaggtcttcacggactcagactatcagctcccgtacgtgctcgggtcggctcacgagggctgcctcccgccgttcccagcggacgttttcacgattcctcagtacgggtatctgacgcttaatgatggaagccaggccgtgggtcgttcgtccttttactgcctggaatatttcccgtcgcaaatgctaagaacgggtaacaacttccagttcagctacgagtttgagaacgtacctttccatagcagctacgctcacagccaaagcctggaccgactaatgaatccactcatcgaccaatacttgtactatctctcaaagactattaacggttctggacagaatcaacaaacgctaaaattcagtgtggccggacccagcaacatggctgtccagggaagaaactacatacctggacccagctaccgacaacaacgtgtctcaaccactgtgactcaaaacaacaacagcgaatttgcttggcctggagcttcttcttgggctctcaatggacgtaatagcttgatgaatcctggacctgctatggccagccacaaagaaggagaggaccgtttctttcctttgtctggatctttaatttttggcaaacaaggaactggaagagacaacgtggatgcggacaaagtcatgataaccaacgaagaagaaattaaaactactaacccggtagcaacggagtcctatggacaagtggccacaaaccaccagagtgcccaagcacaggcgcagaccggctgggttcaaaaccaaggaatacttccgggtatggtttggcaggacagagatgtgtacctgcaaggacccatttgggccaaaattcctcacacggacggcaactttcacccttctccgctgatgggagggtttggaatgaagcacccgcctcctcagatcctcatcaaaaacacacctgtacctgcggatcctccaacggccttcaacaaggacaagctgaactctttcatcacccagtattctactggccaagtcagcgtggagatcgagtgggagctgcagaaggaaaacagcaagcgctggaacccggagatccagtacacttccaactattacaagtctaataatgttgaatttgctgttaatactgaaggtgtatatagtgaaccccgccccattgggccccgatacctgactcgtaatttt

SEQ ID NO: 630 - DNA, 2208 bp, Artificial Sequence
  Description of Artificial Sequence: Synthetic polynucleotide
atggctgccgatggttatcttccagattggctcgaggacaaccttagtgaaggaattcgcgagtggtgggctttgaaacctggagcccctcaacccaaggcaaatcaacaacatcaagacaacgctcgaggtcttgtgcttccgggttacaaataccttggacccggcaacggactcgacaagggggagccggtcaacgcagcagacgcggcggccctcgagcacaacaaggcctacgaccagcagctcaaggccggagacaacccgtacctcaagtgcaaccacgccgacgccgagttccaggagcggctcaaagaagatacgtcttttgggggcaacctcgggcgagcagtcttccaggccaaaaagaggcttcttgaacctcttggtctggttgaggaagcggctaagacggctcctggaaagaagaggcctgtagagcagtctcctcaggaaccggactcctccgcgggtattggcaaatcgggtgcacagcccgctaaaaagagactcaatttcggtcagactggcgacacagagtcagtcccagaccctcaaccaatcggagaacctcccgcagccccctcaggtgtgagatctcttacaatggcttcaggtggtggcgcaccagtggcagacaataacgaaggtgccgatggagtgggtagttcctcgggaaattggcattgcgattcccaatggctgggggacagagtcatcaccaccagcacccgaacctgggccctgcccacctacaacaatcacctctacaagcaaatctccaacagcacatctggaggatcttcaaatgacaacgcctacctcggctacagcaccccctgggggtattttgacttcaacagattccactgccacttctcaccacgtgactggcagcgactcatcaacaacaactggggattccggcctaagcgactcaacttcaagctcttcaacattcaggtcaaagaggttacggacaacaatggagtcaagaccatcgccaataaccttaccagcacggtccaggtcttcacggactcagactatcagctcccgtacgtgctcgggtcggctcacgagggctgcctcccgccgttcccagcggacgttttcatgattcctcagtacgggtatctgacgcttaatgatggaagccaggccgtgggtcgttcgtccttttactgcctggaatatttcccgtcgcaaatgctaagaacgggtaacaacttccagttcagctacgagtttgagaacgtacctttccatagcagctacgctcacagccaaagcctggaccgactaatgaatccactcatcgaccaatacttgtactatctctcaaagactattaacggttctggacagaatcaacaaacgctaaaattcagtgtggccggacccagcaacatggctgtccagggaagaaactacatacctggacccagctaccgacaacaacgtgtctcaaccactgtgactcaaaacaacaacagcgaatttgcttggcctggagcttcttcttgggctctcaatggacgtaatagcttgatgaatcctggacctgctatggccagccacaaagaaggagaggaccgtttctttcctttgtctggatctttaatttttggcaaacaaggaactggaagagacaacgtggatgcggacaaagtcatgataaccaacgaagaagaaattaaaactactaacccggtagcaacggagtcctatggacaagtggccacaaaccaccagagtgcccaagcacaggcgcagaccggctgggttcaaaaccaaggaatacttccgggtatggtttggcaggacagagatgtgtacctgcaaggacccatttgggccaaaattcctcacacggacggcaactttcacccttctccgctgatgggagggtttggaatgaagcacccgcctcctcagatcctcatcaaaaacacacctgtacctgcggatcctccaacggccttcaacaaggacaagctgaactctttcatcacccagtattctactggccaagtcagcgtggagatcgagtgggagctgcagaaggaaaacagcaagcgctggaacccggagatccagtacacttccaactattacaagtctaataatgttgaatttgctgttaatactgaaggtgtatatagtgaaccccgccccattggcaccagatacctgactcgtaatctg

SEQ ID NO: 631 - DNA, 2208 bp, Artificial Sequence
  Description of Artificial Sequence: Synthetic polynucleotide
atggctgccgatggttatcttccagattggctcgaggacaaccttagtgaaggaattcgcgagtggtgggctttgaaacctggagcccctcaacccaaggcaaatcaacaacatcaagacaacgctcgaggtcttgtgcttccgggttacaaataccttggacccggcaacggactcgacaagggggagccggtcaacgcagcagacgcggcggccctcgagcacgacaaggcctacgaccagcagctcaaggccggagacaacccgtacctcaagtgcaaccacgccgacgccgagttccaggagcggctcaaagaagatacgtcttttgggggcaacctcgggcgagcagtcttccaggccaaaaagaggcttcttgaacctcttggtctggttgaggaagcggctaagacggctcctggaaagaagaggcctgtagagcagtctcctcaggaaccggactcctccgcgggtattggcaaatcgggtgcacagcccgctaaaaagagactcaatttcggtcagactggcgacacagagtcagtcccagaccctcaaccaatcggagaacctcccgcagccccctcaggtgtgggatctcttacaatggcttcaggcggtggcgcaccagtggcagacaataacgaaggtgccgatggagtgggtagttcctcgggaaattggcattgcgattcccaatggctgggggacagagtcatcaccaccagcacccgaacctgggccctgcccacctacaacaatcacctctacaagcaaatctccaacagcacatctggaggatcttcaaatgacaacgcctacctcggctacagcaccccctgggggtattttgacttcaacagattccactgccacttctcaccacgtgactggcagcgactcatcaacaacaactggggattccggcctaagcgactcaacttcgagctcttcaacattcaggtcaaagaggttacggacaacaatggagtcaagaccatcgccaataaccttaccagcacggtccaggtcttcacggactcagactatcagctcccgtacgtgctcgggtcggctcacgagggctgcctcccgccgttcccagcggacgttttcatgattcctcagtacgggtatctgacgcttaatgatggaagccaggccgtgggtcgttcgtccttttactgcctggaatatttcccgtcgcaaatgctaagaacgggtaacaacttccagtccagctacgagtttgagaacgtacctttccatagcagctacgctcacagccaaagcctggaccgactaatgaatccactcatcgaccaatacttgtactatctctcaaagactattaacggttctggacagaatcaacaaacgctaaaattcagtgtggccggacccagcaacatggctgtccagggaagaaactacatacctggacccagctaccgacaacaacgtgcctcaaccactgtgactcaaaacaacaacagcgaatttgcttggcctggagcttcttcttgggctctcaatggacgtaatagcttgatgaatcctggacctgctatggccagccacaaagaaggggaggaccgtttctttcctttgtctggatctttaatttttggcaaacaaggaactggaagagacaacgtggatgcggacaaagtcatgataaccaacgaagaagaaattaaaactactaacccggtagcaacggagtcctatggacaagtggccacaaaccaccagagtgcccaagcacaggcgcagaccggctgggttcaaaaccaaggaatacttccgggtatggtttggcaggacagagatgtgtacctgcaaggacccatttgggccaaaattcctcacacggacggcaactttcacccttctccgctgatgggagggtttggaatgaagcacccgcctcctcagatcctcatcaaaaacacacctgtacctgcggatcctccaacggccttcaacaaggacaagctgaactctttcatcacccagtattctactggccaagtcagcgtggagatcgagtgggagctgcagaaggaaaacagcaagcgctggaacccggagatccagtacacttccaactattacaagtctaataatgttgaatttgctgttaatactgaaggtgtatatagtgaaccccgccccattggcaccagatacctgactcgtaatctg

SEQ ID NO: 632 - DNA, 2208 bp, Artificial Sequence
  Description of Artificial Sequence: Synthetic polynucleotide
atggctgccgatggttatcttccagattggctcgaggacaaccttagtgaaggaattcgcgagtggtgggctttgaaacctggagcccctcaacccaaggcaaatcaacaacatcaagacaacgctcgaggtcttgtgcttccgggttacaaataccttggacccggcaacggactcgacaagggggagccggtcaacgcagcagacgcggcggccctcgagcacgacaaggcctacgaccagcagctcaaggccggagacaacccgtacctcaagtgcaaccacgccgacgccgagttccaggagcggctcaaagaagatacgtcttttgggggcaacctcgggcgagcagtcttccaggccaaaaagaggcttcttgaacctcttggtctggttgaggaagcggctaagacggctcctggaaagaagaggcctgtagagcagtctcctcaggaaccggactcctccgcgggtattggcaaatcgggtgcacagcccgctaaaaagagactcaatttcggtcagactggcgacacagagtcagtcccagaccctcaaccaatcggagaacctcccgcagcccccccaggtgtgggatctcttacaatggcttcaggtggtggcgcaccagtggcggacaataacgaaggtgccgatggagtgggtagttcctcgggaaattggcattgcgattcccaatggctgggggacagagtcatcaccaccagcacccgaacctgggccctgcccacctacaacaatcacctctacaagcaaatctccaacagcacatctggaggatcttcaaatgacaacgcctacctcggctacagcaccccctgggggtattttgacttcaacagattccactgccacttctcaccacgtgactggcagcgactcatcaacaacaactggggattccggcctaagcgactcaacttcaagctcttcaacattcaggtcaaagaggttacggacaacaatggagtcaagaccatcgccaataaccttaccagcacggtccaggtcttcacggactcagactatcagctcccgtacgtgctcgggtcggctcacgagggctgcctcccgccgttcccagcggacgttttcatgattcctcagtacgggtatctgacgcttaatgatggaagccaggccgtgggtcgttcgtccttttactgcctggaatatttcccgtcgcaaatgctaagaacgggtaacaacttccagttcagctacgagtttgagaacgtacctttccatagcagctacgctcacagccaaagcctggaccgactaatgaatccactcatcgaccaatacttgtactatctctcaaagactattagcggttctggacagaatcaacaaacgctaaaattcagtgtggccggacccagcaacatggctgtccagggaagaaactacatacctggacccagctaccgacaacaacgtgtctcaaccactgtgactcaaaacaacagcagcgaatttgcttggcctggagcttcttcttgggctctcaatggacgtaatagcttgatgaatcctggacctgctatggccagccacaaagaaggagaggaccgtttctttcctttgtctggatctttaatttttggcaaacaaggaactggaagagacaacgtggatgcggacaaagtcatgataaccaacgaagaagaaattaaaactactaacccggtagcaacggagtcctatggacaagtggccacaaaccaccagagtgcccaagcacaggcgcagaccggctgggttcaaaaccaaggaatactttcgggtatggtttggcaggacagagatgtgtacctgcaaggacccatttgggccaaaattcctcacacggacggcaactttcacccttctccgctgatgggagggtttggaatgaagcacccgcctcctcagatcctcatcaaaaacacacctgtacctgcggatcctccaacggccttcaacaaggacaagctgaactctttcatcacccagtattctactggccaagtcagcgtggagatcgagtgggagctgcagaaggaaaacagcaagcgctggaacccggagatccagtacacttccaactattacaagtctaataatgttgaatttgctgttaatactgaaggtgtatatagtgaaccccgccccattggcaccagatacctgactcgtaatctg

SEQ ID NO: 633 - DNA, 2208 bp, Artificial Sequence
  Description of Artificial Sequence: Synthetic polynucleotide
atggctgccgatggttatcttccagattggctcgaggacaaccttagtgaaggaattcgcgagtggtgggctttgaaacctggagcccctcaacccaaggcaaatcaacaacatcaagacaacgctcgaggtcttgtgcttccgggttacaaataccttggacccggcaacggactcgacaagggggagccggtcaacgcagcagacgcggcggccctcgagcacgacaaggcctacgaccagcagctcaaggccggagacaacccgtacctcaagtgcaaccacgccgacgccgagttccaggagcggctcaaagaagatacgtcttttgggggcaacctcgggcgagcagtcttccaggccaaaaagaggcttcttgaacctcttggtctggttgaggaagcggctaagacggctcctggaaagaagaggcctgtagagcagtctcctcaggaaccggactcctccgcgggtattggcaaatcgggtgcacagcccgctaaaaagagactcaatttcggtcagactggcgacacagagtcagtcccagaccctcaaccaatcggagaacctcccgcagccccctcaggtgtgggatctcttacaatggcttcaggtggtggcgcaccagtggcagacaataacgaaggtgccgatggagtgggtagttcctcgggaaattggcattgcgattcccaatggctgggggacagagtcatcaccaccagcacccgaacctgggccctgcccacctacaacaatcacctctacaagcaaatctccaacagcacatctggaggatcttcaaatgacaacgcctacctcggctacagcaccccctgggggtattttgacttcaacagattccactgccacttctcaccacgtgactggcagcgactcatcaacaacaactggggattccggcctaagcgactcaacttcaagctcttcaacattcaggtcaaagaggttacggacaacaatggagtcaagaccatcgccaataaccttaccagcacggtccaggtcttcacggactcagactatcagctcccgtacgtgctcgggtcggctcacgagggctgcctcccgccgttcccagcggacgttttcatgattcctcagtacgggtatctgacgcttaatgatggaagccaggccgtgggtcgttcgtccttttactgcctggaatatttcccgtcgcaaatgctaagaacgggtaacaacttccagttcagctacgagtttgagaacgtacctttccatagcagctacgctcacagccaaagcctggaccgactaatgaatccactcatcgaccaatacttgtactatctctcaaagactattaacggttctggacagaatcaacaaacgctaaaattcagtgtggccggacccagcaacatggctgtccagggaagaaactacatacctggacccagctaccgacaacaacgtgtctcaaccactgtgactcaaaacaacaacagcgaatttgcttggcctggagcttcttcttgggctctcaatggacgtaatagcttgatgaatcctggacctgctatggccagccacaaagaaggagaggaccgtttctttcctttgtctggatctttaatttttggcaaacaaggaactggaagagacaacgtggatgcggacaaagtcatgataaccaacgaagaagaaattaaaactactaacccggtagcaacggagtcctatggacaagtggccacaaaccaccagagtgcccaagcacaggcgcagaccggctgggttcaaaaccaaggaatacttccgggtatggtttggcaggacagagatgtgtacctgcaaggacccatttgggccaaaattcctcacacggacggcaactttcacccttctccgctgatgggagggtttggaatgaagcacccgcctcctcagatcctcatcaaaaacacacctgtacctgcggatcctccaacggccttcaacaaggacaagctgaactctttcatcacccagtattctactggccaagtcagcgtggagatcgagtgggagctgcagaaggaaaacagcaagcgctggaacccggagatccagtacacttccaactattacaagtctaataatgttgaatttgctgttaatactgaaggtgtatatagtgaaccccgccccattggcaccagatacctgactcgtaatctg

SEQ ID NO: 634 - DNA, 2208 bp, Artificial Sequence; identical to SEQ ID NO: 633
  Description of Artificial Sequence: Synthetic polynucleotide

SEQ ID NO: 635 - DNA, 2208 bp, Artificial Sequence
  Description of Artificial Sequence: Synthetic polynucleotide
atggctgccgatggttatcttccagattggctcgaggacaaccttagtgaaggaattcgcgagtggtgggctttgaaacctggagcccctcaacccaaggcaaatcaacaacatcaagacaacgctcgaggtcttgtgcttccgggttacaaataccttggacccggcaacggactcgacaagggggagccggtcaacgcagcagacgcggcggccctcgagcacgacaaggcctacgaccagcagctcaaggccggagacaacccgtacctcaagtgcaaccacgccgacgccgagttccaggagcggctcaaagaagatacgtcttttgggggcaacctcgggcgagcagtcttccaggccaaaaagaggcttcttgaacctcttggtctggttgaggaagcggctaagacggctcctggaaagaagaggcctgtagagcagtctcctcaggaaccggactcctccgcgggtattggcaaatcgggtgcacagcccgctaaaaagagactcaatttcggtcagactggcgacacagagtcagtcccagaccctcaaccaatcggagaacctcccgcagccccctcaggtgtgggatctcttacaatggcttcaggtggtggcgcaccagtggcagacaataacgaaggtgccgatggagtgggtagttcctcgggaaattggcattgcgattcccaatggctgggggacagagtcatcaccaccagcacccgaacctgggccctgcccacctacaacaatcacctctacaagcaaatctccaacagcacatctggaggatcttcaaatgacaacgcctacctcgactacagcaccccctgggggtattttgacttcaacagattccactgccacttctcaccacgtgactggcagcggctcatcaacaacaactggggattccggcctaagcgactcaacttcaagctcttcaacattcaggtcaaagaggttacggacaacaatggagtcaagaccatcgccaataaccttaccagcacggtccaggtcttcacggactcagactatcagctcccgtacgtgctcgggtcggctcacgagggctgcctcccgccgttcccagcggacgttttcatgattcctcagtacgggtatctgacgcttaatgatggaagccaggccgtgggtcgttcgtccttttactgcctggaatatttcccgtcgcaaatgctaagaacgggtaacaacttccagttcagctacgagtttgagaacgtacctttccatagcagctacgctcacagccaaagcctggaccgactaatgaatccactcatcgaccaatacttgtactatctctcaaagactattaacggttctggacagaatcaacaaacgctaaaattcagtgtggccggacccagcaacatggctgtccagggaagaaactacatacctggacccagctaccgacaacaacgtgtctcaaccactgtgactcaaaacaacaacagcgaatttgcttggcctggagcttcttcttgggctctcaatggacgtaatagcttgatgaatcctggacctgctatggccagccacaaagaaggagaggaccgtttctttcctttgtctggatctttaatttttggcaaacaaggaactggaagagacaacgtggatgcggacaaagtcatgataaccaacgaagaagaaattaaaactactaacccggtagcaacggagtcctatggacaagtggccacaaaccaccagagtgcccaagcacaggcgcagaccggctgggttcaaaaccaaggaatacttccgggtatggtttggcagggcagagatgtgtacctgcaaggacccatttgggccaaaattcctcacacggacggcaactttcacccttctccgctgatgggagggtttggaatgaagcacccgcctcctcagatcctcatcaaaaacacacctgtacctgcggatcctccaacggccttcaacaaggacaagctgaactctttcatcacccagtattctactggccaagtcagcgtggagatcgagtgggagctgcagaaggaaaacagcaagcgctggaacccggagatccagtacacttccaactattacaagtctaataatgttgaatttgctgttaatactgaaggtgtatatagtgaaccccgccccattggcaccagatacctgactcgtaatctg

SEQ ID NO: 636 - DNA, 2208 bp, Artificial Sequence; identical to SEQ ID NO: 633
  Description of Artificial Sequence: Synthetic polynucleotide

SEQ ID NO: 637 - DNA, 2208 bp, Artificial Sequence
  Description of Artificial Sequence: Synthetic polynucleotide
atggctgccgatggttatcctccagattggctcgaggacaaccttagtgaaggaattcgcgagtggtgggctttgaaacctggagcccctcaacccaaggcaaatcaacaacatcaagacaacgctcgaggtcttgtgcttccgggttacaaataccttggacccggcaacggactcgacaagggggagccggtcaacgcagcagacgcggcggccctcgagcacgacaaggcctacgaccagcagctcaaggccggggacaacccgcacctcaagtacaaccacgccgacgccgagttccaggagcggctcaaagaagatacgtcttttgggggcaacctcgggcgagcagtcttccaggccaaaaagaggcttcttgaacctcttggtctggttgaggaagcggctaagacggctcctggaaagaagaggcccgtagagcagtctcctcaggaaccggactcctccgcgggtattggcaaatcgggtgcacagcccgctaagaagagactcaatttcggtcagactggcgacactgagtcagtcccagaccctcaaccaatcggagaacctcccgcagccccctcaggtgtgggatctcttacaatggcttcaggtggtggcgcaccagtggcagacaataacgaaggtgccgatggagtgggtagttcctcgggaaattggcattgcgattcccaatggctgggggacagagtcatcaccaccagcacccgaacctgggccctgcccacctacaacaatcacctctacaagcaaatctccaacagcacatctggaggatcttcaaatgacaacgcctacttcggctacagcaccccctgggggtattttgacttcaacagattccactgccacttctcaccacgtgactggcagcgactcatcaacaacaactggggattccggcctaagcgactcaacttcaagctcttcaacattcaggtcaaagaggttacggacaacaatggagtcaagaccatcgccaataaccttaccagcacggtccaggtcttcacggactcagactatcagctcccgtacgtgctcgggtcggctcacgagggctgcctcccgccgttcccagcggacgttttcatgattcctcagtacgggtatctgacgcttaatgatggaagccaggccgtgggtcgttcgtccttttactgcctggaatatttcccgtcgcaaatgctaagaacgggtaacaacttccagttcagctacgagtttgagaacgtacctttccatagcagctacgctcacagccaaagcctggaccgactaatgaatccactcatcgaccaatacttgtactatctctcaaagactattaacggttctggacagaatcaacaaacgctaaaattcagtgtggccggacccagcaacatggctgtccagggaagaaactacatacctggacccagctaccgacaacaacgtgtctcaaccactgtgactcaaaacaacaacagcgaatttgcttggcctggagcttcttcttgggctctcaatggacgtaatagcttgatgaatcctggacctgctatggccagccacaaagaaggagaggaccgtttctttcctttgtctggatctttaatttttggcaaacaaggaactggaagagacaacgtggatgcggacaaagtcatgataaccaacgaagaagaaattaaaactactaacccggtagcaacggagtcctatggacaagtggccacaaaccaccagagtgcccaagcacaggcgcagaccggctgggttcaaaaccaaggaatacttccgggtatggtttggcaggacagagatgtgtacctgcaaggacccatttgggccaaaattcctcacacggacggcaactttcacccttctccgctgatgggagggtttggagtgaagcacccgcctcctcagatcctcatcaaaaacacacctgtacctgcggatcctccaacggccttcaacaaggacaggctgaactctttcatcacccagtattctactggccaagtcagcgtggagatcgagtgggagctgcagaaggaaaacagcaagcgctggaacccggagatccagtacacttccaactattacaagtctaataatgttgaatttgctgttaatactgaaggtgtatatagtgaaccccgccccattggcaccagatacctgactcgtaatctg

SEQ ID NO: 638 - DNA, 2208 bp, Artificial Sequence
  Description of Artificial Sequence: Synthetic polynucleotide
atggctgccgatggttatcttccagattggctcgaggacaaccttagtgaaggaattcgcgagtggtgggctttgaaacctggagcccctcaacccaaggcaaatcaacaacatcaagacaacgctcgaggtcttgtgcttccgggttacaaataccttggacccggcaacggactcgacaagggggagccggtcaacgcagcagacgcggcggccctcgagcacgacaaggcctacgaccagcagctcaaggccggagacaacccgtacctcaagtacaaccacgccgacgccgagttccaggagcggctcaaagaagatacgtcttttgggggcaacctcgggcgagcagtcttccaggccaaaaagaggcttcttgaacctcttggtctggttgaggaagcggctaagacggctcctggaaagaagaggcctgtagagcagtctcctcaggaaccggactcctccgcgggtattggcaaatcgggtgcacagcccgctaaaaagagactcaatttcggtcagactggcgacacagagtcagtcccagaccctcaaccaatcggagaacctcccgcagccccctcaggtgtgggatctcttacaatggcttcaggtggtggcgcaccagtggcggacaataacgaaggtgccgatggagtgggtagttcctcgggaaattggcattgcgattcccaatggctgggggacagagtcatcaccaccagcacccgaacctgggccctgcccacctacaacaatcacctctacaagcaaatctccaacagcacatctggaggatcttcaaatgacaacgcctacttcggctacagcaccccctgggggtattttgacttcaacagattccactgccacttctcaccacgtgactggcagcgactcatcaacaacaactggggattccggcctaagcgactcaacttcaagctcttcaacattcaggtcaaagaggttacggacaacaatggagtcaagaccatcgccaataaccttaccagcacggtccaggtcttcacggactcagactatcagctcccgtacgtgctcgggtcggctcacgagggctgcctcccgccgttcccagcggacgttttcatgattcctcagtacgggtatctgacgcttaatgatggaagccaggccgtgggtcgttcgtccttttactgcctggaatatttcccgtcgcaaatgctaagaacgggtaacaacttccagttcagctacgagtttgagaacgtacctttccatagcagctacgctcacagccaaagcctggaccgactaatgaatccactcatcgaccaatacttgtactatctctcaaagactattaacggttctggacagaatcaacaaacgctaaaattcagtgtggccggacccagcaacatggctgtccagggaagaaactacatacctggacccagctaccgacaacaacgtgtctcaaccactgtgactcaaaacaacaacagcgaatttgcttggcctggagcttcttcttgggctctcaatggacgtaatagtttgatgaatcctggacctgctatggccagccacaaagaaggagaggaccgtttctttcctttgtctggatctttaatttttggcaaacaaggaactggaagagacaacgtggatgcggacaaagtcatgataaccaacgaagaagaaattaaaactactaacccggtagcaacggagtcctatggacaagtggccacaaaccaccagagtgcccaagcacaggcgcagaccggctgggttcaaaaccaaggaatacttccgggtatggtttggcaggacagagatgtgtacctgcaaggacccatttgggccaaaattcctcacacggacggcaactttcacccttctccgctgatgggagggtttggagtgaagcacccgcctcctcagatcctcatcaaaaacacacctgtacctgcggatcctccaacggccttcaacaaggacaagctgaactctttcatcacccagtattctactggccaagtcagcgtggagatcgagtgggagctgcagaaggaaaacagcaagcgctggaacccggagatccagtacacttccaactattacaagtctaataatgttgaatttgctgttaatactgaaggtgtatatagtgaaccccgccccattggcaccagatacctgactcgtaatctg

SEQ ID NO: 639 - DNA, 2208 bp, Artificial Sequence
  Description of Artificial Sequence: Synthetic polynucleotide
atggctgccgatggttatcttccagattggctcgaggacaaccttagtgaaggaattcgcgagtggtgggctttgaaacctggagcccctcaacccaaggcaaatcaacaacatcaagacaacgctcgaggtcttgtgcttccgggttacaaataccttggacccggcaacggactcgacaagggggagccggtcaacgcagcagacgcggcggccctcgagcacgacaaggcctacgaccagcagctcaaggccggagacaacccgtacctcaagtacaaccacgccgacgccgagttccaggagcggctcaaagaagatacgtcttttgggggcaacctcgggcgagcagtcttccaggccaaaaagaggcttcttgaacctcttggtctggttgaggaagcggctaagacggctcctggaaagaagaggcctgtagagcagtctcctcaggaaccggactcctccgcgggtattggcaaatcgggtgcacagcccgctaaaaagagactcaatttcggtcagactggcgacacagagtcagtcccagaccctcaaccaatcggagaacctcccgcagccccctcaggtgtgggatctcttacaatggcttcaggtggtggcgcaccagtggcagacaataacgaaggtgccgatggagtgggtagttcctcgggaaattggcattgcgattcccaatggctgggggacagagtcatcaccaccagcacccgaacctgggccctgcccacttacaacaatcacctctacaagcaaatctccaacagcacatctggaggatcttcaaatgacaacgcctacttcggctacagcaccccctgggggtattttgacttcaacagattccactgccacttctcaccacgtgactggcagcgactcaccaacaacaactggggattccggcctaagcgactcaacttcaagctcttcaacattcaggtcaaagaggttacggacaacaatggagtcaagaccatcgccaataaccttaccagcacggtccaggtcttcacggactcagactatcagctcccgtacgtgctcgggtcggctcacgagggctgcctcccgccgttcccagcggacgttttcatgattcctcagtacgggtatctgacgcttaatgatggaagccaggccgtgggtcgttcgtccttttactgcctggaatatatcccgtcgcaaatgctaagaacgggtaacaacttccagttcagctacgagtttgagaacgtacctttccatagcagctacgctcacagccaaagcctggaccgactaatgaatccactcatcgaccaatacttgtactatctctcaaagactattaacggttctggacagaatcaacaaacgctaaaattcagtgtggccggacccagcaacatggctgtccagggaagaaactacatacctggacccagctaccgacaacaacgtgtctcaaccactgtgactcaaaacaacaacagcgaatttgcttggcctggagcttcttcttgggctctcaatggacgtaatagcttgatgaatcctggacctgctatggccagccacaaagaaggagaggaccgtttctttcctttgtctggatctttaatttttggcaaacaaggaactggaagagacaacgtggatgcggacaaagtcatgataaccaacgaagaagaaattaaaactactaacccggtagcaacggagtcctatggacaagtggccacaaaccaccagagtgcccaagcacaggcgcagaccggctgggttcaaaaccaaggaatacttccgggtatggtttggcaggacagagatgtgtacctgcaaggacccatttgggccaaaattcctcacacggacggcaactttcacccttctccgctgatgggagggtttggagtgaagcacccgcctcctcagatcctcatcaaaaacacacctgtacctgcggatcctccaacggccttcaacaaggacaagctgaactctttcatcacccagtattctactggccaagtcagcgtggagatcgagtgggagctgcagaaggaaaacagcaagcgctggaacccggagatccagtacacttccaactattacaagtctaataatgttgaatttgctgttaatactgaaggtgtatatagtgaaccccgccccattggcaccagatacctgactcgtaatctg

SEQ ID NO: 640 - DNA, 2208 bp, Artificial Sequence
  Description of Artificial Sequence: Synthetic polynucleotide
atggctgccgatggttatcttccagattggctcgaggacaaccttagtgaaggaattcgcgagtggtgggctttgaaacctggagcccctcaacccaaggcaaatcaacaacatcaagacaacgctcgaggtcttgtgcttccgggttacaaataccttggacccggcaacggactcgacaagggggagccggtcaacgcagcagacgcggcggccctcgagcacgacaaggcctacgaccagcagctcaaggccggagacaacccgtacctcaagtacaaccacgccgacgccgagttccaggagcggctcaaagaagatacgtcttttgggggcaacctcgggcgagcagtcttccaggccaaaaagaggcttcttgaacctcttggtctggttgaggaagcggctaagacggctcctggaaagaagaggcctgtagagcagtctcctcaggaaccggactcctccgcgggtattggcaaatcgggtgcacagcccgctaaaaagagactcaatttcggtcagactggcgacacagagtcagtcccagaccctcaaccaatcggagaacctcccgcagccccctcaggtgtgggatctcttacaatggcttcaggtggtggcgcaccagtggcagacaataacgaaggtgccgatggagtgggtagttcctcgggaaattggcattgcgattcccaatggctgggggacagagtcatcaccaccagcacccgaacctgggccctgcccacctacaacaatcacctctacaagcaaatctccaacagcacatctggaggatcttcaaatgacaacgcctacttcggctacagcaccccctgggggtattttgacttcaacagattccactgccacttctcaccacgtgactggcagcgactcatcaacaacaactggggattccggcctaagcgactcaacttcaagctcttcaacattcaggtcaaagaggttacggacaacaatggagtcaagaccatcgccaataaccttaccagcacggtccaggtcttcacggactcagactatcagctcccgtacgtgctcgggtcggctcacgagggctgcctcccgccgttcccagcggacgttttcatgattcctcagtacgggtatctgacgcttaatgatggaagccaggccgtgggtcgttcgtccttttactgcctggaatatttcccgtcgcaaatgctaagaacgggtaacaacttccagtttagctacgagtttgagaacgtacctttccatagcagctacgctcacagccaaagcctggaccgactaatgaatccactcatcgaccaatacttgtactatctctcaaagactattaacggttctggacagaatcaacaaacgctaaaattcagtgtggccggacccagcaacatggctgtccagggaagaaactacatacctggacccagctaccgacaacaacgtgtctcaaccactgtgactcaaaacaacaacagcgaatttgcttggcctggagcttcttcttgggctctcaatggacgtaatagcttgatgaatcctggacctgctatggccagccacaaagaaggagaggaccgtttctttcctttgtctggatctttaatttctggcaaacaaggaactggaagagacaacgtggatgcgaacaaagtcatgataaccaacgaagaagaaattaaaactactaacccggtagcaacggagtcctatggacaagtggccacaaaccaccagagtgcccaagcacaggcgcagaccggctgggttcaaaaccaaggaatacttccgggtatggtttggcaggacagagatgtgtacctgcaaggacccatttgggccaaaattcctcacacggacggcaactttcacccttctccgctgatgggagggtttgaaatgaagcacccgcctcctcagatcctcatcaaaaacacacctgtacctgcggatcctccaacggccttcaacaaggacaagctgaactctttcatcacccagtattctactggccaagtcagcgtggagatcgagtgggagctgcagaaggaaaacagcaagcgctggaacccggagatccagtacacttccaactattacaagtctaataatgttgaatttgctgttaatactgaaggtgtatatagtgaaccccgccccattggcaccagatacctgactcgtaatctg

SEQ ID NO: 641 - DNA, 2208 bp, Artificial Sequence
  Description of Artificial Sequence: Synthetic polynucleotide
atggctgccgatggttatcttccagattggctcgaggacaaccttagtgaaggaattcgcgagtggtgggctttgaaacctggagcccctcaacccaaggcaaatcaacaacatcaagacaacgctcgaggtcttgtgcttccgggttacaaataccttggacccggcaacggactcgacaagggggagccggtcaacgcagcagacgcggcggccctcgagcacgacaaggcctacgaccagcagctcaaggccggagacaacccgtacctcaagtacaaccacgccgacgccgagttccaggagcggctcaaagaagatacgtcttttgggggcaacctcgggcgagcagtcttccaggccaaaaagaggcttcttgaacctcttggtctggttgaggaagcggctaagacggctcctggaaagaagaggcctgtagagcagtctcctcaggaaccggactcctccgcgggtattggcaaatcgggtgcacagcccgctaaaaagagactcaatttcggtcagactggcgacacagagtcagtcccagaccctcaaccaatcggagaacctcccgcagccccctcaggtgtgggatctcttacaatagcttcaggtggtggcgcaccagtggcagacaataacgaaggtgccgatggagtgggtagttcctcgggaaattggcattgcgattcccaatggctgggggacagagtcatcaccaccagcacccgaacctgggccctgcccacctacaacaatcacctctacaagcgaatctccaacagcacatctggaggatcttcaaatgacaacgcctacttcggctacagcaccccctgggggtattttgacttcaacagattccactgccacttctcaccacgtgactggcagcgactcatcaacaacaactggggattccggcctaagcgactcaacttcaagcttttcaacattcgggtcaaagaggttacggacaacaatggagtcaagaccatcaccaataaccttaccagcacggtccaggtcttcacggactcagactatcagctcccgtacgtgcttgggtcggctcacgagggctgcctcccgccgttcccagcggacgttttcatgattcctcagtacgggtatctgacgcttaatgatggaagccaggccgtgggtcgttcgtccttttactgcctggaatatttcccgtcgcaaatgctaagaacgggtaacaacttccagttcagctacgagtttgagaacgtacctttccatagcagctacgctcacagccaaagcctggaccgactaatgaatccactcatcgaccaatacttgtactatctctcaaagactattaacggttctggacagaatcaacaaacgctaaaattcagtgtggccggacccagcaacatggctgtccagggaagaaactacatacctggacccagctaccgacaacaacgtgtctcaaccactgtgactcgaaacaacaacagcgaatttgcttggcctggagcttcttcttgggctctcaatggacgtaatagcttgatgaatcctggacctgctatggccagccacaaagaaggagaggaccgtttctttcctttgtctggatctttaatttttggcaaacaaggaactggaagagacaacgtggatgcggacaaagtcatgataaccaacgaagaagaaattaaaactactaacccggtagcaacggagtcctatggacaagtggccacaaaccaccagagtgcccaagcacaggcgcagaccggctgggttcaaaaccaaggaatacttccgggtatggtttggcaggacagagatgtgtacctgcaaggacccatttgggccaaaattcctcacacggacggcaactttcacccttctccgctgatgggagggtttggagtgaagcacccgcctcctcagatcctcatcaaaaacacacctgtacctgcggatcctccaacggccttcaacaaggacaagctgaactctttcatcacccagtattctactggccaagtcagcgtggagatcgagtgggagctgcagaaggaaaacagcaagcgctggaacccggagatccagtacacttccaactattacaagtctaataatgttgaatttgctgttaatactgaaggtgtatatagtgaaccccgccccattggcaccagatacctgactcgtaatctg

SEQ ID NO: 642 - DNA, 2208 bp, Artificial Sequence
  Description of Artificial Sequence: Synthetic polynucleotide
atggctgccgatggttatcttccagattggctcgaggacaaccttagtgaaggaattcgcgagtggtgggctttgaaacctggagcccctcaacccaaggcaaatcaacaacatcaagacaacgctcgaggtcttgtgcttccgggttacaaataccttggacccggcaacggactcgacaagggggagccggtcaacgcagcagacgcggcggccctcgagcacgacaaggcctacgaccagcagctcaaggccggagacaacccgtacctcaagtacaaccacgccgacgccgagttccaggagcggctcaaagaagatacgtcttttgggggcaacctcgggcgagcagtcttccaggccaaaaagaggcttcttgaacctcttggtctggttgaggaagcggctaagacggctcctggaaagaagaggcctgtagagcagtctcctcaggaaccggactcctccgcgggtattggcaaatcgggcgcacagcccgctaaaaagagactcaatttcggtcagactggcgacacagagccagtcccagaccctcaaccaatcggagaacctcccgcagccccctcaggtgtgggatctcttacaatggcttcaggtggtggcgcaccagtggcagacaataacgaaggtgccgatggagtgggtagttcctcgggaaattggcattgcgattcccaatggctgggggacagagtcatcaccaccagcacccgaacctgggccctgcccacctacaacaatcacctctacaagcaaatctccaacagcacatctggaggatcttcaaatgacaacgcctacttcggctacagcaccccctgggggtattttgacttcaacagattccactgccacttctcaccacgtgactggcagcgactcatcaacaacaactggggattccggcctaagcgactcaacttcaagctcttcaacattcaggtcaaagaggttacggacaacaatggagtcaagaccatcgccaataaccttaccagcacggtccaggtcttcacggactcagactatcagctcccgtacgtgctcgggtcggctcacgagggctgcctcccgccgttcccagcgggcgttttcatgattcctcagtacgggtatctgacgcttaatgatggaagccaggccgtgggtcgttcgtccttttactgcctggaatatttcccgtcgcaaatgctaagaacgggtaacaacttccagttcagctacgagtttgagaacgtacctttccatagcagctacgctcacagccaaagcctggaccgactaatgaatccactcatcgaccaatacttgtactatctctcaaagactattaacggttctggacagaatcaacaaacgctaaaattcagtgtggccggacccagcaacatggctgtccagggaagaaactacatacctggacccagctaccgacaacaacgtgtctcaaccactgcgactcaaaacaacaacagcgaatttgcttggcctggagcttcttcttgggctctcaatggacgtaatagcttgatgaatcctggacctgctatggccagccacaaagaaggagaggaccgtttctttcctttgtctggatctttaatttttggcaaacaaggaactggaagagacaacgtggatgcggacaaagtcatgataaccaacgaagaagaaattaaaactactaacccggtagcaacggagtcctatggacaagtggccacaaaccaccagagtgcccaagcacaggcgcagaccggctgggttcaaaaccaaggaatacttccgggtatggtttggcaggacagagatgtgtacctgcaaggacccatttgggccaaaattcctcacacggacggcaactttcacccttctccgctgatgggagggtttggaatgaagcacccgcctcctcagatcctcatcaaaaacacacctgtacctgcggatcctccaacggccttcaacaaggacaagctgaactctttcatcacccagtattctactggccaagtcagcgtggagatcgagtgggagctgcagaaggaaaacagcaagcgctggaacccggagatccagtacacttccaactattacaagtctaataatgttgaatttgctgttaatactgaaggtgtatatagtgaaccccgccccattggcaccagatacctgactcgtaatctg

SEQ ID NO: 643 - DNA, 2208 bp, Artificial Sequence
  Description of Artificial Sequence: Synthetic polynucleotide
atggctgccgatggttatcttccagattggctcgaggacaaccttagtgaaggaattcgcgagtggtgggctttgaaacctggagcccctcaacccaaggcaaatcaacaacatcaagacaacgctcgaggtcttgtgcttccgggttacaaataccttggacccggcaacggactcgacaagggggagccggtcaacgcagcagacgcggcggccctcgagcacgacaaggcctacgaccagcagctcaaggccggagacaacccgtacctcaagtacaaccacgccgacgccgggttccaggagcggctcaaagaagatacgtcttttgggggcaacctcgggcgagcagtcttccaggccaaaaagaggcttcttgaacctcttggtctggttgaggaagcggctaagacggctcctggaaagaagaggcctgtagagcagtctcctcaggaaccggactcctccgcgggtattggcaaatcgggtgcacagcccgctaaaaagagactcaatttcggtcagactggcgacacagagtcagtcccagtccctcaaccaatcggagaacctcccgcagccccctcaggtgtgggatctcttacaatggcttcaggtggtggcgcaccagtggcagacaataacgaaggtgccgatggagtgggtagttcctcgggaaattggcattgcgattcccaatggctgggggacagagtcatcaccaccagcacccgaacctgggccctgcccacctacaacaatcacctctacaagcaaatctccaacagcacatctggaggatcttcaaatgacaacgcctacttcggctacagcaccccctgggggtattttgacttcaacagattccactgccacttctcaccacgtgactggcagcgactcatcaacaacaactggggattccggcctaagcgactcaacttcaagctcttcaacattcaggtcaaagaggttacggacaacaatggagtcaagaccatcgccaataaccttaccagcacggtccaggtcttcacggactcagactatcagctcccgtacgtgctcgggtcggctcacgagggctgcctcccgccgttcccagcggacgttttcatgattcctcagtacgggtatctgacgcttaatgatggaagccaggccgtgggtcgttcgtccttttactgcctggaatatttcccgtcgcaaatgctaagaacgggtaacaacttccagttcagctacgagtttgagaacgtacctttccatagcagctacgctcacagccaaagcctggaccgactaatgaatccactcatcgaccaatacttgtactatctctcaaagactattaacggttctggacagaatcaacaaacgctaaaattcagtgtggccggacccagcaacatggctgtccagggaagaaactacatacctggacccagctaccgacaacaacgtgtctcaaccactgtgactcaaaacaacaacagcgaatttgcttggcctggagcttcttcttgggctctcaatggacgtaatagcttgatgaatcctggacctgctatggccagccacaaagaaggagaggaccgtttctttcctttgtctggatctttaatttttggcaaacaaggagctggaagagacaacgtggatgcggacaaagtcatgataaccaacgaagaagaaattaaaactactaacccggtagcaacggagtcctatggacaagtggccacaaaccaccagagtgcccaagcacaggcgcagaccggctgggttcaaaaccaaggaatacttccgggtatggtttggcaggacagagatgtgtacctgcaaggacccatttgggccaaaattcctcacacggacggcaactttcacccttctccgctgatgggagggtttggaatgaagcacccgcctcctcagatcctcatcaaaaacacacctgtacctgcggatcctccaacggccttcaacaaggacaagctgaactctttcatcacccagtattctactggccaagtcagcgtggagatcgagtgggagctgcagaaggaaaacagcaagcgctggaacccggagatccagtacacttccaactattacaagtctaataatgttgaatttgctgttaatactgaaggtgtatatagtgaaccccgccccattggcaccagatacctgactcgtaatctg

SEQ ID NO: 644 - DNA, 2208 bp, Artificial Sequence
  Description of Artificial Sequence: Synthetic polynucleotide
  misc_feature (377)..(377): n is a, c, t, or g
atggctgccgatggttatcttccagattggctcgaggacaaccttagtgaaggaattcgcgagaggtgggctttgaaacctggagcccctcaacccaaggcaaatcaacaacatcaagacaacgctcgaggtcttgtgcttccgggttacaaataccttggacccggcaacggactcgacaagggggagccggtcaacgcagcagacgcggcggccctcgagcacgacaaggcctacgaccagcagctcaaggccggagacaacccgtacctcaagtacaaccacgccgacgccgagttccaggagcggctcaaagaagatacgtcttttgggggcaacctcgggcgagcagtcttccaggccaaaaagaggcttcntgaacctcttggtctggttgaggaagcggctaagacggctcctggaaagaagaggcctgtagagcagtctcctcaggaaccggactcctccgcgggtattggcaaatcgggtgcacagcccgctaaaaagagactcaatttcggtcagactggcgacacagagtcagtcccagaccctcaaccaatcggagaacctcccgcagccccctcaggtgtgggatctcttacaatggcttcaggtggtggcgcaccagtggcagacaataacgaaggtgccgatggagtgggtagttcctcggggaattggcattgcgattcccaatggctgggggacagagtcatcaccaccagcacccgaacctgggccctgcccacctacaacaatcacctctacaagcaaatctccaacagcacatctggaggatcttcaaatgacaacgcctacttcggctacagcaccccctgggggtattttgacttcaacagattccactgccacttctcaccacgtgactggcagcgactcatcaacaacaactggggattccggcctaagcgactcaacttcaagctcttcaacattcaggtcaaagaggttacggacaacaatggagtcaagaccatcgccaataaccttaccagcacggtccaggtcttcacggactcagactatcagctcccgtacgtgctcgggtcggctcacgagggctgcctcccgccgttcccagcggacgttttcatgattcctcagtacgggtatctgacgcttaatgatggaagccaggccgtgggtcgttcgtccttttactgcctggaatatttcccgtcgcaaatgctaagaacgggtaacaacttccagttcagctacgagtttgagaacgtacctttccatagcagctacgctcacagccaaagcccggaccgactaatgaatccactcatcgaccaatacttgtactatctctcaaagactattaacggttctggacagaatcaacaaacgctaaaattcagtgtggccggacccagcaacatggctgtccagggaagaaactacatacctggacccagctaccgacaacaacgtgtctcaaccactgtgactcaaaacaacaacagcgaatttgcttggcctggagcttcttcttgggctctcaatggacgtaatagcttgatgaatcctggacctgctatggccagccacaaagaaggagaggaccgtttctttcctttgtctggatctttaatttttggcaaacaaggaactggaagagacaacgtggatgcggacaaagtcatgataaccaacgaagaagaaattaaaactactaacccggtagcaacggagtcctatggacaagtggccacaaaccaccagagtgcccaagcacaggcgcagaccggctgggttcaaaaccaaggaatacttccgggtatggtttggcaggacagagatgtgtacctgcaaggacccatttgggccaaaattcctcacacggacggcaactttcacccttctccgctgatgggagggtttggagtgaagcacccgcctcctcagatcctcatcaaaaacacacctgtacctgcggatcctccaacggccttcaacaaggacaagctgaactctttcatcacccagtattctactggccaagtcagcgtggagatcgagtgggagctgcagaaggaaaacagcaagcgctggaacccggagatccagtacacttccaactattacaagtctaataatgttgaatttgctgttaatactgaaggtgtatatagtgaaccccgccccattggcaccagatacctgactcgtaatctg

SEQ ID NO: 645 - DNA, 2208 bp, Artificial Sequence
  Description of Artificial Sequence: Synthetic polynucleotide
atggctgccgatggttatcttccagattggctcgaggacaaccttagtgaaggaattcgcgagtggtgggctttgaaacctggagcccctcaacccaaggcaaatcaacaacatcaagacaacgctcgaggtcttgtgcttccgggttacaaataccttggacccggcaacggactcgacaagggggagccggtcaacgcagcagacgcggcggccctcgagcacgacaaggcctacgaccagcagctcaaggccggagacaacccgtacctcaagtacaaccacgccgacgccgagttccaggagcggctcaaagaagatacgtcttttgggggcaacctcgggcgagcagtcttccaggccaaaaagaggcttcttgaacctcttggtctggttgaggaagcggctaagacggctcctggaaagaagaggcctgtagagcagtctcctcaggaaccggactcctccgcgggtattggcaaatcgggtgcacagcccgctaaaaagagactcaatttcggtcagactggcgacacagagtcagtcccagaccctcaaccaatcggagaacctcccgcagccccctcaggtgtgggatctcttacaatggcttcaggtggtggcgcaccagtggcagacaataacgaaggtgccgatggagtgggtagttcctcgggaaattggcattgcgattcccaatggctgggggacagagtcatcaccaccagcacccgaacctgggccctgcccacctacaacaatcacctctacaagcaaatctccaacagcacatctggaggatcttcaaatgacaacgcctacctcggctacagcaccccctgggggtattttgacttcaacagattccactgccacttctcaccacgtgactggcagcgactcatcaacaacaactggggattccggcctaagcgactcaacttcaagctcttcaacattcaggtcaaagaggttacggacaacaatggagtcaagaccatcgccaataaccttaccagcacggtccaggtcttcacggactcagactatcagctcccgtacgtgctcgggtcggctcacgagggctgcctcccgccgttcccagcggacgttttcatgattcctcagtacgggtatctgacgcttaatgatggaagccaggccgtgggtcgttcgtccttttactgcctggaatatttcccgtcgcaaatgctaagaacgggtaacaacttccagttcagctacgagtttgagaacgtacctttccatagcagctacgctcacagccaaagcctggaccgactaatgaatccactcatcgaccaatacttgtactatctctcaaagactattaacggttctggacagaatcaacaaacgctaaaattcagtgtggccggacccagcaacatggctgtccagggaagaaactacatacctggacccagctaccgacaacaacgtgtctcaaccactgtgactcaaaacaacaacagcgaatttgcttggcctggagcttcttcttgggctctcaatggacgtaatagcttgatgaatcctggacctgctatggccagccacaaagaaggagaggaccgtttctttcctttgtctggatctttaatttttggcaaacaaggaactggaagagacaacgtggatgcggacaaagtcatgataaccaacgaagaagaaattaaaactactaacccggtagcaacggagtcctatggacaagtggccacaaaccaccagagtgcccaagcacaggcgcagaccggctgggttcaaaaccaaggaatacttccgggtatggtttggcaggacagagatgtgtacctgcaaggacccatttgggccaaaattcctcacacggacggcaactttcacccttctccgctgatgggagggtttggaatgaagcacccgcctcctcagatcctcatcaaaaacacacctgtacctgcggatcctccaacggccttcaacaaggacaagctgaactctttcatcacccagtattctactggccaagtcagcgtggagatcgagtgggagctgcagaaggaaaacagcaagcgctggaacccggagatccagtacacttccaactattacaagtctaataatgttgaatttgctgttaatactgaaggtgtatatagtgaaccccgccccattggcaccagatacctgactcgtaatctg

SEQ ID NO: 646 - DNA, 2208 bp, Artificial Sequence
  Description of Artificial Sequence: Synthetic polynucleotide
atggctgccgatggttatcttccagattggctcgaggacaaccttagtgaaggaattcgcgagtggtgggctttgaaacctggagcccctcaacccaaggcaaatcaacaacatcaagacaacgctcgaggtcttgtgcttccgggttacaaataccttggacccggcaacggactcgacaagggggagccggtcaacgcagcagacgcggcggccctcgagcacgacaaggcctacgaccagcagctcaaggccggagacaacccgtacctcaagtacaaccacgccgacgccgagttccaggagcggctcaaagaagatacgtcttttgggggcaacctcgggcgagcagtcttccaggccaaaaagaggcttcttgaacctcttggtctggttgaggaagcggctaagacggctcctggaaagaagaggcctgtagagcagtctcctcaggaaccggactcctccgcgggtattggcaaatcgggtgcacagcccgctaaaaagagactcaatttcggtcagactggcgacacagagtcagtcccagaccctcaaccaatcggagaacctcccgcagccccctcaggtgtgggatctcttacaatggcttcaggtggtggcgcaccagtggcagacaataacgaaggtgccgatggagtgggtagttcctcgggaaattggcattgcgattcccaatggctgggggacagagtcatcaccaccagcacccgaacctgggccctgcccacctacaacaatcacctctacaagcaaatctccaacagcacatctggaggatcttcaaatgacaacgcctacttcggctacagcaccccctgggggtattttgacttcaacagattccactgccacttctcaccacgtgactggcagcgactcatcaacaacaactggggattccggcctaagcgactcaacttcaagctcttcaacattcaggtcaaagaggttacggacaacaatggagtcaagaccatcgccaataaccttaccagcacggtccaggtcttcacggactcagactatcagctcccgtacgtgctcgggtcggctcacgagggctgcctcccgccgttcccagcggacgttttcatgattcctcagtacgggtatctgacgcttaatgatggaagccaggccgtgggtcgttcgtccttttactgcctggaatatttcccgtcgcaaatgctaagaacgggtaacaacttccagttcagctacgagtttgagaacgtacctttccatagcagctacgctcacagccagagcctggaccgactaatgaatccactcatcgaccaatacttgtactatctctcaaagactattaacggttctggacagaatcaacaaacgctaaaattcagtgtggccggacccagcaacatggctgtccagggaagaaactacatacctggacccagctaccgacaacaacgtgtctcaaccactgtgactcaaaacaacaacagcgaatttgcttggcctggagcttcttcttgggctctcaatggacgtaatagcttgatgaatcctggacctgctatggccagccacaaagaaggagaggaccgtttctttcctttgtctggatctttaatttttggcaaacaaggaactggaagagacaacgtggatgcggacaaagtcatgataaccaacgaagaagaaattaaaactactaacccggtagcaacggagtcctatggacaagtggccacaaaccaccagagtgcccaagcacaggcgcagaccggctgggttcaaaaccaaggaatacttccgggtatggtttggcaggacagagatgtgtacctgcaaggacccatttgggccaaaattcctcacacggacggcaactttcacccttctccgctgatgggagggtttggaatgaagcacccgcctcctcagatcctcatcaaaaacacacctgtacctgcggatcctccaacggccttcaacaaggacaagctggactctttcatcacccagtattctactggccaagtcagcgtggagatcgagtgggagctgcagaaggaaaacagcaagcgctggaacccggtgatccagtacacttccaactattacaagtctaataatgttgaatttgctgttaatactgaaggtgtatatagtgaaccccgccccattggcaccagatacctgactcgtaatctg

SEQ ID NO: 647 - DNA, 2208 bp, Artificial Sequence
  Description of Artificial Sequence: Synthetic polynucleotide
atggctgccgatggttatcttccagattggctcgaggacaacctctctgagggcattcgcgagtggtgggacttgaaacctggagccccgaagcccaaagccaaccagcaaaagcaggacgacggccggggtctggtgcttcctggctacaagtacctcggacccttcaacggactcgacaagggggagcccgtcaacgcggcggacgcagcggccctcgagcacgacaaggcctacgaccagcagctcaaagcgggtgacaatccgtacctgcggtataaccacgccgacgccgagtttcaggagcgtctgcaagaagatacgtcttttgggggcaacctcgggcgagcagtcttccaggccaagaagcgggttctcgaacctctcggtctggttgaggaaggcgctaagacggctcctggaaagaaacgtccggtagagcagtcgccacaagagccagactcctcctcgggcatcggcaagacaggccagcagcccgctaaaaagagactcaattttggtcagactggcgactcagagtcagtccccgatccacaacctctcggagaacctccagcaacccccgctgctgtggggcctactacaatggcttcaggcggtggcgcaccaatggcagacaataacgaaggcgtcgacggagtgggtaatgcctcaggaaattggcattgcgattccacatggctgggcgacagagtcatcaccaccagcacccgcacctgggccttgcccacctacaataaccacctctacaagcaaatctccagtgcttcaacgggggccagcaacgacaaccactacttcggctacagcaccccctgggggtattttgatttcaacagattccactgccacttttcaccacgtgactggcagcgactcatcaacaacaattggggattccggcccaagagactcaacttcaaactcttcaacatccaagtcaaggaggtcacgacgaatgatggcgttacaaccatcgctaataaccttaccagcacggttcaagtcttctcggactcggagtaccagcttccgtacgtcctcggctctgcgcaccagggctgcctccctccgttcccggcggacgtgttcatgattccgcaatacggctacctgacgctcaacaatggcagccaagccgtgggacgttcatccttttactgcctggaatatttcccttctcagatgctgagaacgggcaacaactttaccttcagctacacctttgaggaagtgcctttccacagcagctacgcgcacagccagagcctggaccggctgatgaatcctctcatcgaccaatacctgtattacctgaacagaactcaaaatcagtccggaagtgcccaaaacaaggacttgctgtttagccgtgggtctccagctggcatgtctgttcagcccaaaaactggctacctggaccctgttatcggcagcagcgcgtttctaaaacaaaaacagacaacaacaacagcaattttacctggactggtgcttcaaaatataacctcaatgggcgtgaatccatcatcaaccctggcactgctatggcctcacacaaagacgacgaagacaagttctttcccatgagcggtgtcatgatttttggaaaagagagcgccggagcttcaaacactgcattggacaatgtcatgattacagacgaagaggaaattaaagccactaaccctgtggccaccgaaagatttgggaccgtggcagtcaatttccagagcagcagcacagaccctgcgaccggagatgtgcatgctatgggagcattacctggcatggtgtggcaagatagagacgtgtacctgcagggtcccatttgggccaaaattcctcacacagatggacactttcacccgtctcctcttatgggcggctttggactcaagaacccgcctcctcagatcctcatcaaaaacacgcctgttcctgcgaatcctccggcggagttttcagccacaaagcttgcttcattcatcacccaatactccacaggacaagtgagtgtggaaattgaatgggagctgcagaaagaaaacagcaagcgctggaatcccgaagtgcagtacacatccaattatgcaaaatctgccaacgttgattttactgtggacaacaatggactttatactgagcctcgccccattggcacccgttaccttacccgtcccctg

SEQ ID NO: 648 - DNA, 2208 bp, Artificial Sequence
  Description of Artificial Sequence: Synthetic polynucleotide
atggctgccgatggttatcttccagattggctcgaggacaacctctctgagggcattcgcgagtggtgggacttgaaacctggagccccgaagcccaaagccaaccagcaaaagcaggacgacggccggggtctggtgcttcctggctacaagtacctcggacccttcaacggactcgacaagggggagcccgtcaacgcggcggacgcagcggccctcgagcacgacaaggcctacgaccagcagctcaaagcgggtgacaatccgtacctgcggtataaccacgccgacgccgagtttcaggagcgtctgcaagaagatacgtcttttgggggcaacctcgggcgagcagtcttccaggccaagaagcgggttctcgaacctctcggtctggttgaggaaggcgctaagacggctcctggaaagagacgtccggtagagcagtcgccacaagagccagactcctcctcgggcatcggcaagacaggccagcagcccgctaaaaagagactcaattttggtcagactggcgactcagagtcagtccccgatccacaacctctcggagaacctccagcaacccccgctgctgtgggacctactacaatggcttcaggcggtggcgcaccaatggcagacaataacgaaggcgccgacggagtgggtaatgcctcaggaaattggcattgcgattccacatggctgggcgacagagtcatcaccaccagcacccgcacctgggccttgcccacctacaataaccacctctacaagcaaatctccagtgcttcaacgggggccagcaacgacaaccactacttcggctacagcaccccctgggggtattttgatttcaacagattccactgccacttttcaccacgtgactggcagcgactcatcaacaacaattggggattccggcccaagagactcaacttcaaactcttcaacatccaagtcaaggaggtcacgacgaatgatggcgtcacaaccatcgctaataaccttaccagcacggttcaagtcttctcggactcggagtaccagcttccgtacgtcctcggctctgcgcaccagggctgcctccctccgttcccggcggacgtgttcatgattccgcaatacggctacctgacgctcaacaatggcagccaagccgtgggacgttcatccttttactgcctggaatatttcccttctcagatgctgagaacgggcaacaactttaccttcagctacacctttgaggaagtgcctttccacagcagctacgcgcacagccagagcctggaccggctgatgaatcctctcatcgaccaatacctgtattacctgaacagaactcaaaatcagtccggaagtgcccaaaacaaggacttgctgtttagccgtgggtctccagctggcatgtctgttcagcccaaaaactggctacctggaccctgttatcggcagcagcgcgtttctaaaacaaaaacagacaacaacaacagcaattttacctggactggtgcttcaaaatataacctcaatgggcgtgaatccatcatcaaccctggcactgctatggcctcacacaaagacgacgaagacaagttctttcccatgagcggtgtcatgatttttggaaaagagagcgccggagcttcaaacactgcattggacaatgtcatgattacagacgaagaggaaattaaagccactaaccctgtggccaccgaaagatttgggaccgtggcagtcaatttccagagcagcagcacagaccctgcgaccggagatgtgcatgctatgggagcattacctggcatggtgtggcaagatagagacgtgtacctgcagggtcccatttgggccaaaattcctcacacagatggacactttcacccgtctcctcttatgggcggctttggactcaagaacccgcctcctcagatcctcatcaaaaacacgcctgttcctgcgaatcctccggcggagttttcagctacaaagtttgcttcgttcatcacccaatactccacaggacaagtgagtgtggaaattgaatgggagctgcagaaagaaaacagcaagcgctggaatcccgaagtgcagtacacatccaattatgcaaaatctgccaacgttgattttactgtggacaacaatggactttatactgagcctcgccccattggcacccgttaccttacccgtcccctg

SEQ ID NO: 649 - DNA, 2208 bp, Artificial Sequence
  Description of Artificial Sequence: Synthetic polynucleotide
atggctgccgatggttatcttccagattggctcgaggacaacctctctgagggcattcgcgagtggtgggacttgaaacctggagccccgaagcccaaagccaaccagcaaaagcaggacgacggccggggtctggtgcttcctggctacaagtacctcggacccttcaacggactcgacaagggggagcccgtcaacgcggcggacgcagcggccctcgagcacgacaaggcctacgaccagcagctcaaagcgggtgacaatccgtacccgcggtataaccacgccgacgccgagtttcaggagcgtctgcaagaagatacgtcttttgggggcaacctcgggcgagcagtcttccaggccaagaagcgggttctcgaacctctcggtctggttggggaaggcgctaagacggctcctggaaagaaacgtccggtagagcagtcgccacaagagccagactcctcctcgggcatcggcaagacaggccagcagcccgctaaaaagagactcaattttggtcagactggcgactcagagtcagtccccgatccacaacctctcggagaacctccagcaacccccgctgctgtgggacctactacaatggcttcaggcggtggcgcaccaatggcagacaataacgaaggcgccgacggagtgggtaatgcctcaggaaattggcattgcgattccacatggctgggcgacagagtcatcaccaccagcacccgcacctgggccttgcccacctacaataaccacctctacaagcaaatctccagtgcttcaacgggggccagcaacgacaaccactacttcggctacagcaccccctgggggtattttgatttcaacagattccactgccacttttcaccacgtgactggcagcgactcatcaacaacaattggggattccggcccaagagactcaacttcaaactcttcaacatccaagtcaaggaggtcacgacgaatgatggcgtcacaaccatcgctaataaccttaccagcacggttcaagtcttctcggactcggagtaccagcttccgtacgtcctcggctctgcgcaccagggctgcctccctccgttcccggcggacgtgttcatgattccgcaatacggctacctgacgctcaacaatggcagccaagccgtgggacgttcatccttttactgcctggaatatttcccttctcagatgctgagaacgggcaacaactttaccttcagctacacctttgaggaagtgcctttccacagcagctacgcgcacagccagagcctggaccggctgatgaatcctcccatcgaccaatacctgtattacctgaacagaactcaaaatcagtccggaagtgcccaaaacaaggacttgctgtttagccgtgggtctccagctggcatgtctgttcagcccaaaaactggctacctggaccctgttatcggcagcagcgcgtttctaaaacaaaaacagacaacaacaacagcaattttacctggactggtgcttcaaaatataacctcaatgggcgtgaatccatcatcaaccctggcactgctatggcctcacacaaagacgacgaagacaagttctttcccatgagcggtgtcatgatttttggaaaagagagcgccggagcttcaaacactgcattggacaatgtcatgattacagacgaagaggaaattaaagccactaaccctgtggccaccgaaagatttgggaccgtggcagtcaatttccagagcagcagcacagaccctgcgaccggagatgtgcatgctatgggagcattacctggcatggtgtggcaagatagagacgtgtacctgcagggtcccatttgggccaaaattcctcacacagatggacactttcacccgtctcctcttatgggcggctttggactcaagaacccgcctcctcagatcctcatcaaaaacacgcctgttcctgcgaatcctccggcggagttttcagctacaaagtttgcttcattcatcacccaatactccacaggacaagtgagtgtggaaattgaatgggagctgcagaaagaaaacagcaagcgctggaatcccgaagtgcagtacacatccaattatgcaaaatctgccaacgttgattttactgtggacaacaatggactttatactgagcctcgccccattggcacccgttaccttacccgtcccctg

SEQ ID NO: 650 - DNA, 2208 bp, Artificial Sequence
  Description of Artificial Sequence: Synthetic polynucleotide
atggctgccgatggttatcttccagattggctcgaggacaacctctctgagggcattcgcgagtggtgggacttgaaacctggagccccgaagcccaaagccaaccagcaaaagcaggacgacggccggggtctggtgcttcctggctacaagtacctcggacccttcaacggactcgacaagggggagcccgtcaacgcggcggacgcagcggccctcgagcacgacaaggcctacgaccagcagctcaaagcgggtgacaatccgtacctgcggtataaccacgccgacgccgagtttcaggagcgtctgcaagaagatacgtcttttgggggcaacctcgggcgagcagtcttccaggccaagaagcgggttctcgaacctctcggtctggttgaggaaggcgctaagacggctcctggaaagaaacgtccggtagagcagtcgccacaagagccagactcctcctcgggcatcggcaagacaggccagcagcccgctaaaaagagactcaattttggtcagactggcgactcagagtcagtccccgatccacgacctctcggagaacctccagcaacccccgctgctgtgggacctactacaatggcttcaggcggtggcgcaccaatggcagacaataacgaaggcgccgacggagtgggtaatgcctcaggaaattggcattgcgattccacatggctgggcgacagagtcatcaccaccagcacccgcacctgggccttgcccacctacaataaccacctctacaagcaaatctccagtgcttcaacgggggccagcaacgacaaccactacttcggctacagcaccccctgggggtattttgatttcaacagattccactgccacttttcaccacgcgactggcagcgactcatcaacaacaattggggattccggcccaagagactcaacttcaaactcttcaacatccaagtcaaggaggtcacgacgaatgatggcgtcacaaccatcgctaataaccttaccagcacggttcaagtcttctcggactcggagtaccagcttccgtacgtcctcggctctgcgcaccagggctgcctccctccgttcccggcggacgtgttcatgattccgcaatacggctacctgacgctcaacaatggcagccaagccgtgggacgttcatccttttactgcctggaatatttcccttctcagatgctgagaacgggcaacaactttaccttcagctacacctttgaggaagtgcctttccacagcagctacgcgcacagccagagcctggaccggctgatgaatcctctcatcgaccaatacctgtattacctgaacagaactcaaaatcagtccggaagtgcccaaaacaaggacttgctgtttagccgtgggcctccagctggcatgtctgttcagcccaaaaactggctacctggaccctgttatcggcagcagcgcgtttctaaaacaaaaacagacaacaacaacagcaattttacctggactggtgcttcaaaatataacctcaatgggcgtgaatccatcatcaaccctggcactgctatggcctcacacaaagacgacgaagacaagttctttcccatgagcggtgtcatgatttttggaaaagagagcgccggagcttcaaacactgcattggacaatgtcatgattacggacgaagaggaaattaaagccactaaccctgtggccaccgaaagatttgggaccgtggcagtcaatttccagagcagcagcacagaccctgcgaccggagatgtgcatgctatgggagcattacctggcatggtgtggcaagatagagacgtgtacctgcagggtcccatttgggccaaaattcctcacacagatggacactttcacccgtctcctcttatgggcggctttggactcaagaacccgcctcctcagatcctcatcaaaaacacgcctgttcctgcgaatcctccggcggagttttcagctacaaagtttgcttcattcatcacccaatactccacaggacaagtgagtgtggaaattgaatgggagctgcagaaagaaaacagcaagcgctggaatcccgaagtgcagtacacatccaattatgcaaaatctgccaacgttgattttactgtggacaacaatggactttatactgagcctcgccccattggcacccgttaccttacccgtcccctg

SEQ ID NO: 651 - DNA, 2208 bp, Artificial Sequence
  Description of Artificial Sequence: Synthetic polynucleotide
atggctgccgatggttatcttccagattggctcgaggacaacctctctgagggcattcgcgagtggtgggacttgaaacctggagccccgaagcccaaagccaaccagcaaaagcaggacgacggccggggtctggtgcttcctggctacaagtacctcggacccttcaacggactcgacaagggggagcccgtcaacgcggcggacgcagcggccctcgagcacgacaaggcctacgaccagcagctcaaagcgggtgacaatccgtacctgcggtataaccacgccgacgccgagtttcaggagcgtctgcaagaagatacgtcttttgggggcaacctcgggcgagcagtcttccaggccaagaagcgggttctcgaacctctcggtctggttgaggaaggcgctaagacggctcctggaaagaaacgtccggtagagcagtcgccacaagagccagactcctcctcgggcatcggcaagacaggccagcagcccgctaaaaagagactcaattttggtcagactggcggctcagagtcagtccccgatccacaacctctcggagaacctccagcaacccccgctgctgtgggacctactacaatggcttcaggcggtggcgcaccaatggcagacaataacgaaggcgccgacggagtgggtaatgcctcaggaaattggcattgcgattccacatggctgggcgacagagtcatcaccaccagcacccgcacctgggccttgcccacctacaataaccacctctacaagcaaatctccagtgcttcaacgggggccagcaacgacaaccactacttcggctacagcaccccctgggggtattttgatttcaacagattccactgccacttttcaccacgtgactggcagcgactcatcaacaacaattggggattccggcccaagagactcaacttcaaactcttcaacatccaagtcaaggaggtcacgacgaatgatggcgtcacaaccatcgctaataaccttaccagcacggttcaagtcttctcggactcggagtaccagcttccgtacgtcctcggctctgcgcaccagggctgcctccctccgttcccggcggacgtgttcatgattccgcaatacggctacctgacgctcaacaatggcagccaagccgtgggacgttcatccttttactgcctggaatatttcccttctcagatgctgagaacgggcaacaactttaccttcagctacacctttgaggaagtgcctttccacagcagctacgcgcacagccagagcctggaccggctgatgaatcctcccatcgaccaatacctgtattacctgaacagaactcaaaatcagtccgggagtgcccaaaacaaggacttgctgtttagccgtgggtctccagctggcatgtctgttcagcccaaaaactggctacctggaccctgttatcggcagcagcgcgtttctaaaacaaaaacagacaacaacaacagcaattttacctggactggtgcttcaaaatataacctcaatgggcgtgaatccatcatcaaccctggcactgctatggcctcacacaaagacgacgaagacaagttctttcccatgagcggtgtcatgatttttggaaaagagagcgccggagcttcaaacactgcattggacaatgtcatgattacagacgaagaggaaattaaagccactaaccctgtggccaccgaaagatttgggaccgtggcagtcaatttccagagcagcagcacagaccctgcgaccggagatgtgcatgctatgggagcattacctggcatggtgtggcaagatagagacgtgtacctgcagggtcccatttgggccaaaattcctcacacagatggacactttcacccgtctcctcttatgggcggctttggactcaagaacccgcctcctcagatcctcatcaaaaacacgcctgttcctgcgaatcctccggcggagttttcagctacaaagtttgcttcattcatcacccaatactccacaggacaagtgagtgtggaaattgaatgggagctgcagaaagaaaacagcaagcgctggaatcccgaagtgcagtacacatccaattatgcaaaatctgccaacgttgactttactgtggacaacaatggactttatactgagcctcgccccattggcacccgttaccttacccgtcccctg

SEQ ID NO: 652 - DNA, 2208 bp, Artificial Sequence
  Description of Artificial Sequence: Synthetic polynucleotide
atggctgccgatggttatcttccagattggctcgaggacaacctctctgagggcattcgcgagtggtgggacttgaaacctggagccccgaagcccaaagccaaccagcaaaagcaggacgacggccggggtctggtgcttcctggctacaagtacctcggacccttcaacggactcgacaagggggagcccgtcaacgcggcggacgcagcggccctcgagcacgacaaggcctacgaccagcagctcaaagcgggtgacaatccgtacctgcggtataaccacgccgacgccgagtttcaagagcgtctgcaagaagatacgtcttttgggggcaacctcgggcgagcagtcttccaggccaagaagcgggttctcgaacctctcggtctggttgaggaaggcgctaagacggctcctggaaagaaacgtccggtagagcagtcgccacaagagccagactcctcctcgggcatcggcaagacaggccagcagcccgctaaaaagagactcaattttggtcagactggcgactcagagtcagtccccgatccgcaacctctcggagaacctccagcaacccccgctgctgtgggacctactacaatggcttcaggcggtggcgcaccaatggcagacaataacgaaggcgccgacggagtgggtaatgcctcaggaaattggcattgcgattccacatggctgggcgacagagtcatcaccaccagcacccgcacctgggccttgcccacctacaataaccacctctacaagcaaatctccagtgcttcaacgggggccagcaacgacaaccactacttcggctacagcaccccctgggggtattttgatttcaacagattccactgccacttttcaccacgtgactggcagcgactcatcaacaacaattggggattccggcccaagagactcaacttcaaactcttcaacatccaagtcaaggaggtcacgacgaatgatggcgtcacaaccatcgctaataaccttaccagcacggttcaagtcttctcggactcggagtaccagcttccgtacgtcctcggctctgcgcaccagggctgcctccctccgttcccggcggacgtgttcatgattccgcaatacggctacctgacgctcaacaatggcagccaagccgtgggacgttcatccttttactgcctggaatatttcccttctcagatgctgagaacgggcaacaactttaccttcagctacacctttgaggaagtgcctttccacagcagctacgcgcacagccagagcctggaccggctgatgaatcctctcatcgaccaatacctgtattacctgaacagaactcaaaatcagtccggaagtgcccaaaacaaggacttgctgtttagccgtgggtctccagctggcatgtctgttcagcccaaaaactggctacctggaccctgttatcggcagcagcgcgtttctaaaacaaaaacagacaacaacaacagcaattttacctggactggtgcttcaaaatataacctcaatgggcgtgaatccatcatcaaccctggcactgctgtggcctcacacaaagacgacgaagacaagttctttcccatgagcggtgtcatgatttttggaaaagagagcgccggagcttcaaacactgcattggacaatgtcatgattacagacgaagaggaaattaaagccactaaccctgtggccaccgaaagatttgggaccgtggcagtcaatttccagagcagcagcacagaccctgcgaccggagatgtgcatgctatgggagcattacctggcatggtgtggcaagatagagacgtgtacctgcagggtcccatttgggccaaaattcctcacacagatggacactttcacccgtctcctcttatgggcggctttggactcaagaacccgcctcctcagatcctcatcaaaaacacgcctgttcctgcgaatcctccggcggagttttcagctacaaagtttgcttcattcatcacccaatactccacaggacaagtgagtgtggaaattgaatgggagctgcagaaagaaaacagcaagcgctggaatcccgaagtgcagtacacatccaattatgcaaaatctgccaacgttgattttactgtggacaacaatggactttatactgagcctcgccccattggcacccgttaccttacccgtcccctg

SEQ ID NO: 653 - DNA, 2208 bp, Artificial Sequence
  Description of Artificial Sequence: Synthetic polynucleotide
atggctgccgatggttatcttccagattggctcgaggacaacctctctgagggcattcgcgagtggtgggacttgaaacctggagccccgaagcccaaagccaaccagcaaaagcaggacgacggccggggtctggtgcttcctggctacaagtacctcggacccttcaacggactcgacaagggggagcccgtcaacgcggcggacgcagcggccctcgagcacgacaaggcctacgaccagcagctcaaagcgggtgacaatccgtacctgcggtataaccacgccgacgccgagtttcaggagcgtctgcaagaagatacgtcttttgggggcaacctcgggcgagcagtcttccaggccaagaagcgggttctcgaacctctcggtctggttgaggaaggcgctaagacggctcctggaaagaaacgtccggtagagcagtcgccacaagagccagactcctcctcgggcatcggcaagacaggccagcagcccgctaaaaagagactcaattttggtcagactggcgactcagagtcagtccccgatccacaacctctcggagaacctccagcaacccccgctgctgtgggacctactacaatggcttcaggcggtggcgcaccaatggcagacaataacgaaggcgccgacggagtgggtaatgcctcaggaaattggcattgcgattccacatggctgggcgacagagtcatcaccaccagcacccgcacctgggccttgcccacctacaataaccacctctacaagcaaatctccagtgcttcaacgggggccagcaacgacaaccactacttcggctacagcaccccctgggggtattttgatttcaacagattccactgccacttttcaccacgtgactggcagcaactcatcaacaacaattggggattccggcccaagagactcaacttcaaactcttcaacatccaagtcaaggaggtcacgacgaatgatggcgtcacaaccatcgctaataaccttaccagcacggttcaagtcttctcggactcggagtaccagcttccgtacgtcctcggctctgcgcaccagggctgcctccctccgttcccggcggacgtgttcatgattccgcaatacggctacctgacgctcaacaatggcagccaagccgtgggacgttcatccttttactgcctggaatatttcccttctcagatgctgagaacgggcaacaactttaccttcagctacacctttgaggaagtgcctttccacagcagctacgcgcacagccagagcctggaccggctgatgaatcctctcatcgaccaatacctgtattacctgaacagaactcaaaatcagtccggaagtgcccaaaacaaggacttgctgtttagccgtgggtctccagctggcatgtctgttcagcccaaaaactggctacctggaccctgttatcggcagcagcgcgtttctaaaacaaaaacagacaacaacaacagcaattttacctggactggtgcttcaaaatataacctcaatgggcgtgaatccatcatcaaccctggcactgctatggcctcacacaaagacgacgaagacaagttctttcccatgagcggtgtcatgatttttggaaaagagagcgccggagcttcaaacactgcattggacaatgtcatgattacagacgaagaggaaattaaagccactaaccctgtggccaccgaaagatttgggaccgtggcagtcaatttccagagcaccagcacagaccctgcgaccggagatgtgcatgctatgggagcattacctggcatggtgtggcaagatagagacgtgtacctgcagggtcccatttgggccaaaattcctcacacagatggacactttcacccgtctcctcttatgggcggctttggactcaagaacccgcctcctcagatcctcatcaaaaacacgcctgttcctgcgaatcctccggcggagttttcagctacaaagtttgcttcattcatcacccaatactccacaggacaagtgagtgtggaaattgaatgggagctgcagaaagaaaacagcaagcgctggaatcccgaagtgcagtacacatccaattatgcaaaatctgccgacgttgattttactgtggacaacaatggactttatactgagcctcgccccattggcacccgttaccttacccgtcccctg

SEQ ID NO: 654 - DNA, 2208 bp, Artificial Sequence
  Description of Artificial Sequence: Synthetic polynucleotide
atggctgccgatggttatcttccagattggctcgaggacaacctctctgagggcattcgcgagtggtgggacttgaaacctggagccccgaagcccaaagccaaccagcaaaagcaggacgacggccggggtctggtgcttcctggctacaagtacctcggacccttcaacggactcgacaagggggagcccgtcaacgcggcggacgcagcggccctcgagcacgacaaggcctacgaccagcagctcaaagcgggtgacaatccgtacctgcggtataaccacgccgacgccgagtttcaagagcgtctgcaagaagatacgtcttttgggggcaacctcgggcgagcagtcttccaggccaagaagcgggttctcgaacctctcggtctggttgaggaaggcgctaagacggctcctggaaagaaacgtccggtagagcagtcgccacaagagccagactcctcctcgggcatcggcaagacaggccagcagcccgctaaaaagagactcaattttggtcagactggcgactcagagtcagtccccgatccgcaacctctcggagaacctccagcaacccccgctgctgtgggacctactacaatggcttcaggcggtggcgcaccaatggcagacaataacgaaggcgccgacggagtgggtaatgcctcaggaaattggcattgcgattccacatggctgggcgacagagtcatcaccaccagcacccgcacctgggccttgcccacctacaataaccacctctacaagcaaatctccagtgcttcaacgggggccagcaacgacaaccactacttcggctacagcaccccctgggggtattttgatttcaacagattccactgccacttttcaccacgtgactggcagcgactcatcaacaacaattggggattccggcccaagagactcaacttcaaactcttcaacatccaagtcaaggaggtcacgacgaatgatggcgtcacaaccatcgctaataaccttaccagcacggttcaagtcttctcggactcggagtaccagcctccgtacgtcctcggctctgcgcaccagggctgcctccctccgttcccggcggacgtgttcatgattccgcaatacggccacctgacgctcaacaatggcagccaagccgtgggacgttcatccttttactgcctggaatatttcccttctcagatgctgagaacgggcaacaactttaccttcagctacacctttgaggaagtgcctttccacagcagctacgcgcacagccagagcctggaccggctgacgaatcctctcatcgaccaatacctgtattacctgaacagaactcaaaatcagtccggaagtgcccaaaacaaggacttgctgtttagccgtgggtctccagctggcatgtctgttcagcccaaaaactggctacctggaccctgttatcggcagcagcgcgtttctaaaacaaaaacagacaacaacaacagcaattttacctggactggtgcttcaaaatataacctcaatgggcgtgaatccatcatcaaccctggcactgctatggcctcacacaaagacgacgaagacaagttctttcccatgagcggtgtcatgatttttggaaaagagagcgccggagcttcaaacactgcattggacaatgtcatgattacagacgaagaggaaattaaagccactaaccctgtggccaccgaaagatttgggaccgtggcagtcaatttccagagcagcagcacagaccctgcgaccggagatgtgcatgctatgggagcattacctggcatggtgtggcaagatagagacgtgtacctgcagggtcccatttgggccaaaattcctcacacagatggacactttcacccgtctcctcttatgggcggctttggactcaagaacccgcctcctcagatcctcatcaaaaacacgcctgttcctgcgaatcctccggcggagttttcagctacaaagtttgcttcattcatcacccaatactccacaggacaagtgagtgtggaaattgaatgggagctgcagaaagaaaacagcaagcgctggaatcccgaagtgcagtacacatccaattatgcaaaatctgccaacgttgattttactgtggacaacaatggactttatactgagcctcgccccattggcacccgttaccttacccgtcccctg

SEQ ID NO: 655 - DNA, 2208 bp, Artificial Sequence
  Description of Artificial Sequence: Synthetic polynucleotide
atggctgccgatggttatcttccagattggctcgaggacaacctctctgagggcattcgcgagtggtgggacttgaaacctggagccccgaagcccaaagccaaccagcaagagcaggacgacggccggggtctggtgcttcctggctacaagtacctcggacccttcaacggactcgacaagggggagcccgtcaacgcggcggacgcagcggccctcgagcacgacaaggcctacgaccagcagctcaaagcgggtgacaatccgtacctgcggtataaccacgccgacgccgagtttcaggagcgtctgcaagaagatacgtcttttgggggcaacctcgggcgagcagtcttccaggccaagaagcgggttctcgaacctctcggtctggttgaggaaggcgctaagacggctcctggaaagaaacgtccggtagagcagtcgccacaagagccagactcctcctcgggcatcggcaagacaggccagcagcccgctaaaaagagactcaattttggtcagactggcgactcagagtcagtccccgatccacaacctctcggagaacctccagcaacccccgctgctgtgggacctactacaatggcttcaggcggtggcgcaccaatggcagacaataacgaaggcgccgacggagtgggtaatgcctcaggaaattggcattgcgattccacatggctgggcgacagagtcatcaccaccagcacccgcacctgggccttgcccacctacaataaccacctctacaagcaaatctccagtgcttcaacgggggccagcaacgacaaccactacttcggctacagcaccccctgggggtattttgatttcaacagattccactgccacttttcaccacgtgactggcagcgactcatcaacaacaattggggattccggcccaagagactcaacttcaaactcttcaacatccaagtcaaggaggtcacgacgaatgatggcgtcacaaccatcgctaataaccttaccagcacggttcaagtcttctcggactcggagtaccagcttccgtacgtcctcggctctgcgcaccagggctgcctccctccgttcccggcggacgtgttcatgattccgcaatacggctacctgacgctcaacaatggcagccaagccgtgggacgttcatccttttactgcctggaatatttcccttctcagatgctgagaacgggcaacaactttaccttcagctacacctttgaggaagtgcctttccacagcagctacgcgcacagccagagcctggaccggctgatgaatcctctcatcgaccaatacctgtattacctgaacagaactcaaaatcagtccggaagtgcccaaaacaaggacttgctgtttagccgtgggtctccagctggcatgtctgttcagcccaaaaactggctacctggaccctgttatcggcagcagcgcgtttctaaaacaaaaacagacaacaacaacagcaattttacctggactggtgcttcaaaatataacctcaatgggcgtgaatccatcatcaaccctggcactgctatggcctcacacaaagacgacgaagacaagttctttcccatgagcggtgtcatgatttttggaaaagagagcgccggagcttcaaacactgcattggacaatgtcatgattacagacgaagaggaaattaaagccactaaccctgtggccaccgaaagatttgggaccgtggcagtcaatttccagagcagcagcacagaccctgcgaccggagatgtgcatgctacgggaacattacctggcatggtgtggcaagatagagacgtgtacctgcagggtcccatttgggccaaaattcctcacacagatggacactttcacccgtctcctcttatgggcggctttggactcaagaacccgcctcctcagatcctcatcaaaaccacgcctgttcctgcgaatcctccggcggagttttcagctacaaagtttgcttcattcatcacccagtactccacaggacaagtgagtgtggaaattgaatgggagctgcagaaagaaaacagcaagcgctggaatcccgaagtgcagtacacatccaattatgcaaaatctgccaacgttgattttactgtggacgacaatggactttatactgagcctcgccccattggcacccgttaccttacccgtcccctg

SEQ ID NO: 656 - DNA, 2208 bp, Artificial Sequence
  Description of Artificial Sequence: Synthetic polynucleotide
atggctgccgatggttatcttccagattggctcgaggacaacctctctgagggcattcgcgagtggtgggacttgaaacctggagccccgaagcccaaagccaaccagcaaaagcaggacgacggccggggtctggtgcttcctggctacaagtacctcggacccttcaacggactcgacaagggggagcccgtcaacgcggcggacgcagcggccctcgagcacgacaaggcctacgaccagcagctcaaagcgggtgacaatccgtacctgcggtataaccacgccgacgccgagtttcaggagcgtctgcaagaagatacgtcttttgggggcaacctcgggcgagcagtcttccaggccaagaagcgggttctcgaacctctcggtctggttgaggaaggcgctaagacggctcctggaaagaaacgtccggtagagcagtcgctacaagagccagactcctcctcgggcatcggcaagacaggccagcagcccgctaaaaagagactcaattttggtcagactggcgactcagagtcagtccccgatccacaacctctcggagaacctccagcaacccccgctgctgtgggacctactacaatggcttcaggcggtggcgcaccaatggcagacaataacgaaggcgccgacggagtgggtaatgcctcaggaaattggcattgcgattccacatggctgggcgacagagtcatcaccaccagcacccgcacctgggccttgcccacctacaataaccacctctacaagcaaatctccagtgcttcaacgggggccagcaacgacaaccactacttcggctacagcaccccctgggggtattttgatttcaacagattccactgccacttttcaccacgtgactggcagcgactcatcaacaacaattggggattccggcccaagagactcaacttcaaactcttcaacatccaagtcaaggaggtcacgacgaatgatggcgtcacaaccatcgctaataaccttaccagcacggttcaagtcttctcggactcggagtaccagcttccgtacgtcctcggctctgcgcaccagggctgcctccctccgttcccggcggacgtgttcatgattccgcaatacggctacctgacgctcaacaatggcagccaagccgtgggacgttcatccttttactgcctggaatatttcccttctcagatgctgagaacgggcaacaactttaccttcagctacacctttgaggaagtgcctttccacagcagctacgcgcacagccagagcctggaccggctgatgaatcctctcatcgaccaatacctgtattacctgaacagaactcaaaatcagtccggaagtgcccaaaacaaggacttgctgtttagccgtgggtctccagctggcatgtctgttcagcccaaaaactggctacctggaccctgttatcggcagcagcgcgtttctaaaacaaaaacagacaacgacaacagcaattttacctggactggtgcttcaaaatataacctcaatgggcgtgaatccatcatcaaccctggcactgctatggcctcacacaaagacgacgaagacaagttctttcccatgagcggtgtcatgatttttggaaaagagagcgccggagcttcaaacactgcattggacaatgtcatgattacagacgaagaggaaattaaagccactaaccctgtggccaccgaaagatttgggaccgtggcagtcaatttccagagcagcagcacagaccctgcgaccggagatgtgcatgctatgggagcattacctggcatggtgtggcaagatagagacgtgtacctgcagggtcccatttgggccaaaattcctcacacagatggacactttcacccgtctcctcttatgggcggctttggactcaagaacccgcctcctcagatcctcatcaaaaacacgcctgttcctgcgaatcctccggcggagttttcagctacaaagtttgcttcattcatcacccaatactccacaggacaagtgagtgtggaaattgaatgggagctgcagaaagaaaacagcaagcgctggaatcccgaagtgcagtacacatccaattatgcaaaatctgccaacgttgattttactgtggacaacaatggactttatactgagcctcgccccattggcacccgttaccttacccgtcccctg

SEQ ID NO: 657 - DNA, 2208 bp, Artificial Sequence
  Description of Artificial Sequence: Synthetic polynucleotide
atggctgccgatggttatcttccagattggctcgaggacaacctctctgagggcattcgcgagtggtgggacttgaaacctggagctccgaagcccaaagccaaccagcaaaagcaggacgacggccggggtctggtgcttcctggctacaagtacctcggacccttcaacggactcgacaagggggagcccgtcaacgcggcggacgcagcggccctcgagcacgacaaggcctacgaccagcagctcaaagcgggtgacaatccgtacctgcggtataaccacgccgacgccgagtttcaggagcgtctgcaagaagatacgtcttttgggggcaacctcgggcgagcagtcttccaggccaagaagcgggttctcgaacctctcggtctggttgaggaaggcgctaagacggctcctggaaagaaacgtccggtagagcagtcgccacaagagccagactcctcctcgggcatcggcaagacaggccagcagcccgctaaaaagagactcaattttggtcagactggcgactcagagtcagtccccgatccacaacctctcggagaacctccagcaacccccgctgctgtgggacctactacaatggcttcaggcggtggcgcaccaatggcagacaataacgaaggcgccgacggagtgggtaatgcctcaggaaattggcattgcgattccacatggctgggcgacagagtcatcaccaccagcacccgcacctgggccttgcccacctacaataaccacctctacaagcaaatctccagtgcttcaacgggggccagcaacgacaaccactacttcggctacagcaccccctgggggtattttgatttcaacagattccactgccacttttcaccacgtgactggcagcgactcatcaacaacaattggggattccggcccaagagactcaacttcaaactcttcaacatccaagtcaaggaggtcacgacgaatgatggcgtcacaaccatcgctaataaccttaccagcacggttcaagtcttctcggactcggagtaccagcttccgtacgtcctcggctctgcgcaccagggctgcctccctccgttcccggcggacgtgttcatgattccgcaatacggctacctgacgctcaacaatggcagccaagccgtgggacgttcatccttttactgcctggaatatttcccttctcagatgctgagaacgggcaacaactttaccttcagctacacctttgaggaagcgcctttccacagcagctacgcgcacagccagagcctggaccggctgatgaatcctctcatcgaccaatacctgtattacctgaacagaactcaaaatcagtccggaagtgcccaaaacaaggacttgctgtttagccgtgggtctccagctggcatgtctgttcagcccaaaaactggctacctggaccctgttatcggcagcagcgcgtttctaaaacaaaaacagacaacaacaacagcaattttacctggactggtgcttcaaaatataacctcaatgggcgtgaatccatcatcaaccctggcactgctatggcctcacacaaagacgacgaagacaagttctttcccatgagcggtgtcatgatttttggaaaagagagcgccggagcttcaaacactgcattggacaatgtcatgattacagacgaagaggaaattaaagccactaaccctgtggccaccgaaagatttgggaccgtggcagtcaatttccagagcagcagcacagaccctgcgaccggagatgtgcatgctatgggagcattacctggcatggtgtggcaagatagagacgtgtacctgcagggtcccatttgggccaaaattcctcacacagatggacactttcacccgtctcctcttatgggcggctttggactcaagaacccgcctcctcagatcctcatcaaaaacacgcctgttcctgcgaatcctccggcggagttttcagctacaaagtttgcttcattcatcacccaatactccacaggacaagtgagtgtggaaattgaatgggagctgcagaaagaaaacagcaagcgctggaatcccgaagtgcagtacacatccaattatgcgaaatctgccaacgttgattttactgtggacaacaatggactttatactgagcctcgccccgttggcacccgttaccttacccgtcccctg

SEQ ID NO: 658 - DNA, 2208 bp, Artificial Sequence
  Description of Artificial Sequence: Synthetic polynucleotide
atggctgccgatggttatcttccagattggctcgaggacaacctctctgagggcattcgcgagtggtgggacttgaaacctggagccccgaagcccaaagccaaccagcaaaagcaggacgacggccggggtctggtgcttcctggctacaagtacctcggacccttcaacggactcgacaagggggagcccgtcaacgcggcggacgcagcggccctcgagcacgacaaggcctacgaccagcagctcaaagcgggtgacaatccatacctgcggtataaccacgccgacgccgagtttcaggagcgtctgcaagaaaatacgtcttttgggggcaacctcgggcgagcagtcttccaggccaagaagcgggttctcgaacctctcggtctggttgaggaaggcgctaagacggctcctggaaagaaacgtccggtagagcagtcgccacaagagccagactcctcctcgggcatcggcaagacaggccagcagcccgctaaaaagagactcaattttggtcagactggcgactcagagtcagtccccgatccacaacctctcggagaacctccagcaacccccgctgctgtgggacctactacaatggcttcaggcggtggcgcaccaatggcagacaataacgaaggcgccgacggagtgggtaatgcctcaggaaattggcattgcgattccacatggctgggcgacagagtcatcaccaccagcacccgcacctgggccttgcccacctacaataaccacctctacaagcaaatctccagtgcttcaacgggggccagcaacgacaaccactacttcggctacagcaccccctgggggtattttgatttcaacagattccactgccactttccaccacgtgactggcagcgactcatcaacaacaattggggattccggcccaagagactcaacttcaaactcttcaacatccaagtcaaggaggtcacgtcgaatgatggcgtcacaaccatcgctaataaccttaccagcacggttcaagtcttctcggactcggagtaccagcttccgtacgtcctcggctctgcgcaccagggctgcctccctccgttcccggcggacgtgttcatgattccgcaatacggctacctgacgctcaacaatggcagccaagccgtgggacgttcatccttttactgcctggaatatttcccttctcagatgctgagaacgggcaacaactttaccttcagctacacctttgaggaagtgcctttccacagcagctacgcgcacagccagagcctggaccggctgatgaatcctctcatcgaccaatacctgtattacctgaacagaactcaaaatcagtccggaagtgcccaaaacaaggacttgctgtttagccgtgggtctccagctggcatgtctgttcagcccaaaaactggctacctggtccctgttatcggcagcagcgcgtttctaaaacaaaaacagacaacaacaacagcaattttacctggactggtgcttcaaaatataacctcaatgggcgtgaatccatcatcaaccctggcactgctatggcctcacacaaagacgacgaagacaagttctttcccatgagcggtgtcatgatttttggaaaagagagcgccggagcttcaaacactgcattggacaatgtcatgattacagacgaagaggaaattaaagccactaaccctgtggccaccgaaagatttgggaccgtggcagtcaatttccagagcagcagcacagaccctgcgaccggagatgtgcatgctatgggagcattacctggcatggtgtggcaagatagagacgtgtacctgcagggtcccatttgggccaaaattcctcacacagatggacactttcacccgtctcctcttatgggcggctttggactcaagaacccgcctcctcagatcctcatcaaaaacacgcctgttcctgcgaatcctccggcggagttttcagctacaaagtttgcttcattcatcacccaatactccacaggacaagtgagtgtggaaattgaatgggagctgcagaaagaaaacagcaagcgctggaatcccgaagtgcagtacacatccaattatgcaaaatctgccaacgttgattttactgtggacaacaatggactttatactgagcctcgccccattggcacccgttaccttacccgtcccctg

SEQ ID NO: 659 - DNA, 2208 bp, Artificial Sequence
  Description of Artificial Sequence: Synthetic polynucleotide
atggctgccgatggttatcttccagattggctcgaggacaacctctctgagggcattcgcgagtggtgggacttgaaacctggagccccgaagcccaaagccaaccagcaaaagcaggacgacggccggggtctggtgcttcctggctacaagtacctcggacccttcaacggactcgacaagggggagcccgtcaacgcggcggacgcagcggccctcgagcacgacaaggcctacgaccagcagctcaaagcgggtgacaatccgtacctgcggtataaccacgccgacgccgagtttcaggagcgtctgcaagaagatacgtcttttgggggcaacctcgggcgagcagtcttccaggccaagaagcgggttctcgaacctctcggtctggttgaggaaggcgctaagacggctcctggaaagaaacgtccggtagagcagtcgccacaagagccagactcctcctcgggcatcggcaagacaggccagcagcccgctaaaaagagactcaattttggtcagactggcgactcagagtcagtccccgatccacaacctctcggagaacctccagcaacccccgctgctgtgggacctactacaatggcttcaggcggtggcgcaccaatggcagacaataacgaaggcgccgacggagtgggtaatgcctcaggaaattggcattgcgattccacatggctgggcgacagagtcatcaccaccagcacccgcacctgggccttgcccacctacaataaccacctctacaagcaaatctccagtgcttcaacgggggccagcaacgacaaccactacttcggctacagcaccccctgggggtattttgatttcaacagattccactgccacttttcaccacgtgactggcagcgactcatcaacaacaattggggattccggcccaagagactcaacttcaaactcttcaacatccaagtcaaggaggtcacgacgaatgatggcgtcacaaccatcgctaataaccttaccagcacggttcaagtcttctcggactcggagtaccagcttccgtacgtcctcggctctgcgcaccagggctgcctccctccgttcccggcggacgtgttcatgattccgcaatacggctacctgacgctcaacaatggcagccaagccgtgggacgttcatccttttactgcctggaatatttcccttctcagatgctgagaacgggcaacaactttaccttcagctacacctttgaggaagtgcctttccacagcagctacgcgcacagccagagcctggaccggctgatgaatcctctcatcgaccaatacctgtattacctgaacagaactcaaaatcagtccggaagtgcccaaaacaaggacttgctgtttagccgtgggtctccagctggcacgtctgttcagcccaaaaactggctacctggaccctgttatcggcagcagcgcgtttctaaaacaaaaacagacaacaacaacagcaattttacctggactggtgcttcaaaatataacctcaatgggcgtgaatccatcatcaaccctggcactgctatggcctcacacaaagacgacgaagacaagttctttcccatgagcggtgtcatgatttttggaaaagagagcgccggagcttcaaacactgcattggacaatgtcatgattacagacgaagaggaaattaaagccactaaccctgtggccaccgaaagatttgggaccgtggcagtcaatttccagagcagcagcacagaccctgcgaccggagatgtgcatgctatgggagcattacctggcatggtgtggcaagatagagacgtgtacctgcagggtcccatttgggccaaaattcctcacacagatggacactttcacccgtctcctcttatgggcggctttggactcaagaacccgcctcctcagatcctcatcaaaaacacgcctgttcctgcgaatcctccggcggagttttcagctacaaagtttgcttcattcatcacccaatactccacaggacaagtgagtgtggaaattgaatgggagctgcagaaagaaaacagcaagcgctggaatcccgaagtgcagtacacatccaattatgcaaaatctgccaacgttgattttactgtggacaacaatggactttatactgggcctcgccccattggcacccgttaccttacccgtcccctg

SEQ ID NO: 660 - DNA, 2208 bp, Artificial Sequence
  Description of Artificial Sequence: Synthetic polynucleotide
atggctgccgatggttatcttccagattggctcgaggacaacctctctgagggcattcgcgagtggtgggacttgaaacctggagccccgaagcccaaagccaaccagcaaaagcaggacgacggccggggtctggtgcttcctggctacaagtacctcggacccttcaacggactcgacaagggggagcccgtcaacgcggcggacgcagcggccctcgagcacgacaaggcctacgaccagcagctcaaagcgggtgacaatccgtacctgcggtataaccacgccgacgccgagtttcaggagcgtctgcaagaagatacgtcttttgggggcaacctcgggcgagcagtcttccaggccaagaagcgggttctcgaacctctcggtctggttgaggaaggcgctaagacggctcctggaaagaaacgtccggtagagcagtcgccacaagagccagactcctcctcgggcatcggcaagacaggccagcagcccgctaaaaagagactcaattttggtcagactggcgactcagagtcagtccccgatccacaacctctcggagaacctccagcaacccccgctgctgtgggacctactacaatggcttcaggcggtggcgcaccaatggcagacaataacgaaggcgccgacggagtgggtaatgccccaggaaattggcattgcgactccacatggctgggcgacagagtcatcaccaccagcacccgcacctgggccttgcccacctacaataaccacctctacaagcaaatctccagtgcttcaacgggggccagcaacgacaaccactacttcggctacagcaccccctgggggtattttgatttcaacagattccactgccacttttcaccacgtgactggcagcgactcatcaacaacaattggggattccggcccaagagactcaacttcaaactcttcaacatccaagtcaaggaggtcacgacgaatgatggcgtcacaaccatcgctaataaccttaccagcacggttcaagtcttctcggactcggagtaccagcttccgtacgtcctcggctctgcgcaccagggctgcctccctccgttcccggcggacgtgttcatgattccgcaatacggctacctgacgctcaacaatggcagccaagccgtgggacgttcatccttttactgcctggaatatttcccttctcagatgctgagaacgggcaacaactttaccttcagctacacctttgaggaagtgcctttccacagcagctacgcgcacagccagagcctggaccggctgatgaatcctctcatcgaccaatacctgtattacctgaacagaactcaaaatcagtccggaagtgcccaaaacaaggacttgctgtttagccgtgggtctccagctggcatgtctgttcagcccaaaaactggctacctggaccctgttatcggcagcagcgcgtttctaaaacaaaaacagacaacaacaacagcaattttacctggactggtgcttcaaaatataacctcaatgggcgtgaatccatcatcaaccctggcacagctatggcctcacacaaagacgacgaagacaagttctttcccatgagcggtgtcatgatttttggaaaagagagcgccggagcttcaaacactgcattggacaatgtcatgattacaggcgaagaggaaattaaagccactaaccctgtggccaccgaaagatttgggaccgtggcagtcaatttccagagcagcagcacagaccctgcgaccggagatgtgcatgctatgggagcattacctggcatggtgtggcaagatagagacgtgtacctgcagggtcccatttgggccaaaattcctcacacagatggacactttcacccgtctcctcttatgggcggctttggactcaagaacccgcctcctcagatcctcatcaaaaacacgcctgttcctgcgaatcctccggcggagttttcagctacaaagtttgcttcattcatcacccaatactccacaggacaagtgagtgtggaaattgaatgggagctgcagaaagaaaacagcaagcgctggaatcccgaagtgcagtacacatccaattatgcaaaatctgccaacgttgattttactgtggacaacaatggactttatactgagcctcgccccattggcacccgttaccttacccgtcccctg

SEQ ID NO: 661 - DNA, 2208 bp, Artificial Sequence
  Description of Artificial Sequence: Synthetic polynucleotide
atggctgccgatggttatcttccagattggctcgaggacaacctctctgagggcattcgcgagtggtgggacttgaaacctggagccccgaagcccaaagccaaccagcaaaagcaggacgacggccggggtctggtgcttcctggctacaagtacctcggacccttcaacagactcgacaagggggagcccgtcaacgcggcggacgcagcggccctcgagcacgacaaggcctacgaccagcagctcaaagcgggtgacaatccgtacctgcggtataaccacgccgacgccgagtttcaggagcgtctgcaagaagatacgtcttttgggggcaacctcgggcgagcagtcttccaggccaagaagcgggttctcgaacctctcggtctggttgaggaaggcgctaagacggctcctggaaggaaacgtccggtagagcagtcgccacaagagccagactcctcctcgggcatcggcaagacaggccagcagcccgctaaaaagagactcaattttggtcagactggcgactcagagtcagtccccgatccacaacctctcggagaacctccagcaacccccgctgctgtgggacctactacaatggcttcaggcggtggcgcgccaatggcagacaataacgaaggcgccgacggagtgggtaatgcctcaggaaattggcattgcgattccacatggctgggcgacagagtcatcaccaccagcacccgcacctgggccttgcccacctacaataaccacctctacaagcaaatctccagtgcttcaacgggggccagcaacgacaaccactacttcggctacagcaccccctgggggtattttgatttcaacagattccactgccacttttcaccacgtgactggcagcgactcatcaacaacaattggggattccggcccaagagactcaacttcaaactcttcaacatccaagtcaaggaggtcacgacgaatgatggcgtcacaaccatcgctaataaccttaccagcacggttcaagtcttctcggactcggagtaccagcttccgtacgtcctcggctctgcgcaccagggctgcctccctccgttcccggcggacgtgttcatgattccgcaatacggctacctgacgctcaacaatggcggccaagccgtgggacgttcatccttttactgcctggaatatttcccttctcagatgctgagaacgggcaacaactttaccttcagctacacctttgaggaagtgcctttccacagcagctacgcgcacagccagagcctggaccggctgatgaatcctctcatcgaccaatacctgtattacctgaacagaactcaaaatcagtccggaagtgcccaaaacaaggacttgctgtttagccgtgggtctccagctggcatgtctgttcagcccaaaaactggctacctggaccctgttatcggcagcagcgcgtttctaaaacaaaaacagacaacaacaacagcaattttacctggactggtgcttcaaaatatagcctcaatgggcgtgaatccatcatcaaccctggcactgctatggcctcacacaaagacgacgaagacaagttctttcccatgggcggtgtcatgatttttggaaaagagagcgccggagcttcaaacactgcattggacaatgccatgattacagacgaagaggaaattaaagccactaaccctgtggccaccgaaagatttgggaccgtggcagtcaatttccagagcagcagcacagaccctgcgaccggagatgtgcatgctatgggagcattacctggcatggtgtggcaagatagagacgtgtacctgcagggtcccatttgggccaaaattcctcacacagatggacactttcacccgtctcctcttatgggcggctttggactcaagaacccgcctcctcagatcctcatcaaaaacacgcctgttcctgcgaatcctccggcggagttttcagctacaaagtttgcttcattcatcacccaatactccacaggacaagtgagtgtggaaattgaatgggagctgcagaaagaaaacagcaagcgctggaatcccgaagtgcagtacacatccaattatgcaaaatctgccaacgttgattttactgtggacaacaatggactttatactgagcctcgccccattggcacccgttaccttacccgtcccctg

SEQ ID NO: 662 - DNA, 2208 bp, Artificial Sequence
  Description of Artificial Sequence: Synthetic polynucleotide
atggctgccgatggttatcttccagattggctcgaggacaacctctctgagggcattcgcgagtggtgggacttgaaacctggagccccgaagcccaaagccaaccagcaaaagcaggacgacggccggggtctggtgcttcctggctacaagtacctcggacccttcaacggactcgacaagggggagcccgtcaacgcggcggacgcagcggccctcgagcacgacaaggcctacgaccagcagctcaaagcgggtgacaatccgtacctgcggtataaccacgccgacgccgagtttcaggagcgtctgcaagaagatacgtcttttgggggcaacctcgggcgagcagtcttccaggccaagaagcgggttctcgaacctctcggtctggttgaggaaggcgctaagacggctcctggaaagaaacgtccggtagagcagtcgccacaagagccagactcctcctcgggcatcggcaagacaggccagcagcccgctaaaaagagactcaattttggtcagactggcgactcagagtcagtccccgatccacaacctctcggagaacctccagcaacccccgctgctgtgggacctactacaatggcttcaggcggtggcgcaccaatggcagacaataacgaaggcgccgacggagtgggtaatgcctcaggaaattggcattgcgattccacatggctgggcggcagagtcatcaccaccagcacccgcacctgggccttgcccacctacaataaccacctctacaagcaaatctccagtgcttcaacgggggccagcaacgacaaccactacttcggctacagcaccccctgggggtattttgatttcaacagattccactgccacttttcaccacgtgactggcagcgactcatcaacaacaattggggattccggcccaagagactcaacttcaaactcttcaacatccaagtcaaggaggtcacgacgaatgatggcgtcacaaccatcgctaataaccttaccagcacggttcaagtcttctcggactcggagtaccagcttccgtacgtcctcggctctgcgcaccagggctgcctccctccgttcccggcggacgtgttcatgattccgcaatacggctacctgacgctcaacaatggcagccaagccgtgggacgttcatccttttactgcctggaatatttcccttctcagatgctgagaacgggcaacaactctaccttcagctacacctttgaggaagtgcctttccacagcagctacgcgcacagccagagcctggaccggctgatgaatcctctcatcgaccaatacctgtattacctgaacagaactcaaaatcagtccggaagtgcccaaaacaaggacttgctgtttagccgtgggtctccagctggcatgtctgttcagcccaaaaactggctacctggaccctgttatcggcagcagcgcgtttctaaaacaaaaacagacaacaacaacagcaattttacctggactggtgcttcaaaatataacctcaatgggcgtgaatccatcatcaaccctggcactgctatggcctcacacaaagacgacgaagacaagttctttcccatgagcggtgtcatgatttttggaaaagagagcgccggagcttcaaacactgcattggacaatgtcatgattacagacgaagaggaaattaaagccactaaccctgtggccaccgaaagatttgggaccgtggcagtcaatttccagagcagcagcacagaccctgcgaccggagatgtgcatgctatgggaacattacctggcatggtgtggcaagatagagacgtgtacctgcagggtcccatttgggccaaaattcctcacacagatggacactttcacccgtctcctcttatgggcggctttggactcaagaacccgcctcctcagatcctcatcaaaaacacgcctgttcctgcgaatcctccggcggagttttcagctacaaagtttgcttcattcatcacccaatactccacaggacaagtgagtgtggaaattgaatgggagctgcagaaagaaaacagcaagcgctggaatcccgaagtgcagtacacatccaattatgcaaaatctgccaacgttgattttactgtggacaacaatggactttatactgagcctcgccccattggcacccgttaccttacccgtcccctg

SEQ ID NO: 663 - DNA, 2208 bp, Artificial Sequence
  Description of Artificial Sequence: Synthetic polynucleotide
atggctgccgatggttatctcccagattggctcgaggacaacctctctgagggcattcgcgagtggtgggacttgaaacctggagccccgaagcccaaagccaaccagcaaaagcaggacgacggccggggtctggtgcttcctggctacaagtacctcggacccttcaacggactcgacaagggggagcccgtcagcgcggcggacgcagcggccctcgagcacgacaaggcctacgaccagcagctcaaagcgggtgacaatccgtacctgcggtataaccacgccgacgccgagtttcaggagcgtctgcaagaagatacgtcttttgggggcaacctcgggcgagcagtcttccaggccaagaagcgggttctcgaacctctcggtctggttgaggaaggcgctaagacggctcctggaaagaaacgtccggtagagcagtcgccacaagagccagactcctcctcgggcatcggcaagacaggccagcagcccgctaaagagagactcaattttggtcagactggcgactcagagtcagtccccgatccacaacctctcggagaacctccagcaacccccgctgctgtgggacctactacaatggcttcaggcggtggcgcaccaatggcagacaataacgaaggcgccgacggagtgggtaatgcctcaggaaattggcattgcgattccacatggctgggcgacagagtcatcaccaccagcacccgcacctgggccttgcccacctacaataaccacctctacaagcaaatctccagtgcttcaacgggggccagcaacgacaaccactacttcggctacagcaccccctgggggtattttgatttcaacagattccactgccacttttcaccacgtgactggcagcgactcatcaacaacaattggggattccggcccaagagactcaacttcaaactcttcaacatccaagtcaaggaggtcacgacgaatgatggcgtcacaaccatcgccaataaccttaccagcacggttcaagtcttctcggactcggagtaccagcttccgtacgtcctcggctctgcgcaccagggctgcctccctccgttcccggcggacgtgttcatgattccgcaatacggctacctgacgctcaacaatggcagccaagccgtgggacgttcatccttttactgcctggaatatttcccttctcagatgctgagaacgggcaacaactttaccttcagctacacctttgaggaagtgcctttccacagcagctacgcgcacagccagagcctggaccggctgatgaatcctctcatcgaccaatacctgtattacctgaacagaactcaaaatcagtccggaagtgcccaaaacaaggacttgctgtttagccgtgggtctccagctggcatgtctgttcagcccaaaaactggctacctggaccctgttatcggcagcagcgcgtttctaaaacaaaaacagacaacaacaacagcaattttacctggactggtgcttcaaaatataacctcaatgggcgtgaatccatcatcaaccctggcactgctatggcctcacacaaagacgacgaagacaagttctttcccatgagcggtgtcatgatttttggaaaagagagcgccggagcttcaaacactgcattggacaatgtcatgattacagacgaagaggaaattaaagccactaaccctgtggccaccgaaagatttgggaccgtggcagtcaatttccagagcagcagcacagaccctgcgaccggagatgtgcatgctatgggagcattacctggcatggtgtggcaagatagagacgtgtacctgcagggtcccatttgggccaaaattcctcacacagatggacactttcacccgtctcctcttatgggcggctttggactcaagaacccgcctcctcagatcctcatcaaaaacacgcctgttcctgcgaatcctccggcggagttttcagctacaaagtttgcttcattcatcacccaatactccacaggacaagtgagtgtggaaattgaatgggagctgcagaaagaaaacagcaagcgctggaatcccgaagtgcagtacacatccaattatgcaaaatctgccaacgttgattttactgtggacaacaatggactttatactgagcctcgccccattggcacccgttaccttacccgtcccctg

SEQ ID NO: 664 - DNA, 2208 bp, Artificial Sequence
  Description of Artificial Sequence: Synthetic polynucleotide
atggctgccgatggttatcttccagattggctcgaggacaacctctctgagggcattcgcgagtggtgggacttgaaacctggagccccgaagcccaaagccaaccagcaaaagcaggacgacggccggggtctggtgcttcctggctacaagtacctcggacccttcaacggactcgacaagggggagcccgtcaacgcggcggacgcagcggccctcgagcacgacaaggcctacgaccagcagctcaaagcgggtgacaatccgtacctgcggtataaccacgccgacgccgagtttcaggagcgtctgcaagaagatacgtcttttgggggcaacctcgggcgagcagtcttccaggccaagaagcgggttctcgaacctctcggtctggttgaggaaggcgctaagacggctcctggaaagaaacgtccggtagagcagtcgccacaagagccagactcctcctcgggcatcggcaagacaggccagcagcccgctaaaaagagactcaattttggtcagactggcgactcagagtcagtccccgatccacaacctctcggagaacctccagcaacccccgctgctgtgggacctactacaatggcttcaggcggtggcgcaccaatggcagacaataacgaaggcgccgacggagtgggtaatgcctcaggaaattggcattgcgattccacatggctgggcgacagagtcatcaccaccagcacccgcacctgggccttgcccacctacaataaccacctctacaagcaaatctccagtgcttcaacgggggccagcaacgacaaccactacttcggctacagcaccccctgggggtattttgatttcaacagattccactgccacttttcaccacgtgactggcagcgactcatcaacaacaattggggattccggcccaagagactcaacttcaaactcttcaacatccaagtcaaggaggtcacgacgaatgatggcgtcacaaccatcgctaataaccttaccagcacggttcaagtcttctcggactcggagtaccagcttccgtacgtcctcggctctgcgcaccagggctgcctccctccgttcccggcggacgtgttcatgattccgcaatacggctacctgacgctcaacaatggcagccaagccgtgggacgttcatccttttactgcctggaatatttcccttctcagatgctgagaacgggcaacaactttaccttcagctacacctttgaggaagtgcctttccacagcagctacgcgcacagccagagcctggaccggctgatgaatcctctcatcgaccaatacctgtattacctgaacagaactcaaaatcagtccggaagtgcccaaaacaaggacttgctgtttagccgtgggtctccagctggcatgtctgttcagcccaaaaactggctacctggaccctgttatcggcagcagcgcgtttctaaaacaaaaacagacaacaacaacagcaattttacctggactggtgcttcaaaatataacctcaatgggcgtgaatccatcatcaaccctggcactgctatggcctcacacaaagacgacgaagacaagttctttcccatgagcggtgtcatgatttttggaaaagagagcgccggagcttcaaacactgcattggacaatgtcatgattacagacgaaggggaaattaaagccactaaccctgtggccaccgaaagatttgggaccgtggcagtcaatttccagagcagcagcacagaccctgcgaccggagatgtgcatgctatgggagcattacctggcatggtgtggcaagatagagacgtgtacctgcagggtcccatttgggccaaaattcctcacacagatggacactttcacccgtctcctcttatgggcggctttggactcaagaacccgcctcctcagatcctcatcaaaaacacgcctgttcctgcgaatcctccggcggagttttcagctacaaagtttgcttcattcatcacccaatactccacaggacaagtgagtgtggaaattgaatgggagctgcagaaagaaaacagcaagcgctggaatcccgaagtgcagtacacatccaattatgcaaaatctgccaacgttgattttactgtggacaacaatggactttatactgagcctcgccccattggcacccgttaccttacccgtcccctg

SEQ ID NO: 665 - DNA, 2208 bp, Artificial Sequence
  Description of Artificial Sequence: Synthetic polynucleotide
atggctgccgatggttatcttccagattggctcgaggacaacctctctgagggcattcgcgagtggtgggacttgaaacctggagccccgaaacctaaagccaaccagcaaaagcaggacgacggccggggtctggtgcttcctggctacaagtacctcggacccttcaacggactcgacaagggggagcccgtcaacgcggcggacgcagcggccctcgagcacgacaaggcctacgaccagcagctcaaagcgggtgacaatccgtacctgcggtataaccacgccgacgccgagtttcaggagcgtctgcaagaagatacgtcttttgggggcaacctcgggcgagcagtcttccaggccaagaagcgggttctcgaaccttttggtctggttgaggaaggcgctaagacggctcctggaaagaaacgtccggtagagcagtcgccacaagagccagactcctcctcgggcatcggcaagacaggccagcagcccgctaaaaagagactcaattttggtcagactggcgactcagagtcagtccccgacccacaacctctcggagaacctccagcaacccccgctgctgtgggacctactacaatggcttcaggcggtggcgcaccaatggcagacaataacgaaggcgccgacggagtgggtaatgcctcaggaaattggcattgcgattccacatggctgggcgacagagtcatcaccaccagcacccgcacctgggccttgcccacctacaataaccacctctacaagcaaatctccagtgcttcaacgggggccagcaacgacaaccactacttcggctacagcaccccctgggggtattttgatttcaacagattccactgccacttttcaccacgtgactggcagcgactcatcaacaacaattggggattccggcccaagagactcaacttcaagctcttcaacatccaagtcaaggaggtcacgacgaacgatggcgtcacgaccatcgctaataaccttaccagcacggttcaagtcttctcggattcagagtaccaactgccgtacgtcctcggctctgcgcaccagggctgcctccctccgttcccggcggacgtgtttatgattccgcagtacggctacctaacgctcaacaatggcagccaggccgtgggacgttcatccttttactgcccggaatatttcccttctcagatgctgagaacgggcaacaactttaccttcagctacacctttgaggaagtgcctttccacagcagctacgcgcacagccagagcctggaccggctgatgaatcctctcatcgaccaatacctgtattacctgaacagaactcaaaatcagtccggaagtgcccaaaacaaggacttgctgtttagccgtgggtctccagctggcatgtctgttcagcccaaaaactggctacctggaccctgttatcggcagcagcgcgtttctaaaacaaaaacagacaacaacaacagcaattttacctggactggtgcttcaaaatataacctcaatgggcgtgaatccatcatcaaccctggcactgctatggcctcacacaaagacgacaaagacaagttctttcccatgagcggtgtcatgatttttggaaaagagagcgccggagcttcaaatactgcattggacaatgtcatgatcacagatgaagaggaaattaaagccactaaccctgtggccaccgaaagatttgggaccgtggcagtcaatttccagagcagcaacacagaccccgcgaccggagatgtgcatgttatgggagccttacctggcatggtgtggcaagacagagacgtatacctgcagggtcccatttgggccaaaattcctcacacggatggacactttcacccgtctcctctcatgggcggctttggacttaagcacccgcctcctcaaatcctcatcaaaaacacgcctgttcctgcgaatcctccggcagagttttcggctacaaagtttgcttcattcatcacccagtactccacaggacaagtgagtgtggaaattgaatgggagctgcagaaagaaaacagcaagcgctggaatcccgaagtgcagtacacatccaattatgcaaaatctgccaacgttgatttcactgtggacaacaatggactttatactgagcctcgccccattggcacccgttaccttacccgtcccttg

SEQ ID NO: 666 - DNA, 2208 bp, Artificial Sequence
  Description of Artificial Sequence: Synthetic polynucleotide
atggctgccgatggttatcttccagattggctcgaggacaacctctctgagggcattcgcgagtggtgggacttgaaacctggagccccgaaacctaaagccaaccagcaaaagcaggacgacggccggggtctggtgcttcctggctacaagtacctcggacccttcaacggactcgacaagggggagcccgtcaacgcggcggacgcagcggccctcgagcacgacaaggcctacgaccagcagctcaaagcgggtgacaatccgtacctgcggtataaccacgccgacgccgagtttcaggagcgtctacaagaagatacgtcttttgggggcaacctcgggcgagcagtcttccaggccaagaagcgggttctcgaaccttttggtctggttgaggaaggcgctaagacggctcctggaaagaaacgtccggtagagcagtcgccacaagagccagactcctcctcgggcatcggcaagacaggccagcagcccgctaaaaagagactcaattttggtcagactggcgactcagagtcagtccccgacccacaacctctcggagaacctccagcaacccccgctgctgtgggacctactacaatggcttcaggcggtggcgcaccaatggcagacaataacgaaggcgccgacggagtgggtaatgcctcaggaaattggcattgcgattccacatggctgggcgacagagtcatcaccaccagcacccgcacctgggccttgcccacctacaataaccacctctacaagcaaatctccagtgcttcaacgggggccagcaacgacaaccactacttcggctacagcaccccctgggggtattttgatttcaacagattccactgccacttttcaccacgtgactggcagcgactcatcaacaacaattggggattccggcccaagagactcaacttcaagctcttcaacatccaagtcaaggaggtcacgacgaacgatggcgtcacgaccatcgctaataaccttaccagcacggttcaagtcttctcggattcagagtaccaactgccgtacgtcctcggctctgcgcaccagggctgcctccctccgttcccggcggacgtgttcatgattccgcagtacggctacctaacgctcaacaatggcagccaggccgtgggacgttcatccttttactgcctggaatatttcccttctcagatgctgagaacgggcaacaactttaccttcagctacacctttgaggaagtgcctttccacagcagctacgcgcacagccagagcctggaccggctgatgaatcctctcatcgaccaatacctgtattacctgaacagaactcaaaatcagtccggaagtgcccaaaacaaggacttgctgtttagccgtgggtctccagctggcatgtctgttcagcccaaaaactggctacctggaccctgttatcggcagcagcgcgtttctaaaacaaaaacagacaacaacaacagcaattttacctggactggtgcttcaaaatataacctcaatgggcgtgaatccatcatcaaccctggcactgctatggcctcacacaaagacgacaaagacaagttctttcccatgagcggtgtcatgatttttggaaaagagagcgccggagcttcaaatactgcattggacaatgtcatgatcacagatgaagaggaaattaaagccactaaccctgtggccaccgaaagatttgggaccgtggcagtcaatttccagagcagcgacacagaccccgcgaccggagatgtgcatgttatgggagccttacctggcatggtgtggcaagacagagacgtatacctgcagggtcccatttgggccaaaattcctcacacggatggacactttcacccgtctcctctcatgggcggctttggacttaagcacccgcctcctcaaatcctcatcaaaaacacgcctgttcctgcgaatcctccggcagagttttcggctacaaagtttgcttcattcatcacccagtactccacaggacaagtgagtgtggaaattgaatgggagctgcagaaagaaaacagcaagcgctggaatcccgaagtgcagtacacatccaattatgcaaaatctgccaacgttgatttcactgtggacaacaatggactttatactgagcctcgccccattggcacccgttaccttacccgtcccttg

SEQ ID NO: 667 - DNA, 2208 bp, Artificial Sequence
  Description of Artificial Sequence: Synthetic polynucleotide
atggctgccgatggttatcttccagattggctcgaggacaacctctctgagggcattcgcgagtggtgggacttgaaacctggagccccgaaacctaaagccaaccagcaaaagcagggcgacggccggggtctggtgcttcctggctacaagtacctcggacccttcaacggactcgacaagggggagcccgtcaacgcggcggacgcagcggccctcgagcacgacaaggcctacgaccagcagctcaaagcgggtgacaatccgtacctgcggtataaccacgccgacgccgagtttcaggagcgtctgcaagaagatacgtcttttgggggcaacctcgggcgagcagtcttccaggccaagaagcgggttctcgaaccttttggtctggttgaggaaggcgctaagacggctcctggaaagaaacgtccggtagagcagtcgccacaagagccagactcctcctcgggcatcggcaagacaggccagcagcccgctaaaaagagactcaattttggtcagactggcgactcagagtcagtccccgacccacaacctctcggagaacctccagcaacccccgctgctgtgggacctactacaatggcttcaggcggtggcgcaccaatggcagacaataacgaaggcgccgacggagtgggtaatgcctcaggaaattggcattgcgattccacatggctgggcgacagagtcatcaccaccaacactcgcacctgggccttgcccacctacaataaccacctctacaagcaaatctccagtgcttcaacgggggccagcaacgacaaccactacttcggctacagcaccccctgggggtattttgatttcaacagattccactgccacttttcaccacgtgactggcagcgactcatcaacaacaattggggattccggcccaagagactcaacttcaagctcttcaacatccaagtcaaggaggtcacgacgaacgatggcgtcacgaccatcgctaataaccttaccagcacggttcaagtcttctcggattcagagtaccaactgccgtacgtcctcggctctgcgcaccagggctgcctccctccgttcccggcggacgtgttcatgattccgcagtacggctacctaacgctcaacaatggcagccaggccgtgggacgttcatccttttactgcctggaatatttcccttctcagatgctgagaacgggcaacaactttaccttcagctacacctttgaggaagtgcctttccacagcagttacgggcacagccagagcctggaccggctgatgaatcttctcatcgaccaatacctgtattacctgaacagaactcaaaatcagtccggaagtgcccaaaacaaggacttgctgtttagccgtgggtctccagctggcatgtttgttcagcccaaaaactggctacctggaccctgttatcggcagcagcgcgtttctaaaacaaaaacagacaacaacaacagcaattttacctggactggtgcttcaaaatataacctcaatgggcgtgaatccatcatcaaccctggcactgctatggcctcacacaaagacgacgaagacaagttctttcccatgagcggtgtcatgatttttggaaaagagagcgccggagcttcaaatactgcattggacaatgtcatgatcacagatgaagaggaaattaaagccactaaccctgtggccaccgaaagatttgggaccgtggcagtcaatttccagagcagcagcacagaccccgcgaccggagatgtgcatgttatgggagccttacctggcatggtgtggcaagacagagacgtatacctgcagggtcccatttgggccaaaattcctcacacggatggacactttcacccgtctcctctcatgggcggctttggacttaagcacccgcctcctcaaatcctcatcaaaaacacgcctgttcctgcgaatcctccggcagagttttcggctacaaagtttgcttcattcatcacccagtactccacaggacaagtgagtgtggaaattgaatgggagctgcagaaagaaaacagcaagcgctggaatcccgaagtgcagtacacatccaattatgcaaaatctgccaacgttgatttcactgtggacaacaatggactttatactgagcctcgccccattggcacccgttaccttacccgtcccttg

SEQ ID NO: 668 - DNA, 2208 bp, Artificial Sequence
  Description of Artificial Sequence: Synthetic polynucleotide
atggctgccgatggttatcttccagattggctcgaggacaacctctctgagggcattcgcgagtggtgggacttgaaacctggagccccgaaacctaaagccaaccagcaaaagcaggacgacggccggggtctggtgcttcctggctacaagtacctcggacccttcaacggactcgacaagggggagcccgtcaacgcggcggacgcagcggccctcgagcacgacaaggcctacgaccagcagctcaaagcgggtgacaatccgtacctgcggtataaccacgccgacgccgagtttcaggagcgtctgcaagaagatacgtcttttgggggcaacctcgggcgagcagtcttccaggccaagaagcgggttctcgaaccttttggtctggttgaggaaggcgctaagacggctcctggaaagaaacgtccggtagagcagtcgccacaagagccagactcctcctcgggcatcggcaagacaggccagcagcccgctaaaaagagactcaattttggtcagactggcgactcagagtcagtccccgacccacaacctctcggagaacctccagcaacccccgctgctgtgggacctactacaatggcttcaggcggtggcgcaccaatggcagacaataacgaaggcgccgacggagtgggtaatgcctcaggaaattggcattgcgattccacatggctgggcgacagagtcatcaccaccaacacccgcacctgggccttgcccacctacaataaccacctctacaagcaaatctccagtgcttcaacgggggccagcaacgacaaccactacttcggctacagcaccccctgggggtattttgatttcaacagattccactgccacttttcaccacgtgactggcagcgactcatcaacaacaattggggattccggcccaagagactcaacttcaagctcttcaacatccaagtcaaggaggtcacgacgaacgatggcgtcacgaccatcgctaataaccttaccagcacggttcaagtcttctcggattcagagtaccaactgccgtacgtcctcggctctgcgcaccagggctgcctccctccgttcccggcggacgtgttcatgattccgcagtacggctacctaatgctcaacaatggcagccaggccgtgggacgttcatccttttactgcctggaatatttcccttctcagatgctgagaacgggcaacaactttaccttcagctacacctttgaggaagtgcctttccacagcagctacgcgcacagccagagcctggaccggctgatgaatcctctcatcgaccaatacctgtattacctgaacagaactcaaaatcagtccggaagtgcccaaaacaaggacttgctgtttagccgtgggtctccagctggcatgtctgttcagcccaaaaactggctacctggaccctgttatcggcagcagcgcgtttctaaaacaaaaacagacaacaacaacagcaattttacctggactggtgcttcaaaatataacctcaatgggcgtgaatccatcatcaaccctggcactgctatggcctcacacaaagacgacgaagacaagttctttcccatgagcggtgtcatgatttttggaaaagagagcgccggagcttcaaatactgcattggacaatgtcatgatcacagatgaagaggaaattaaagccactaaccctgcggccaccgaaagatttgggaccgtggcagtcaatttccagagcagcagcacagaccccgcgaccggagatgtgcatgttatgggagccttacctggcatggtgtggcaagacagagacgtatacctgcagggtcccatttgggccaaaattcctcacacggatggacactttcacccgtctcctctcatgggcggctttggacttaagcacccgcctcctcaaatcctcatcaaaaacacgcctgttcctgcgaatcctccggcagagttttcggctacaaagtttgcttcattcatcacccagtactccacaggacaagtgagtgtggaaattgaatgggagctgcagaaagaaaacagcaagcgctggaatcccgaagtgcagtacacatccaattatgcaaaatctgccaacgttgatttcactgtggacaacaatggactttatactgagcctcgccccattggcacccgttaccttacccgtcccttg

SEQ ID NO: 669 - DNA, 2208 bp, Artificial Sequence
  Description of Artificial Sequence: Synthetic polynucleotide
atggctgccgatggttatcttccagattggctcgaggacaacctctctgagggcattcgcgagtggtgggacttgaaacctggagccccgaaacctaaagccaaccagcaaaagcaggacgacggccggggtctggtgcttcctggctacaagtacctcggacccttcaacggactcgacaagggggagcccgtcaacgcggcggacgcagcggccctcgagcacgacaaggcctacgaccagcagctcaaagcgggtgacaatccgtacctgcggtataaccacgccgacgccgagtttcaggagcgtctgcaagaagatacgtcttttgggggcaacctcgggcgagcagtcttccaggccaagaagcgggttctcgaaccttttggtctggttgaggaaggcgctaagacggctcctggaaagaaacgtccggtagagcagtcgccacaagagccagactcctcctcgggcatcggcaagacgggccagcagcccgctaaaaagagactcaattttggtcagactggcgactcagagtcagtccccgacccacaacctctcggagaacctccagcaacccccgctgctgtgggacctactacaatggcttcaggcggtggcgcaccaatggcagacaataacgaaggcgccgacggagtgggtaatgcctcaggaaattggcattgcgattccacatggctgggcgacagagtcatcaccaccagcacccgcacctgggccttgcccacctacaataaccacctctacaagcaaatctccagtgcttcaacgggggccagcaacgacaaccactacttcggctacagcaccccctgggggtattttgatttcaacagattccactgccacttttcaccacgtgactggcagcgactcatcaacaacaattggggattccggcccaagagactcaacttcaagctcttcaacatccaagtcaaggaggtcacgacgaacgatggcgtcacgaccatcgctaataaccttaccagcacggttcaagtcttctcggattcagagtaccaactgccgtacgtcctcggctctgcgcaccagggctgcctccctccgttcccggcggacgtgttcatgattccgcagtacggctacctaacgctcaacaatggcagccaggccgtgggacgttcatccttttactgcctggaatatttcccttctcagatgctgagaacgggcaacaactttaccttcagctacacctttgaggaagtgcctttccacagcagctacgcgcacagccagagcctggaccggctgatgaatcctctcatcgaccaatacctgtattacctgaacagaactcaaaatcagtccggaagtgcccaaaacaaggacttgctgtttagccgtgggtctccagctggcatgtccgttcagcccaaaaactggctacctggaccctgttatcggcagcagcgcgtttctaaaacaaaaacagacaacaacaacagcaattttacctggactggtgcttcaaaatataacctcaatgggcgtgaatccatcatcaaccctggcactgctatggcctcacacaaagacgacgaagacaagttctttcccatgagcggtgtcatgatttttggaaaagagagcgccggagcttcaaatactgcattggacaatgtcatgatcacagatgaagaggaaattaaagccactaaccctgtggccaccgaaagatttgggaccgtggcagtcaatttccagagcagcagcacagaccccgcgaccggagatgtgcatgttatgggagccttacctggcatggtgtggcaagacagagacgtatacctgcagggtcccatttgggccaaaattcctcacacggatggacactttcacccgtctcctctcatgggcggctttggacttaagcacccgcctcctcaaatcctcatcaaaaacacgcctgttcctgcgaatcctccggcagagttttcggctacaaagtttgcttcattcatcacccagtactccacaggacaagtgagtgtggaaattgaatgggagctgcagaaagaaaacagcaagcgctggaatcccgaagtgcagtacacatccaattatgcaaaatctgccaacgttgatttcactgtggacaacaatggactttatactgagcctcgccccattggcacccgttaccttacccgtcccttg

SEQ ID NO: 670 - DNA, 2208 bp, Artificial Sequence
  Description of Artificial Sequence: Synthetic polynucleotide
  misc_feature (305)..(305): n is a, c, t, or g
atggctgccgatggttatcttccagattggctcgaggacaacctctctgagggcattcgcgagtggtgggacttgaaacctggagccccgaaacctaaagccaaccagcaaaagcaggacgacggccggggtctggtgcttcctggctacaagtacctcggacccttcaacggactcgacaagggggagcccgtcaacgcggcggacgcagcggccctcgagcacgacaaggcctacgaccagcagctcaaagcgggtgacaatccgtacctgcggtataaccacgccgacgccgagtttcaggngcgtctgcaagaagatacgtcttttgggggcaacctcgggcgagcagtcttccaggccaagaagcgggttctcgaaccttttggtctggttgaggaaggcgctaagacggctcctggaaagaaacgtccggtagagcagtcgccacaagagccagactcctcctcgggcatcggcaagacaggccagcagcccgctaaaaagagactcaattttggtcagactggcgactcagagtcagtccccgacccacaacctctcggagaacctccagcaacccccgctgctgtgggacctactacaatggcttcaggcggtggcgcaccaatggcagacaataacgaaggcgccgacggagtgggtaatgcctcaggaaattggcattgcgattccacatggctgggcggcagagtcatcaccaccagcacccgcacctgggccttgcccacctacaataaccacctctacaagcaaatctccagtgcttcaacgggggccagcaacgacaaccactacttcggccacagcaccccctgggggtattttgatttcaacagattccactgccacttttcaccacgtgactggcagcgactcatcaacaacaattggggattccggcccaagagactcaacttcaagctcttcaacatccaagtcaaggaggtcacgacgaacgatggcgtcacgaccatcgctaataaccttaccagcacggttcaagtcttctcggattcagagtaccaactgccgtacgtcctcggctctgcgcaccagggctgcctccctccgtccccggcggacgtgttcatgattccgcagtacggctacctaacactcaacaatggcagccaggccgtgggacgttcatccttttactgcctggaatatttcccttctcagatgctgagaacgggcaacaactttaccttcagctacacctttgaggaagtgcctttccacagcagctacgcgcacagccagagcctggaccggctgatgaatcctctcatcgaccaatacctgtattacctgaacagaactcaaaatcagtccggaagtgcccaaaacaaggacttgctgtttagccgtgggtctccagctggcatgtctgttcagcccaaaaactggctacctggaccctgttatcggcagcagcgcgtttctaaaacaaaaacagacaacaacaacagcaattttacctggactggtgcttcaaaatataacctcaatgggcgtgaatccatcatcaaccctggcactgctatggcctcacacaaagacgacaaagacaagttctttcccatgagcggtgtcatgatttttggaaaagagagcgccggagcttcaaatactgcattggacaatgtcatgatcacagatgaagaggaaattaaagccactaaccctgtggccaccgaaagatttgggaccgtggcagtcaatttccagagcagcaacacagaccccgcgaccggagatgtgcatgttatgggagccttacctggcatggtgtggcaagacagagacgtatacctgcagggtcccatttgggccaaaattcctcacacggatggacactttcacccgtctcctctcatgggcggctttggacttaagcacccgcctcctcaaatcctcatcaaaaacacgcctgttcctgcgaatcctccggcagagttttcggctacaaagtttgcttcattcatcacccagtactccacaggacaagtgagtgtggaaattgaatgggagctgcagaaagaaaacagcaagcgctggaatcccgaagtgcagtacacatccaattatgcaaaatctgccaacgttgatttcactgtggacaacaatggactttatactgagcctcgccccattggcacccgttaccttacccgtcccttg

SEQ ID NO: 671 - DNA, 2208 bp, Artificial Sequence
  Description of Artificial Sequence: Synthetic polynucleotide
atggctgccgatggttattttccagattggctcgaggacaacctttctgagggcattcgcgagtggtgggacttgaaacctggagccccgaaacctaaagccaaccagcaaaagcaggacgacggccggggtctggtgcttcctggctacaagtacctcggacccttcaacggactcgacaagggggagcccgtcaacgcggcggacgcagcggccctcgagcacgacaaggcctacgaccagcagctcaaagcgggtgacaatccgtacctgcggtataaccacgccgacgccgagtttcaggagcgtctgcaagaagatacgtcttttgggggcaacctcgggcgagcagtcttccaggccaagaagcgggttctcgaaccttttggtctggttgaggaaggcgctaagacggctcctggaaagaaacgtccggtagagcagtcgccacaagagccagactcctcctcgggcatcggcaggacaggccagcagcccgctaaaaagagactcaattttggtcagactggcgactcagagtcagtccccgacccacaacctctcggagaacctccagcgacccccgctgctgtgggacctactacaatggcttcaggcggtggcgcaccaatggcagacaataacgaaggtgccgacggagtgggtaatgcctcaggaaattggcattgcgattccacatggctgggcgacagagtcatcaccaccagcacccgcacctgggccttgcccacctacaataaccacctctacaagcaaatctccagtgcttcaacgggggccagcaacgacaaccactacttcggctacagcaccccctgggggtattttgatttcaacagattccactgccacttttcaccacgtgactggcagcgactcatcaacaacaattggggattccggcccaagagactcaacttcaagctcttcaacatccaagtcaaggaggtcacgacgaacgatggcgtcacgaccatcgctaataaccttaccagcacggttcaagtcttctcggattcagagtaccaactgccgtacgtcctcggctctgcgcaccagggctgcctccctccgttcccggcggacgtgttcatgattccgcagtacggctacctaacgctcaacaatggcagccaggccgtgggacgttcatccttttactgcctggaatatttcccttctcagatgctgagaacgggcaacaactttaccttcagctacacctttgaggaagtgcctttccacagcagctacgcgcacagccagagcctggaccggctgatgaatcctctcatcgaccaatacctgtattacctgaacagaactcaaaatcagtccggaagtgcccaaaacaaggacttgctgtttagccgtgggtctccagctggcatgtctgttcagcccaaaaactggctacctggaccctgttatcggcagcagcgcgtttctaaaacaaaaacagacaacaacaacagcaattttacctggactggtgcttcaaaatataacctcaatgggcgtgaatccatcatcaaccctggcactgctatggcctcacacaaagacgacgaagacaagttctttcccatgagcggtgtcatgatttttggaaaagagagcgccggagcttcaaatactgcattggacaatgtcatgatcacagatgaagaggaaattaaagccactaaccctgtggccaccgaaagatttgggaccgtggcagtcaatttccagagcagcagcccagaccccgcgaccggagatgtgcatgttatgggagccttacctggcatggtgtggcaagacagagacgtatacctgcagggtcccatttgggccaaaattcctcacacggatggacactttcacccgtctcctctcatgggcggctttggacttaagcacccgcctcctcaaatcctcatcaaaaacacgcctgttcctgcgaatcctccggcagagttttcggctacaaagtttgcttcattcatcacccagtactccacaggacaagtgagtgtggaaattgaatgggagctgcagaaagaaaacagcaagcgctggaatcccgaagtgcagtacacatccaattatgcaaaatctgccaacgttgatttcactgtggacaacaatggactttatagtgagcctcgccccattggcacccgttaccttacccgtcccttg

SEQ ID NO: 672 - DNA, 2208 bp, Artificial Sequence
  Description of Artificial Sequence: Synthetic polynucleotide
atggctgccgatggttatcttccagattggctcgaggacaacctctctgagggcattcgcgagtggtgggacttgaaacctggagccccgaaacctaaagccaaccagcaaaagcaggacgacggccggggtctggtgcttcctggctacaagtacctcggacccttcaacggactcgacaagggggagcccgtcaacgcggcggacgcagcggccctcgagcacgacaaggcctacgaccagcagctcaaagcgggtgacaatccgtacctgcggtataaccacgccgacgccgagtttcaggagcgtctgcaagaagatacgtcttttgggggcaacctcgggcgagcagtcttccaggccaagaagcgggttctcgaaccttttggtctggttgaggaaggcgctaagacggctcctggaaagaaacgtccggtagagcagtcgccacaagagccagactcctcctcgggcatcggcaagacaggccagcagcccgctaaaaagagactcaattttggtcagactggcgactcagagtcagtccccgacccacaacctctcggagaacctccagcaacccccgctgctgtgggacctactacaatggcttcaggcggtggcgcaccaatggcagacaataacgaaggcgccgacggagtgggtaatgcctcaggaaattggcattgcgattccacatggctgggcgacagagtcatcaccaccagcacccgcacctgggccttgcccacctacaataaccacctctacaagcaaacctccagtgcttcaacgggggccagcaacgacaaccactacttcggctacagcaccccctgggggtattttgatttcaacagattccactgccacttttcaccacgtgactggcagcgactcatcaacaacaattggggattccggcccaagagactcaacttcaagctcttcaacatccaagtcaaggaggtcacgacgaacgatggcgtcacgaccatcgctaataaccttaccagcacggttcaagtcttctcggattcagagtaccaactgccgtacgtcctcggctctgcgcaccagggctgcctccctccgttcccggcggacgtgttcatgattccgcagtacggctacctaacgctcaacaatggcagccaggccgtgggacgttcatccttttactgcctggaatatttcccttctcagatgctgagaacgggcaacaactttaccttcagctacacctttgaggaagtgcctttccacagcagctacgcgcacagccagagcctggaccggctgatgaatcctctcatcgaccaatacctgtattacctgaacagaactcaaaatcagtccggaagtgcccaaaacaaggacttgctgtttagccgtgggtctccagctggcatgtctgttcagcccaaaaactggctacctggaccctgttatcggcagcagcgcgtttctaaaacaaaaacagactacaacaacagcaattttacctggactggtgcttcaaaatataacctcaatgggcgtgaatccatcatcaaccctggcactgctatggcctcacacaaagacgacgaagacaagttctttcccatgagcggtgtcatgatttttggaaaagagagcgccggagcttcaaatactgcattggacaatgtcatgatcacagatgaagaggaaattaaagccactaaccctgtggccaccgaaagatttgggaccgtggcagtcaatttccagagcagcagcacagaccccgcgaccggagatgtgcatgttatgggagccttacctggcatggtgtggcaagacagagacgtatacctgcagggtcccatttgggccaaaattcctcacacggatggacactttcacccgtctcctctcatgggcggctttggacttaagcacccgcctcctcaaatcctcatcaaaaacacgcctgttcctgcgaatcctccggcagagttttcggctacaaagtttgcttcattcatcacccagtactccacaggacaagtgagtgtggaaattgaatgggagctgcagaaagaaaacagcaagcgctggaatcccgaagtgcagtacacatccaattatgcaaaatctgccaacgttgatttcactgtggacaacaatggactttatactgagcctcgccccattggcacccgttaccttacccgtcccttg

SEQ ID NO: 673 - DNA, 2208 bp, Artificial Sequence
  Description of Artificial Sequence: Synthetic polynucleotide
atggctgccgatggttatcctccagattggctcgaggacaacctctctgagggcattcgcgagtggtgggacttgaaacctggagtcccgaaacctaaagccaaccagcaaaagcaggacgacggccggggtctggtgcttcctggctacaagtacctcggacccttcaacggactcgacaagggggagcccgtcaacgcggcggacgcagcggccctcgagcacgacaaggcctacgaccagcagctcaaagcgggtgacaatccgtacctgcggtataaccacgccgacgccgagtttcaggagcgtctgcaagaagatacgtcttttgggggcaacctcgggcgagcagtcttccaggccaagaagcgggttctcgaaccttttggtctggttgaggaaggcgctaagacggctcctggaaagaaacgtccggtagagcagtcgccacaagagccagactcctcctcgggcatcggcaagacaggccagcagcccgctaaaaagagactcaattttggtcagactggcgactcagagtcagtccccgacccacaacctctcggagaacctccagcaacccccgctgctgtgggacctactacaatggcttcaggcggtggcgcaccaatggcagacaataacgaaggcgccgacggagtgggtaatgcctcaggaaattggcattgcgattccacatggctgggcgacagagtcatcaccaccagcacccgcacctgggccttgcccacctacaataaccacctctacaagcaaatctccagtgcttcaacgggggccagcaacgacaaccactacttcggctacagcaccccctgggggtattttgatttcaacagattccactgccacttttcaccacgtgactggcagcgactcatcaacaacaattggggattccggcccaagagactcaacttcaagctcttcaacatccaagtcaaggaggtcacgacgaacgatggcgtcacgaccatcgctaataaccttaccagcacggttcaagtcttctcggattcagagtaccaactgccgtacgtcctcggctctgcgcaccagggctgcctccctccgttcccggcggacgtgttcatgattccgcagtacggctacctaacgctcaacaatggcagccaggccgtgggacgttcatccttttactgcctggaatatttcccttctcagatgctgagaacgggcaacaactttaccttcagctacacctttgaggaagtgcctttccacagcagctacgcgcacagccagagcctggaccggctgatgaatcctctcatcgaccaatacctgtattacctgaacagaactcaaaatcagtccggaagtgcccaaaacaaggacttgctgtttagccgtgggtctccagctggcatgtctgttcagcccaaaaactggctacctggaccctgttatcggcagcagcgcgtttctaaaacaaaaacagacaacaacaacagcaattttacctggactggtgcttcaaaatataacctcaatgggcgtgaatccatcatcaaccctggcactgctatggcctcacacaaagacgacgaagacaagttctttcccatgagcggtgtcatgatttttggaaaagagagcgccggagcttcaaatactgcattggacaatgtcatgatcacagatgaagaggaaattaaagccactaaccctgtggccaccgaaagatttgggaccgtggcagtcaatttccagagcagcagcacagaccccgcgaccggagatgtgcatgttatgggagccttacctggcatggtgtggcaagacagagacgtatacctgcagggtcccatttgggccaaaattcctcacacggatggacactttcacccgtctcctctcatgggcggctttggacttaagcacccgcctcctcaaatcctcatcaaaaacacgcctgttcctgcgaatcctccggcagagttttcggctacaaagtttgcttcattcatcacccagtactccacaggacaagtgagtgtggaaattgaatgggagctgcagaaagaaaacagcaagcgctggaatcccgaagtgcagtacacatccaattatgcaaaatctgccaacgttgatttcactgtggacaacaatggactttatactgagcctcgccccattggcacccgttaccttacccgtcccttg

SEQ ID NO: 674 - DNA, 2196 bp, Artificial Sequence
  Description of Artificial Sequence: Synthetic polynucleotide
atggctgccgatggttatcttccagattggctcgaggacaacctctctgagggcattcgcgagtggtgggacttgaaacctggagccccgaaacctaaagccaaccagcaaaagcaggacgacggccggggtctggtgcttcctggctacaagtacctcggacccttcaacggactcgacaagggggagcccgtcaacgcggcggacgcagcggccctcgagcacgacaaggcctacgaccagcagctcaaagcgggtgacaatccgtacctgcggtataaccacgccgacgccgagtttcaggagcgtctgcaagaagatacgtcttttgggggcaacctcgggcgagcagtcttccaggccaagaagcgggttctcgaaccttttggtctggttgaggaaggcgctaagacggctcctggaaagaaacgtccggtagagcagtcgccacaagagccagactcctcctcgggcatcggcaagacaggccagcagcccgctaaaaagagactcaattttggtcagactggcgactcagagtcagtccccgacccacaacctctcggagaacctccagcaacccccgctgctgtgggacctactacaatggcttcaggcggtggcgcaccaatggcagacaataacgaaggcgccgacggagtgggtaatgcctcaggaaattggcattgcgattccacatggctgggcgacagagtcatcaccaccagcacccgcacctgggccttgcccacctacaataaccacctctacaagcaaatctccagtgcttcaacgggggccagcaacgacaaccactacttcggctacagcaccccctgggggtattttgatttcaacagattccactgccacttttcaccacgtgactggcagcgactcatcaacaacaattggggattccggcccaagagactcaacttcaagctcttcaacatccaagtcaaggaggtcacgacgaacgatggcgtcacgaccatcgctaataaccttaccagcacggttcaagccttctcggattcagagtaccaactgccgtacgtcctcggctctgcgcaccagggctgcctccctccgttcccggcggacgtgttcatgattccgcagtacggctacctaacgctcaacaatggcagccaggccgtgggacgttcatccttttactgcctggaatatttcccttctcagatgctgagaacgggcaacaactttaccttcagctacacctttgaggaagtgcctttccacagcagctacgcgcacagccagagcctggaccggctgatgaatcctctcatcgacccatacctgtattacctgaacagaactcaaaatcagtccggaagtgcccaaaacaaggacttgctgtttagccgtgggtctccagctggcatgtctgttcagcccaaaaactggctacctggaccctgttatcggcagcagcgcgtttctaaaacaaaaacagacaacaacaacagcaattttacctggactggtgcttcaaaatataacctcaatgggcgtgaatccatcatcaaccctggcactgctatggcctcacacaaagacgacgaagacaagttctttcccatgagcggtgtcatgatttttggaaaagagagcgccggagcttcaaatactgcattggacaatgtcatgatcacagatgaagaggaaattaaagccactaaccctgtggccaccgaaagatttgggaccgtggcagtcaatttccagagcagcagcacagaccccgcgaccggagatgtgcatgttatgggagccttacctggcatggtgtggcaagacagagacgtatacctgcagggtcccatttgggccaaaattcctcacacggatggacactttcacccgtctcctctcatgggcggctttggacttaagcacccgcctcctcaaatcctcatcaaaaacacgcctgttcctgcgaatcctccggcagagttttcggctacaaagtttgcttcattcatcacccagtactccacaggacaagtgagtgtggaaattgaatgggagctgcagaaagaaaacagcaagcgctggaatcccgaagtgcagtacacatccaattatgcaaaatctgccaacgttgatttcactgtggacaacaatggactttatactgagcctcgccccattggcacccgttacctt

SEQ ID NO: 675 - DNA, 2208 bp, Artificial Sequence
  Description of Artificial Sequence: Synthetic polynucleotide
atggctgccgatggttatcttccagattggctcgaggacaacctctctgagggcattcgcgagtggtgggacttgaaacctggagccccgaaacctaaagccaaccagcaaaagcaggacgacggccggggtctggtgcttcctggctacaagtacctcggacccttcaacggactcgacaagggggagcccgtcaacgcggcggacgcagcggccctcgagcacgacaaggcctacgaccagcagctcaaagcgggtgacaatccgtacctgcggtataaccacgccgacgccgagtttcaggagcgtctgcaagaagatacgtcttttgggggcaacctcgggcgagcagtcttccaggccaagaagcgggttctcgaaccttttggtctggttgaggaaggcgctaagacggctcctggaaagaaacgtccggtagagcagtcgccacaagagccagactcctcctcgggcatcggcaagacaggccagcagcccgctaaaaagagactcaattttggtcagactggcgactcagagtcagtccccgacccacaacctctcggagaacctccagcaacccccgctgctgtgggacctactacaatggcttcaggcggtggcgcaccaatggcagacaataacgaaggcgccgacggagtgggtaatgcctcaggaaattggcattgcgattccacatggctgggcgacagagtcatcaccaccagcacccgcacctgggccttgcccacctacaataaccacctctacaagcaaatctccagtgcttcaacgggggccagcaacgacaaccactacttcggctacagcaccccctgggggtattttgatttcaacagattccactgccacttttcaccacgtgactggcagcgactcatcaacaacaattggggattccggcccaagagactcaacttcaagctcttcaacatccaagtcaaggaggtcacgacgaacgatggcgtcacgaccatcgctaataaccttaccagcacggttcaagtcttctcggattcagagtaccaactgccgtacgtcctcggctctgcgcaccagggctgcctccctccgttcccggcggacgtgttcatgattccgcagtacggctacctaacgctcaacaatggcagccaggccgtgggacgttcatccttttactgcctggaatatttcccttctcagatgctgagaacgggcaacaactttaccttcagctacacctttgaggaagtgcctttccacagcagctacgcgcacagccagagcctggaccggctgatgaatcctctcatcgaccaatacctgtattacctgaacagaactcaaaatcagtccggaagtgcccaaaacaaggacttgctgtttagccgtgggtctccagctggcatgtctgttcagcccaaaaactggctacctggaccctgttatcggcagcagcgcgtttctaaaacaaaaacagacaacaacaacagcaattttacctggactggtgcttcaaaatataacctcaatgggcgtgaatccatcatcaaccctggcactgctatggcctcacacaaagacgacgaagacaagttctttcccatgagcggtgtcatgatttttggaaaagagagcgccggagcttcaaatactgcattggacaatgtcatgatcacagatgaagaggaaattaaagccactaaccctgtggccaccgaaagatttgggaccgtggcagtcaatttccagagcagcagcacagaccccgcgaccggagatgtgcatgttatgggagccttacctggcatggtgtggcaagacagagacgtatacctgcagggtcccatttgggccaaaattcctcacacggatggacactctcacccgtctcctctcatgggcggctttggacttaagcacccgcctcctcaaatcctcatcaaaaacacgcctgttcctgcgaatcctccggcagagttttcggctacaaagtttgcttcattcatcacccagtactccacaggacaagtgagtgtggaaattgaatgggagctgcagaaagaaaacagcaagcgctggaatcccgaagtgcagtacacatccaattatgcaaaatctgccaacgttgatttcactgtggacaacaatggactttatactgagcctcgccccattggcacccgttaccttacccgtcccttg

SEQ ID NO: 676 - DNA, 2208 bp, Artificial Sequence
  Description of Artificial Sequence: Synthetic polynucleotide
atggctgccgatggttatcttccagattggctcgaggacaacctctctgagggcattcgcgagtggtgggacttgaaacctggagccccgaaacctaaagccaaccagcaaaagcaggacgacggccggggtctggtgcttcctggctacaagtacctcggacccttcaacggactcgacaagggggagcccgtcaacgcggcggacgcagcggccctcgagcacgacaaggcctacgaccagcagctcaaagcgggtgacaatccgtacctgcggtataaccacgccgacgccgagtttcaggagcgtctgcaagaagatacgtcttttgggggcaacctcgggcgagcagtcttccaggccaagaagcgggttctcgaaccttttggtctggttgaggaaggcgctaagacggctcctggaaagaaacgtccggtagagcagtcgccacaagagccagactcctcctcgggcatcggcaagacaggccagcagcccgctaaaaagagactcaattttggtcagactggcgactcagagtcagtccccgacccacaacctctcggagaacctccagcaacccccgctgctgtgggacctactacaatggcttcaggcggtggcgcaccaatggcagacaataacgaaggcgccgacggagtgggtaatgcctcaggaaattggcattgcgattccacatggctgggcgacagagtcatcaccaccagcacccgcacctgggccttgcccacctacaataaccacctctacaagcaaatctccagtgcttcaacgggggccagcaacgacaaccactacttcggctacagcaccccctgggggtattttgatttcaacagattccactgccacttttcaccacgtgactggcagcgactcatcaacaacaattggggattccggcccaagagactcaacttcaagctcttcaacatccaagtcaaggaggtcacgacgaacgatggcgtcacgaccatcgctaataaccttaccagcacggttcaagtcttctcggattcagagtaccaactgccgtacgtcctcggctctgcgcaccagggctgcctccctccgttcccggcggacgtgttcatgattccgcagtacggctacctaacgctcaacaatggcagccaggccgtgggacgttcatccttttactgcctggaatatttcccttctcagatgctgagaacgggcaacaactttaccttcagctacacctttgaggaagtgcctttccacagcagctacgcgcacagccagagcctggaccggctgatgaatcctctcatcgacctatacctgtattacctgaacagaactcaaaatcagtccggaagtgcccaaaacaaggacttgctgtttagccgtgggtctccagctggcatgtctgttcagcccaaaaactggctacctggaccctgttatcggcagcagcgcgtttctaaaacaaaaacagacaacaacaacagcaattttacctggactggtgcttcaaaatataacctcaatgggcgtgaatccatcatcaaccctggcactgctatggcctcacacaaagacgacgaagacaagttctttcccatgagcggtgtcatgatttttggaaaagagagcgccggaacttcaaatactgcattggacaatgtcatgatcacagatgaagaggaaattaaagccactaaccctgtggccaccgaaagatttgggaccgtggcagtcaatttccagagcagcagcacagaccccgcgaccggagatgtgcatgttatgggagccttacctggcatggtgtggcaagacagagacgtatacctgcagggtcccatttgggccaaaattcctcacacggatggacactttcacccgtctcctctcatgggcggctttggacttaagcacccgcctcctcaaatcctcatcaaaaacacgcctgttcctgcgaatcctccggcagagttttcggctacaaagtttgcttcattcatcacccagtactccacaggacaagtgagtgtggaaattgaatgggagctgcagaaagaaaacagcaagcgctggaatcccgaagtgcagtacacatccaattatgcaaaatctgccaacgttgatttcactgtggacaacaatggactttatactgagcctcgccccattggcacccgttaccttacccgtcccttg

SEQ ID NO: 677 - DNA, 2208 bp, Artificial Sequence
  Description of Artificial Sequence: Synthetic polynucleotide
atggctgccgatggttatcttccagattggctcgaggacagcctctctgagggcattcgcgagtggtgggacttgaaacctggagccccgaaacctaaagccaaccagcaaaagcaggacgacggccggggtctggtgcttcctggctacaagtacctcggacccttcaacggactcgacaagggggagcccgtcaacgcggcggacgcagcggccctcgagcacgacaaggcctacgaccagcagctcaaagcgggtgacaatccgtacctgcggtataaccacgccgacgccgagtttcaggagcgtctgcaagaagatacgtcttttgggggcaacctcgggcgagcagtcttccaggccaagaagcgggttctcgaaccttttggtctggttgaggaaggcgctaagacggctcctggaaagaaacgtccggtagagcagtcgccacaagagccagactcctcctcgggcatcggcaagacaggccagcagcccgctaaaaagagactcaattttggtcagactggcgactcagagtcagtccccgacccacaacctctcggagaacctccagcaacccccgctgctgtgggacctactacgatggcttcaggcggtggcgcaccaatggcagacaataacgaaggcgccgacggagtgggtaatgcctcaggaaattggcattgcgattccacatggctgggcgacagagtcatcaccaccagcacccgcacctgggccttgcccacctacaataaccacctctacaagcaaatctccagtgcttcaacgggggccagcaacgacaaccactacttcggctacagcaccccctgggggtattttgatttcaacagattccactgccacttttcaccacgtgactggcagcgactcatcaacaacaattggggattccggcccaagagactcaacttcaagctcttcaacatccaagtcaaggaggtcacgacgaacgatggcgtcacgaccatcgctaataaccttaccagcacggttcaagtcttctcggattcagagtaccaactgccgtacgtcctcggctctgcgcaccagggctgcctccctccgttcccggcggacgtgttcatgattccgcagtacggctacctaacgcccaacaatggcagccaggccgtgggacgttcatccttttactgcctggaatatttcccttctcagatgctgagaacgggcaacaactttaccttcagctacacctttgaggaagtgcctttccacagcagctacgcgcacagccagagcctggaccggctgatgaatcctctcatcgaccaataccagtattacctgaacagaactcaaaatcagtccggaagtgcccaaaacaaggacttgctgtttagccgtgggtctccagctggcatgtctgttcagcccaaaaactggctacctggaccctgttatcggcagcagcgcgtttctaaaacaaaaacagacaacaacaacagcaattttacctggactggtgcttcaaaatataacctcaatgggcgtgaatccatcatcaaccctggcactgctatggcctcacacaaagacgacgaagacaagttctttcccatgagcggtgtcatgatttttggaaaagagagcgccggagcttcaaatactgcattggacaatgtcatgatcacagatgaagaggaaattaaagccactaaccctgtggccaccgaaagatttgggaccgtggcagtcaatttccagagcagcagcacagaccccgcgaccggagatgtgcatgttatgggagccttacctggcatggtgtggcaagacagagacgtatacctgcagggtcccatttgggccaaaattcctcacacggatggacactttcacccgtctcctctcatgggcggctttggacttaagcacccgcctcctcaaatcctcatcaaaaacacgcctgttcctgcgaatcctccggcagagttttcggctacaaagtttgcttcattcatcacccagtactccacaggacaagtgagtgtggaaattgaatgggagctgcagaaagaaaacagcaagcgctggaatcccgaagtgcagtacacatccaattatgcaaaatctgccaacgttgatttcactgtggacaacaatggactttatactgagcctcgccccattggcacccgttaccttacccgtcccttg

SEQ ID NO: 678 - DNA, 2208 bp, Artificial Sequence; identical to SEQ ID NO: 669
  Description of Artificial Sequence: Synthetic polynucleotide

SEQ ID NO: 679 - DNA, 2205 bp, Artificial Sequence
  Description of Artificial Sequence: Synthetic polynucleotide
atggctgccgatggttatcttccagattggctcgaggacactctctctgaaggaataagacagtggtggaagctcaaacctggcccaccaccaccaaagcccgcagagcggcataaggacgacagcaggggtcttgtgcttcctgggtacaagtacctcggacccttcaacggactcgacaagggagagccggtcaacgaggcagacgccgcggccctcgagcacgacaaagcctacgaccggcagctcgacagcggagacaacccgtacctcaagtacaaccacgccgacgcggagtttcaggagcgccttaaagaagatacgtcttttgggggcaacctcggacgagcagtcttccaggcgaaaaagagggttcttgaacctctgggcctggttgaggaacctgttaagacggctccgggaaaaaagaggccggtagagcactctcctgtggagccagactcctcctcgggaaccggaaaggcgggccagcagcctgcaagaaaaagattgaattttggtcagactggagacgcagactcagtacctgacccccagcctctcggacagccaccagcagccccctctggtctgggaactaatacgatggctacaggcagtggcgcaccaatggcagacaataacgagggcgccgacggagtgggtaattcctcgggaaattggcattgcgattccacatggatgggcgacagagtcatcaccaccagcacccgaacctgggccctgcccacctacaacaaccacctctacaaacaaatttccagccaatcaggagcctcgaacgacaatcactactttggctacagcaccccttgggggtattttgacttcaacagattccactgccacttttcaccacgtgactggcaaagactcatcaacaacaactggggattccgacccaagagactcaacttcaagctctttaacattcaagtcaaagaggtcacgcagaatgacggtacgacgacgattgccaataaccttaccagcacggttcaggtgtttactgactcggagtaccagctcccgtacgtcctcggctcggcgcatcaaggatgcctcccgccgttcccagcagacgtcttcatggtgccacagtatggatacctcaccctgaacaacgggagtcaggcagtaggacgctcttcattttactgcctggagtactttccttctcagatgctgcgtaccggaaacaactttaccttcagctacacttttgaggacgttcctttccacagcagctacgctcacagccagagtctggaccgtctcatgaatcctctcatcgaccagtacctgtattacttgagcagaacaaacactccaagtggaaccaccacgcagtcaaggcttcagttttctcgggccggagcgagtgacattcgggaccagtctaggaactggcttcctggaccctgttaccgccagcagcgagtatcaaagacatctgcggataacaacaacagtgaatactcgtggactggagctaccaagtaccacctcaatggcagagactctctggtgaatccgggcccggccatggcaagccacaaggacgatgaagaaaagttttttcctcagagcggggttctcatctttgggaagcaaggctcagagaaaacaaatgtggacattgaaaaggtcatgattacagacgaagaggaaatcaggacaaccaatcccgtggctacggagcagtatggttctgtatctaccaacctccagagaggcaacagacaagcagctaccgcagatgtcaacacacaaggcgttcttccaggcatggtctggcaggacagagatgtgtaccttcaggggcccatctgggcaaagattccacacacggacggacattttcacccctctcccctcatgggtggattcggacttaaacaccctcctccacagattctcatcaagaacaccccggtacctgcgaatccttcgaccaccttcagtgcggcaaagtttgcttccttcatcacacagtactccacgggacaggtcagcgtggagatcgagtgggagctgcagaaggaaaacagcaaacgctggaatcccgaaattcagtacacttccaactacaacaagtctgttaatgtggactttactgtggacactaatggcgtgtattcagagcctcgccccattggcaccagatacctgactcgtaatctg

SEQ ID NO: 680 - protein, 736 aa, Artificial Sequence
  Description of Artificial Sequence: Synthetic polypeptide
MAADGYLPDWLEDNLSEGIREWWALKPGAPQPKANQQHQDNARGLVLPDYKYLGPGNGLDKGEPVNAADVAALEHDKAYDQQLKAGDNPYLKYNHADAEFQERLKEDTSFGGNLGRAVFQAKKRLLEPLGLVEEAAKTAPGKKRPVEQSPQEPDSSAGIGKSGAQPAKKRLNFGQTGDTESVPDPQPIGEPPAAPSGVGSLTMASGGGAPVADNNEGADGVGSSSGNWHCDSQWLGDGVITTSTRTWALPTYNNHLYKQISNSTSGGSSNDNAYFGYSTPWGYFDFNRFHCHFSPRDWQRLINNNWGFRPKRLNFKLFNIQVKEVTDNNGVKTIANNLTSTVQVFTDSDYQLPYVLGSAHEGCLPPFPADVFMIPQYGYLTLNDGSQAVGRSSFYCLEYFPSQMLRTGNNFQFSYEFENVPFHSSYAHSQSLDRLMNPLIDQYLHYLPKTINGSGQNQQTLKFSVAGPSNMAVQGRNYIPGPSYRQQRVSTTVTQNNNSEFAWPGASSWALNGRNSLMNPGPAMASYKEGEDSFFPLSGSLIFGKQGTGRDNVDADKVMITNEEEIKTTNPVATESYGQVATNHQSAQAQAQTGWVQNQGILPGMVWQDRDVYLQGPIWAKIPHTDGNFHPSPLMGGFGMKHPPPQTLIKNTPVPADPPTAFNKDKLNSFITQYSTGQVSVEIEWELQKENSKRWNPEIQYTSNYYKSNNVEFAVNTEGVYSEPRPIGTRYLTRNL

SEQ ID NO: 681 - protein, 736 aa, Artificial Sequence
  Description of Artificial Sequence: Synthetic polypeptide
MAADGYLPDWLEDNLSEGIREWWALKPGAPQPKANQQHQDNARGLVLPGYKYLGPGNGLDKGEPVNAADAAALEHDKAYDQQLKAGDNPYLKYNHADAEFQERLKEDTSFGGNLGRAVFQAKRRLLEPLGLVEEAAKTAPGKKRPVEQSPQEPDSSAGIGKSGAQPAKKRLNFGQTGDTESVPDPQPIGEPPAAPSGVGSLTMASGGGAPVADNNEGADGVGSSSGNWHCDSQWLGDRVITTSTRTWALPTYNNHLYKQISNSTSGGSSNDNAYFGYSTPWGYFDFNRFHCHFSPRDWQRLINNNWGFRPKRLNFKLFNIQIKEVTDNNGVKTIANNLTSTVQVFTDLDYQLPYVLGSAHEGCLPPFPADVFMIPQYGYLTLNDGSQAVGRSSFYCLEYFPSQMLRTGNNFQFSYEFENVPFHSSYAHSQSLDRLMNPLIDQYLHYLSKTINGSGQNQQTLKFSVAGPSNMAVQGRNYIPGPSYRQQRVSTTVTQNNNSEFAWPGASSWALNGRNSLMNPGPAMASYKEGEDSFFPLSGSLIFGKQGTGRDNVDADKVMITNEEEIKTTNPVATESYGQVATNHQSAQAQAQTGWVQNQGILPGMVWQDRDVYLQGPIWAKIPHTDGNFHPSPLMGGFGMKHPPPQTLIKNTPVPADPPTAFNKDKLNSFITQYSTGQVSVEIEWELQKENSKRWNPEIQYTSNYYKSNNVEFAVNTEGVYSEPRPIGTRYLTRNL

SEQ ID NO: 682 - protein, 736 aa, Artificial Sequence
  Description of Artificial Sequence: Synthetic polypeptide
MAADGYLPDWLEDNLSEGIREWWALKPGAPQPKANQQHQDNARGLVLPGYKYLGPGNGLDKGEPVSAADAAALEHDKAYDQQLKAGDNPYLKYNHADAEFQERLKEDTSFGGNLGRAVFQAKKRLLEPLGLVEEAAKTAPGKKRPVEQSPQEPDSSAGIGKSGAQPAKKRLNFGQTGDTESVSDPQPIGEPPAAPSGVGSLTMASGGGAPVADNNEGADGVGSSSGNWHCDSQWLGDRVITTSTRTWALPTYNNHLYKQISNSTSGGSSNDNAYFGYSTPWGYFDFNRFHCHFSPRDWQRLINNNWGFRPKRLNFKLFNIQVKEVTDNNGVKTIANNLTSTVQVFTDSDYQLPYVLGSAHEGCLPPSPADVFMIPQYGYLTLNDGSQAVGRSSFYCLEYFPSQMLRTGNNFQFSYEFENVPFHSSYAHSQSLDRLMNPLIDQYLHYLSKTINGSGQNQQTLKFSVAGPSNMAVQGRNYIPGPSYRQQRVSTTVTQNNNSEFAWPGASSWALNGRNSLMNPGPAMASYKEGEDSFFPLSGSLIFGKQGTGRDDVDADKVIITNEEEIKTTNPVATESYGQVATNHQSAQAQAQTGWVQNQGILPGMVWQDRDVYLQGPIWAKIPHTDGNFHPSPLMGGFGMKHPPPQTLIKNTPVPADPPTAFNKDKLNSFITQYSTGQVSVEIEWELQKENSKRWNPEIQYTSNYYKSNNVEFAVNTEGVYSEPRPIGTRYLTRNL

SEQ ID NO: 683 - protein, 736 aa, Artificial Sequence
  Description of Artificial Sequence: Synthetic polypeptide
MAADGYLPDWLEDNLSEGIREWWALKPGAPQPKANQQHQDNARGLVLPGYKYLGPGNGLDKGEPVNAADAAALEHDKAYDQQLKAGDNPYLKYNHAGAEFQERLKEDTSFGGNLGRAVFQAKKRLLEPLGLVEEAAKTAPGKKRPVEQSPQEPDSSAGIGKSGAQPAKKRLNFGQTGDTESVPDPQPIGEPPAAPSGVGSLTMASGGGAPVADNNEGAGGVGSSSGNWHCDSQWLGDRVVTTSTRTWALPTYNNHLYKQISNSTSGGSSNDNAYFGYSTPWGYFDFNRFHCHFSPRDWQRLINNNWGFRPKRLNFKLFNIQVKEVTDNNGVKTIANNLTSTVQVFTDSDYQLPYVLGSAHGGCLPPFPADVFMIPQYGYLTLNDGSQAVGRSSFYCLEYFPSQMLRTGNNFQFSYEFENVPFHSSYAHSQSLDRLMNPLIDQYLHYLSKTINGSGQNQQTLKFSVAGPSNMAVQGRSYIPGPSYRQQRVSTTVTQNNNSEFAWPGASSWALNGRNSLMNPGPAMASYKEGEDSFFPLSGSLIFGKQGTGRDNVDADKVMITNEEEIKTTNPVATESYGQVATNHQSAQAQAQTGWVQNQGILPGMVWQDRDVYLQGPIWAKIPHTDGNFHPSPLMGGFGMKHPPPQTLIKNTPVPADPPTAFNKDKLNSFITQYSTGQVSVEIEWELQKENSKRWNPEIQYTSNYYKSNNVEFAVNTEGVYSEPRPIGTRYLTRNL

SEQ ID NO: 684 - protein, 736 aa, Artificial Sequence
  Description of Artificial Sequence: Synthetic polypeptide
MAADGYLPDWLEDNLSEGIREWWALKPGAPQPKANQQHQDNARGLVLPGYKYLGPGNGLDKGEPVNAADAAALEHDKAYDQQLKAGDNPYLKYNHADAEFQERLKEDTSFGGNLGRAVFQAKKRLLEPLGLVEEAAKTAPGKKRPVEQSPQEPDSSAGIGKSGAQPAKKRLNFGQTGDTESVPDPQPIGEPPAAPSGVGSLTMASGGGAPVADNNEGADGVGSSSGNWHCDSQWLGDRVVTTSTRTWALPTYNNHLYKQISNSTSGGSSNDNAYFGYSTPWGYFDFNRFHCHFSPRDWQRLINNNWGFRPKRLNFKLFNIQVKEVTDNNGVKTIANNLTSTVQVFTDSDYQLPYVLGSAHEGCLPPFPADVFMIPQYGYLTLNDGSQAVGRSSFYCLEYFPSQMLRTGNNFQFSYEFENVPFHSSHAHSQSLDRLMNPLIDQYLHYLSKTINGSGQNQQTLKFSVAGHSNMAVQGRNYIPGPSYRQQRVSTTVTQNNNSEFAWPGASSWALNGRNSLMNPGPAMASYKEGEDSFFPLSGSLIFGKQGTGRDNVDADKVMITNEEEIKTTNPVATESYGQVATNHQSAQAQAQTGWVQNQGILPGMVWQDRDVYLQGPIWAKIPHTDGNFHPSPLMGGFGMKHPPPQTLIKNTPVPADPPTAFNKDKLNSFITQYSTGQVSVEIGWELQKENSKRWNPEIQYTSNYYKSNNVEFAVNTEGVYSEPRPIGTRYLTRNL

SEQ ID NO: 685 - protein, 736 aa, Artificial Sequence
  Description of Artificial Sequence: Synthetic polypeptide
MAADGYLPDWLEDNLSEGIREWWALKPGAPQPKANQQHQDNARGLVLPGYKYLGPGNGLDKGEPVNAADAAALEHDKAYDQQLKAGDNPYLKYNHADAEFQERLKEDTSFGGNLGRAVFQAKKRLLEPLGLVEEAAKTAPGKKRPVEQSPQEPDSSAGIGKSGAQPAKKRLNFGQTGDTESVPDPQPIGEPPAAPSGVGSLTMASGGGAPVADNNEGADGVGSSSGNWHCDSQWLGDRVITTSTRTWALPTYNNRLYKQISNSTSGGSSNDNAYFGYSTPWGYFDFNRFHCHFSPRDWQRLINNNWGFRPKRLNFKPFNIQVKEVTDNNGVKTIANNLTSTVQVFTDSDYQLPYVLGSAHEGCLPPFPADVFMIPQYGYLTLNDGSQAVGRSSFYCLEYFPSQMLRTGNNFQFSYEFENVPFHSSYAHSQSLDRLMNPLIDQYLHYLSKTINGSGQNQQTLKFSVAGPSNMAVQGRNYIPGPSYRQQRVSTTVTQNNNSEFAWPGASSWALNGRNSLMNPGPAMASYKEGEDSFFPLSGSLIFGKQGTGRDNVDADKVMITNEEEIKTTNPVATESYGQVATNHQSAQAQAQTGWVQNQGILPGMVWQDRDVYLQGPIWAKIPHTDGNFHPSPLMGGFGMKHPPPQTLIKNTPVPADPPTAFNKDKLNSFITQYSTGQVSVEIEWELQKENSKRWNPEIQYTSNYYKSNNVEFAVNTEGVYSEPRPIGTRYLTRNL

SEQ ID NO: 686 - protein, 736 aa, Artificial Sequence
  Description of Artificial Sequence: Synthetic polypeptide
MAADGYLPDWLEDNLSEGIREWWALKPGAPQPKANQQHQDNARGLVLPGYKYLGPGNGLDKGEPVNAADAAALEHDKAYDQQLKAGDNPYLKYNHADAEFQERLKEDTSFGGNLGRAVFQAKKRLLEPLGLVEEAAKTAPGKKRPVEQSPQEPDSSAGIGKSGAQPAKKRLNFGQTGDTESVPDPQPIGEPPAAPSGVGSLTMASGGGAPVADNNEGADGVGSSSGNWHCDSQWLGDRVITTSTRTWALPTYNNHLYKQISNSTSGGSSNDNAYFGYSTPWGYFDFNRFHCHFSPRDWQRLINNNWGFRPKRLNFKLFNIQVKEVTDNNGVKTIANNLTSTVQVFTDSDYQLPYVLGSAHEGCLPPFPADVFMIPQYGYLTLNDGSQAVGRSSFYCLEYFPSQMLRTGNNFQFSYEFENVPFHSSYAHSQSLDRLMNPLIDQYLHYLSKTINGSGQNQQTLKFSVAGPSNMAVQGRNYIPGPSYRQQRVSTTVTQNNNSEFAWPGASSWALNGRNSLMNPGPAMASYKEGEDSFFPLSGSLIFGKQGTGRDNVDADKVMITNEEEIKTTNPVATESYGQVATNHQSAQAQAQTGWVQNQGILPGMVWQDRDVYLQGPIWAKIPHTDGNFHPSPLMGGFGMKHPPPQTLIKNTPVPADPPTAFNKDKLNSFITQYSTGQVSVEIEWELQKENSKRWNPEIQYTSNYYKSNNVEFAVNTEGVYSEPRPIGTRYLTRNL

SEQ ID NO: 687 - protein, 736 aa, Artificial Sequence; identical to SEQ ID NO: 686
  Description of Artificial Sequence: Synthetic polypeptide

SEQ ID NO: 688 - protein, 736 aa, Artificial Sequence
  Description of Artificial Sequence: Synthetic polypeptide
MAADGYLPDWLEDNLSEGIREWWDLKPGAPKPKANQQKQDDGRGLVLPGYKYLGPFNGLDKGEPVNAADAAALEHDKAYDQQLKAGDNPYLRYNHADAEFQERLQEDTSFGGNLGRAVFQAKKRVLEPFGLVEEGAKTAPGKKRPVEQSPQEPDSSSGIGKSGQQPAKKRLNFGQTGDSESVPDPQPLGEPPATPAALGPTTMASGGGAPMADNNEGADGVGNASGNWHCDSTWLGDRVITTSTRTWALPTYNNHLYKQISSASTGASNDNHYFGYSTPWGYFDFNRFHCHFSPRDWQRLINNNWGFRPKRLNFKLFNIQVKEVTTNDGVTTIANNLTSTVQVFSDSEYQLPYVLGSAHQGCLPPFPADVFMIPQYGYLTLNNGSKAVGRSSFYCLEYFPSQMLRTGNNFTFSYTFEEVPFHSSYAHSQSLDRLMNPLIDQYLYYLNRTQNQSGSAQNKDLLFSRGSPAGMSVQPKNWLPGPCYRQQRVSKTKTDNNNSNFTWTGASKYNLNGRESIINPGTAMASHKDDEDKFFPMSGVMIFGKESAGASNTALDNVMITDEEEIKATNPVATERFGTVAVNFQSSSTDPATGDVHVMGALPGMVWQDRDVYLQGPIWAKIPHTDGHFHPSPLMGGFGLKHPPPQILIKNTPVPANPPAEFSATKFASFITQYSTGQVSVEIEWELQKENSKRWNPEVQYTSNYAKSANVDFTVDNNGLYTEPRPIGTRYLTRPL

SEQ ID NO: 689 - protein, 736 aa, Artificial Sequence
  Description of Artificial Sequence: Synthetic polypeptide
MAADGYLPDWLEDNLSEGIREWWDLKPGAPKPKANQQKQDDGRGLVLPGYKYLGPFNGLDKGEPVNAADAAALEHDKAYDQQLKAGDNPYLRYNHADAEFQERLQEDTSFGGNLGRAVFQAKKRVLEPLGLVEEGAKTAPGKKRPVEQSPQEPDSSSGIGKTGQQPAKKRLNFGQTGDSESVPDPQPLGEPPATPAAVGPTTMASGGGAPMADNNEGADGVGNASGNWHCDSTWLGDRVITTSTRTWALPTYNNHLYKQISSTSTGASNDNHYFGYSTPWGYFDFNRFHCHFSPRDWQRLINNNWGFRPKRLNFKLFNIQVKEVTTNDGVTTIANNLTSTVQVFSDSEYQLPYVLGSAHQGCLPPFPADVFMIPQYGYLTLNNGSQAVGRSSFYCLEYFPSQMLRTGNNFTFSYTFEEVPFHSSYAHSQSLDRLMNPLIDQYLYYLNRTQNQSGSAQNKDLLFSRGSPAGMSVQPKNWLPGPCYRQQRVSKTKTDNNNSNFTWTGASKYNLNGRESIINPGTAVASHKDDEDKFFPMSGVMIFGKESAGASNTALDNVMITDEEEIKATNPVATERFGTVAVNFQSSSTDPATGDVHAMGALPGMVWQDRDVYLQGPIWAKIPHTDGHFHPSPLMGGFGLKNPPPQILIKNTPVPANPPAEFSATKFASFITQYSTGQVSVEIEWELQKENSKRWNPEVQYTSNYAKSANVDFTVDNNGLYTEPRPIGTRYLTRPL

SEQ ID NO: 690 - protein, 736 aa, Artificial Sequence
  Description of Artificial Sequence: Synthetic polypeptide
MAADGYLPDWLEDNLSEGIREWWALKPGAPQPKANQQHQDNARGLVLPGYKYLGPGNGLDKGEPVNAADAAALEHDKAYDQQLKAGDNPYLKYNHADAEFQERLKEDTSFGGNLGRAVFQAKKRLLEPLGLVEEAAKTAPGKKRPVEQSPQEPDSSAGIGKSGAQPAKKRLNFGQTGDTESVPDPQPIGEPPAAPSGVGSLTMASGGGAPVADNNEGADGVGSSSGNWHCDSQWLGDRVITTSTRTWALPTYNNHLYKQISNSTSGGSSNDNAYFGYSTPWGYFDFNRFHCHFSPRDWQRLINNNWGFRPKRLNFKLFNIQVKEVTDNNGVKTIANNLTSTVQVFTDSDYQLPYVLGSAHEGCLPPFPADVFMIPQYGYLTLNDGSQAVGRSSFYCLEYFPSQMLRTGNNFQFGYEFENVPFHSSYAHSQSLDRLMNPLIDQYLYYLSKTINGSGQNQQTLKFSVAGPSNMAVQGRNYIPGPSYRQQRVSTTVTQNNNSEFAWPGASSWALNGRNSLMNPGPAMASHKEGEDRFFPLSGSLIFGKQGTGRDNVDADKVMITNEEEIKTTNPVATESYGQVATNHQSAQAQAQTGWVQNQGILPGMVWQDRDVYLQGPIWAKIPHTDGNFHPSPLMGGFGMKHPPPQILIKNTPVPADPPTAFNKDKLNSFITQYSTGQVSVEIEWELQKENSKRWDPEIQYTSNYYKSNNVEFAVNTEGVYSEPRPIGTRYLTRNL

SEQ ID NO: 691 - protein, 736 aa, Artificial Sequence
  Description of Artificial Sequence: Synthetic polypeptide
MAADGYLPDWLEDNLSEGIREWWALKPGAPQPKANQQHQDNARGLVLPGYKYLGPGNGLDKGEPVNAADAAALEHDKAYDQQLKAGDNPYLKYNHADAEFQERLKEDTSFGGNLGRAVFQAKKRLLEPLGLVEEAAKTAPGKKRPVEQSPQEPDSSAGIGKSGAQPAKKRLNFGQTGDTESVPDPQPIGEPPAAPSGVGSLTMASGGGAPVADNNEGADGVGSSSGNWHCDSQWLGDRVITTSTRTWALPTYNNHLYKQISNSTSGGSSNDNAYFGYSTPWGYFDFNRFHCRFSPRDWQRLINNNWGFRPKRLNFKLFNIQVKEVTDNNGVKTIANNLTSTVQVFTDSDYQLPYVLGSAHEGCLPPFPADVFMIPQYGYLTLNDGSQAVGRSSFYCLEYFPSQMLRTGNNFQFSYEFENVPFHSSYAHSQSLDRLMNPLIDQYLYYLSKTINGSGQNQQTLKFSVAGPSNMAVQGRNYIPGPSYRQQRVSTTVTQNNNSEFAWPGASSWALNGRNSLMNPGPAMASHKEGEDRFFPLSGSLIFGKQGTGRDNVDADKVMITNEEEIKTTNPVATESYGQVATNHQSAQAQAQTGWVQNQGILPGMVWQDRDVYLQGPIWAKIPHTDGNFHPSPLMGGFGMKHPPPQILIKNAPVPADPPTAFNKDKLNSFITQYSTGQVSVEIEWELQKENSKRWNPEIQYTSNYYKSNNVEFAVNTEGVYSEPRPIGTRYLTRNL

SEQ ID NO: 692 - protein, 736 aa, Artificial Sequence
  Description of Artificial Sequence: Synthetic polypeptide
MAADGYLPDWLEDNLSEGIREWWALKPGAPQPKANQQHQDNARGLVLPGYKYLGPGNGLDKGEPVSAADAAALEHDKAYDQQLKAGDNPYLKYNHADAEFQERLKEDTSFGGNLGRAVFQAKKRLLEPLGLVEEAAKTAPGKKRPVEQSPQEPDSSAGIGKSGAQPAKKRLNFGQTGDTESVPDPQPIGEPPAAPSGVGSLTMASGGGAPVADNNEGADGVGSSSGNWHCDSQWLGDRVITTSTRTWALPTYNNHLYKQISNSTSGGSSNDNAYFGYSTPWGYFDFNRFHCHFSPRDWQRLINNNWGFRPKRLNFKLFNIQVKEVTDNNGVKTIANNLTSTVQVFTDSDYQLPYVLGSAHEGCLPPFPADVFMIPQYGYLTLNDGSQAVGRSSFYCLEYFPSQMLRTGNNFQFSYEFENVPFHSSYAHSQSLDRLMNPLIDQYLYYLSKTINGSGQNQQTLKFSVAGPSNMAVQGRNYIPGPSYRQQRVSTTVTQNNNSEFAWPGASSWALNGRNSLMNPGPAMASHKEGEDRFFPLSGSLIFGKQGTGRDNVDADKVMITNEEEIKTTNPVATESYGQVATNHQSAQAQAQTGWVQNQGILPGMVWQDRDVYLQGPIWAKIPHTDGNFHPSPLMGGFGMKHPPPQILIKNTPVPADPPTAFNKDKLNSFITQYSTGQVSVEIEWELQKENSKRWNPEIQYTSNYYKSNNVEFAVNTEGVYSEPRPIGTRYLTRNL

SEQ ID NO: 693 - protein, 736 aa, Artificial Sequence
  Description of Artificial Sequence: Synthetic polypeptide
MAADGYLPDWLEDNLSEGIREWWALKPGAPQPKANQQHQDNARGLVLPGYKYLGPGNGLDKGEPVNAADAAALEHDKAYDQQLKAGDNPYLKYNHADAEFQERLKEDTSFGGNLGRAVFQAKKRLLEPLGLVEEAAKTAPGKKRPVEQSPQEPDSSAGIGKSGAQPAKKRLNFGQTGDTESVPDPQPIGEPPAAPSGVGSLTMASGGGAPVADNNEGADGVGSSSGNWHCDSQWLGDRVITTSTRTWALPTYNNHLYKQISNSTSGGSSNDNAYFGYSTPWGYFDFNRFHCHFSPRDWQRLINNNWGFRPKRLNFKLFNIQVKEVTDNNGVKTIANNLTSTVQVFTDSDYQLPYVLGSAHEGCLPPFPADVFMIPQYGYLTLNDGSQAVGRSSFYCLEYFPSQMLRTGNNFQFSYEFENVPFHSSYAHSQSLDRLMNPLIDQYLYYLSKTINGSGQNQQTLKFSVAGPSNTAVQGRNYIPGPSYRQQRVSTTVTQNNNSEFAWPGASSWALNGRNSLMNPGPAMASHKEGEDRFFPLSGSLIFGKQGTGRDNVDADKVMITNEEEIKTTNPVATESYGQVATNHQSAQAQAQTGWVQNQGILPGMVWQDRDVYLQGPIWAKIPHTDGNFHPSPLMGGFGMKHPPPQILIKNTPVPADPPTAFNKDKLNSFITQYSTGQVSVEIEWELQKENSKRWNPEIQYTSNYYKSNNVEFAVNTEGVYSEPRPIGTRYLTRNL

SEQ ID NO: 694 - protein, 736 aa, Artificial Sequence
  Description of Artificial Sequence: Synthetic polypeptide
MAADGYLPDWLEDNLSEGIREWWALKPGAPQPKANQQHQDNARGLVLPGYKYLGPGNGLDKGEPVNAADAAALEHDKAYDQQLKAGDNPYLKYNHADAEFQERLKEDTSFGGNLGRAVFQAKKRLLEPLGLVEEAAKTAPGKKRPVEQSPQEPDSSAGIGKSGAQPAKKRLNFGQTGDTESVPDPQPIGEPPAAPSGVGSLTMASGGGAPVADNNEGADGVGSSSGNWHCDSQWLGDRVITTSTRTWALPTYNNHLYKQISNSTSGGSSNDNAYFGYSTPWGYFDFNRFHCHFSPRDWQRLINNNWGFRPKRLNFKLFNIQVKEVTDNNGVKTIANNLTSTVQVFTDSDYQLPYVLGSAHEGCLPPFPADVFMIPQYGYLTLNDGSQAVGRSSFYCLEYFPSQMLRTGSNFQFSYEFENVPFHSSYAHSQSLDRLMNPLIDQYLYYLSKTINGSGQNQQTLKFSVAGPSNMAVQGRNYIPGPSYRQQRVSTTVTQNNNSEFAWPGASSWALNGRNSLMNPGPAMASHKEGEDRFFPLSGSLIFGKQGTGRDNVDADKVMITNEEEIKTTNPAATESYGQVATNHQSAQAQAQTGWVQNQGILPGMVWQDRDVYLQGPIWAKIPHTDGNFHPSPLMGGFGMKHPPPQILIKNTPVPADPPTAFNKDKLNSFITQYSTGQVSVEIEWELQKENSKRWNPEIQHTSNYYKSNNVEFAVNTEGVYSEPRPIGTRYLTRNL

SEQ ID NO: 695 - protein, 736 aa, Artificial Sequence
  Description of Artificial Sequence: Synthetic polypeptide
MAADGYLPDWLEDNLSEGIREWWALKPGAPQPKANQQHQDNARGLVLPGYKYLGPGNGLDKGEPVNAADAAALEHDKAYDQQLKAGDNPYLKYNHADAEFQERLKEDTSFGGNLGRAVFQAKKRLLEPLGLVEEAAKTAPGKKRPVEQSPQEPDSSAGIGKSGAQPAKKRLNFGQTGDTESVPDPQPIGEPPAAPSGVGSLTMASGGGAPVADNNEGADGVGSSSGNWHCDSQWLGDRVITTSTRTWALPTYNNHLYKQISNSTSGGSSNDNAYFGYSTPWGYFDFNRFHCHFSPRDWQRLINNNWGFRPKRLNFRLFNIQVKEVTDNNGVKTIANNLTSTVQVFTDSDYQLPYVLGSAHEGCLPPFPADVFMIPQYGYLTLNDGSQAVGRSSFYCLEYFPSQMLRTGNNFQFSYEFENVPFHSSYAHSQSLDRLMNPLIDQYLYYLSKTINGSGQNQQTLKFSVAGPSNMAVQGRNYIPGPSYRQQRVSTTVTQNNNSEFAWPGASSWALNGRNSLMNPGPAMASHKEGEDRFFPLSGSLIFGKQGTGRDNVDADKVMITNEEEIKTTNPVATESYGQVATNHQSAQAQAQTGWVQSQGILPGMVWQDRDVYLQGPIWAKIPHTDGNFHPSPLMGGFGMKHPPPQILIKNTPVPADPPTAFNKDKLNSFITQYSTGQVSVEIEWELQKENSKRWNPEIQYTSNYYKSNNVEFAVNTEGVYSEPRPIGTRYLTRNL

SEQ ID NO: 696 - protein, 735 aa, Artificial Sequence
  Description of Artificial Sequence: Synthetic polypeptide
MAADGYLPDWLEDNLSEGIREWWALKPGAPQPKANQQHQDNARGLVLPGYKYLGPGNGLDKGEPVNAADAAALEHDKAYDQQLKAGDNPYLKYNHADAEFQERLKEDTSFGGNLGRAVFQAKKRLLEPLGLVEEAAKTAPGKKRPVEQSPQEPDSSAGIGKSGAQPAKKRLNFGQTGDTESVPDPQPIGEPPAAPSGVGSLTMASGGGAPVADNNEGADGVGSSSGNWHCDSQWLGDRVITTSTRTWALPTYNNHLYKQISNSTSGGSSNDNAYFGYSTPWRYFDFNRFHCHFSPRDWQRLINNWGFRPKRLNFKLFNIQVKEVTDNNGVKTIANNLTSTVQAFTDSDYQLPYVLGSAHEGCLPPFPADVFMIPQYGYLTLNDGSQAVGRSSFYCLEYFPSQMLRTGNNFQFSYEFENVPFHSSYAHSQSLDRLMNPLIDQYLYYLSKTINGSGQNQQTLKFSVAGPSNMAVQGRNYIPGPSYRQQRVSTTVTQNNNSEFAWPGASSWALNGRNSLMNPGPAMASHKEGEDRFFPLSGSLIFGKQGTGRDNVDADKVMITNEEEIKTTNPVATESYGQVATNHQSAQAQAQTGWVQNQGILPGMVWQDRDVYLQGPIWAKIPHTDGNFHPSPLMGGFGMKHPPPQILIKNTPVPADPPTAFNKDELNSFITQYSTGQVSVEIEWELQKENSKRWNPEIQYTSNYYKSNNVEFAVNTEGVYSEPRPIGTRYLTRNL

SEQ ID NO: 697 - protein, 735 aa, Artificial Sequence
  Description of Artificial Sequence: Synthetic polypeptide
MAADGYLPDWLEDNLSEGIREWWALKPGAPQPKANQQHQDNARGLVLPGYKYLGPGNGLDKGEPVNAADAAALEHDKAYDQQLKAGDNPYLKYNHADAEFQERLKEDTSFGGNLGRAVFQDKKRLLEPLGLVEEAAKTAPGKKRPVEQSPQEPDSSAGIGKSGAQPAKKRLNFGQTGDTESVPDPQPIGEPPAAPSGVGSLTMASGGGAPVADNNEGADGVGSSSGNWHCDSQWLGDRVITTSTRTWALPTYNNHLYKQISNSTSGGSSNDNAYFGYSTPWGYFDFNRFHCHFSPRDWQRLINNWGFRPKRLNFKLFNIQVKEVTDNNGVKTIANNLTSTVQVFTDSDYQLPYVLGSAHEGCLPPFPADVFMIPQYGYLTLNDGSQAVGRSSFYCLEYFPSQMLRTGNNFQFSYEFENVPFHSSYAHSQSLDRLMNPLIDQYLYYLSKTINGSGQNQQTLKFSVAGPSNMAVQGRNYIPGPSYRQQRVSTTVTQNNNSEFAWPGASSWALNGRNSLMNPGPAMASHKEGEDRFFPLSGSLIFGKQGTGRDNVDADKVMITNEEEIKTTNPVATESYGQVATNHQSAQAQAQTGWVQNQGILPGMVWQDRDVYLQGPIWAKIPHTDGNFHPSPLMGGFGMKHPPPQILIKNTPVPADPPTAFNKDKLNSFITQYSTGQVSVEIEWELQKENSKRWNPEIQYTSNYYKSNNVEFAVNTEGVYSEPRPIGTRYLTRNL

SEQ ID NO: 698 - protein, 736 aa, Artificial Sequence
  Description of Artificial Sequence: Synthetic polypeptide
MAADGYLPDWLEDNLSEGIREWWALKPGAPQPKANQQHQDNARGLVLPGYKYLGPGNGLDKGEPVNAADAAALEHDKAYDQQLKAGDNPYLKYNHADAEFQERLKEDTSFGGNLGRAVFQAKKRLLEPLGLVEEAAKTAPGKKRPVEQSPQEPDSSAGIGKSGAQPAKKRLNFGQTGDTESVPDPQPIGEPPAAPSGVGSLTMASGGGAPVADNNEGADGVGSSSGNWHCDSQWLGDRAITTSTRTWALPTYNNHLYKQISNSTSGGSSNDNAYFGYSTPWGYFDFNRFHCHFSPRDWQRLINNNWGFRPKRLNFKLFNIQVKEVTDNNGVKTIANNLTSTVQVFTDSDYQLPYVLGSAHEGCLPPFPADVFMIPQYGYLTLNDGSQAVGRSSFYCLEYFPSQMLRTGNNFQFSYEFENVPFHSSYAHSQSLDRLMNPLIDQYLYYLSKTINGSGQNQQTLKFSVAGPSNMAVQGRNYIPGPSYRQQRVSTTVTQNNNSEFAWPGASSWALNGRNSLMNPGPAMASHKEGEDRFFPLSGSLIFGKQGTGRDNVDADKVMTTNEEEIKTTNPVATESYGQVATNHQSAQAQAQTGWVQNQGILPGMVWQDRDVYLQGPIWAKIPHTDGNFHPSPLMGGFGMKHPPPQILIKNTPVPADPPTAFNKDKLNSFITQYSTGQVSVEIEWELQKENSKRWNPEIQYTSNYYKSNNVEFAVNTEGVYSEPRPIGTRYLTRNL

SEQ ID NO: 699 - protein, 736 aa, Artificial Sequence
  Description of Artificial Sequence: Synthetic polypeptide
MAADGYLPDWLEDNLSEGIREWWALKPGAPQPKANQQHQDNARGLVLPGYKYLGPGNGLDKGEPVNAADAAALEHDKAYDQQLKAGDNPYLKYNHADAEFQERLKEDTSFGGNLGRAVFQTKKRLLEPLGLVEEAAKTAPGKKRPVEQSPQEPGSSAGIGKSGAQPAKKRLNFGQTGDTESVPDPQPIGEPPAAPSGVGSLTMASGGGAPVADNNEGADGVGSSSGNWHCDSQWLGDRVITTSTRTWALPTYNNHLYKQISNSTSGGSSNDNAYFGYSTPWGYFDFNRFHCHFSPRDWQRLINNNWGFRPKRLNFKLFNIQVKEVTDNNGVKTIANNLTSTVQVFTDSDYQLPYVLGSAHEGCLPPFPADVFMIPQYGYLTLNDGSQAVGRSSFYCLEYFPSQMLRTGNNFQFSYEFENVPFHSSYAHSQSLDRLMNPLIDQYLHYLSKTINGSGQNQQTLKFSVAGPSNMAVQGRNYIPGPSYRQQRVSTTVTQNNNSEFAWPGASSWALNGRNSLMNPGPAMASHKEGEDRFFPLSGSLIFGKQGTGRDNVDADKVMITNEEEIKTTNPVATESYGQVATNHQSAQAQAQTGWVQNQGILPGMVWQDRDVYLQGPIWAKIPHTDGNFHPSPLMGGFGMKHPPPQILIKNTPVPADPPTAFNKDKLNSFITQYSTGQVSVEIEWELQKENSKRWNPEIQYTSNYYKSNNVEFAVNTEGVYSEPRPIGTRYLTRNL

SEQ ID NO: 700 - protein, 736 aa, Artificial Sequence
  Description of Artificial Sequence: Synthetic polypeptide
MAADGYFPDWLEDNLSEGIREWWALKPGAPQPKANQQHQDNARGLVLPGYKYLGPGNGLDKGEPVNAADAAALEHDKAYDQQLKAGDNPYLKYNHADAEFQERLKEDTSFGGNLGRAVFQAKKRLLEPLGLVEEAAKTAPGKKRPVEQSPQEPDSSAGIGKSGAQPAKKRLNFGQTGDTESVPDPQPIGESPAAPSGVGSLTMASGGGAPVADNNEGADGVGSSSGNWHCDSQWLGDRVITTSTRTWALPTYNNHLYKQISNSTSGGSSNDNAYFGYSTPWGYFDFNRFHCHFSPRDWQRLINNNWGFRPKRLNFKLFNIQVKEVTDNNGVKTIANNLTSTVQVFTDSDYQLPYVLGSAHEGCLPPFPADVFMIPQYGYLTLNDGSQAVGRSSFYCLEYLPSQMLRTGNNFQFSYEFENVPFHSSYAHSQSLDRLMNPLIDQYLHYLSKTINGSGQNQQTLKFSVAGPSNMAVQGRNYIPGPSYRQQRVSTTVTQNNNSEFAWPGASSWALNGRNSLMNPGPAVASHKEGEDRFFPLSGSLIFGKQGTGRDNVDADKVMITNEEEIKTTNPVATESYGQVATNHQSAQAQAQTGWVQNQGILPGMVWQDRDVYLQGPIWAKIPHTDGNFHPSPLMGGFGMKHPPPQILIKNTPVPADPPTAFNKDKLNSFITQYSTGQVSVEIEWELQKENSKRWNPEIQYTSNYYKSNNVEFAVNTEGVYSEPRPIGTRYLTRNL

SEQ ID NO: 701 - protein, 736 aa, Artificial Sequence
  Description of Artificial Sequence: Synthetic polypeptide
MAADGYLPDWLEDNLSEGIREWWALKPGAPQPKANQQHQDNARGLVLPGYKYLGPGNGLDKGEPVNAADAAALEHDKAYDQQLKAGDNPYLKYNHADAEFQERLKEDTSFGGNLGRAVFQAKKRLLEPLGPVEEAAKTAPGKKRPVEQSPQEPDSSAGIGKSGAQPAKKRLNFGQTGDTESVPDPQPIGEPPAAPSGVGSLTMASGGGAPVADNNEGADGVGSSSGNWHCDSQWLGDRVITTSTRTWALPTYNNHLYKQISNSTSGGSSNDNAYFGYSTPWGYFDFNRFHCHFSPRDWQRLINNNWGFRPKRLNFKLFNIQVKEVTDNNGVKTIANNLTSTVQVFTDSDYQLPYVLGSAHEGCLPPFPADVFMIPQYGYLTLNDGSQAVGRSSFYCLEYFPSQMLRTGNNFQFSYEFENVPFHSSYAHSQSLDRLMNPLIDQYLYYLSKTINGSGQNQQTLKFSVAGPSNMAVQGRNYIPGPSYRQQRVSTTVTQNNNSEFAWPGASSWALNGRNSLMNPGPAMASHKEGEDRFFPLSGSLIFGKQGTGRDNVDADKVMITNEEEIKTTNPVATESYGQAATNHQSAQAQAQTGWVQNQGILPGMVWQDRDVYLQGPIWAKIPHTDGNFHPSPLMGGFGMKHPPPQILIKNTPVPADPPTAFNKDKLNSFITQYSTGQVSVEIEWELQKENSKRWNPEIQYTSNYYKSNNVEFAVNTEGVYSEPRPIGTRYLTRNL

SEQ ID NO: 702 - protein, 736 aa, Artificial Sequence
  Description of Artificial Sequence: Synthetic polypeptide
MAADGYLPDWLEDNLSEGIREWWALKPGAPQPKANQQHQDNARGLVLPGYKYLGPGNGLDKGEPVNAADAAALEHDKAYDQQLKAGDNPYLKYNHADAEFQERLKEDTSFGGNLGRAVFQAKKRLLEPLGPVEEAAKTAPGKKRPVEQSPQEPDSSAGIGKSGAQPAKKRLNFGQTGDTESVPDPQPIGEPPAAPSGVGSLTMASGGGAPVADNNEGADGVGSSSGNWHCDSQWLGDRVITTSTRTWALPTYNNHLYKQISNSTSGGSSNDNAYFGYSTPWGYFDFNRFHCHFSPRDWRRLINNNWGFRPKRLNFKLFNIQVKEVTDNNGVKTIANNLTSTVQVFTDSDYQLPYVLGSAHEGCLPPFPADVFMIPQYGYLTLNDGSQAVGRSSFYCLEYFPSQMLRTGNNFQFSYEFENVPFHSSYAHSQSLDRLMNPLIDQYLYYLSKTINGSGQNQQTLKFSVAGPSNMAVQGRNYIPGPSYRQQRVSTTVTQNNNSEFAWPGASSWALNGRNSLMNPGPAMASHKEGEDRFFPLSGSLIFGKQGTGRDNVDADKVMITNEEEIKTTNPVATESYGQVATNHQSAQAQAQTGWVQNQGILPGMVWQDRDVYLQGPIWAKIPHTDGNFHPSPLMGGFGMKHPPPQILIKNTPVPADPPTAFNKDKLNSFITQYSTGQVSVEIEWELQKENSKRWNPEIQYTSNYYKSNNVEFAVNTEGVYSEPRPIGTRYLTRNL

SEQ ID NO: 703 - protein, 736 aa, Artificial Sequence
  Description of Artificial Sequence: Synthetic polypeptide
MAADGYLPDWLEDNLSEGIREWWALKPGAPQPKANQQHQDNARGLVLPGYKYLGPGNGLDKGEPVNAADAAALEHDKAYDQQLKAGDNLYLKYNHADAEFQERLKEDTSFGGNLGRAVFQAKKRLLEPLGLVEEAAKTAPGKKRPVEQSPQEPDSSAGIGKSGAQPAKKRLNFGQTGDTESVPDPQPIGEPPAAPSGVGSLTMASGGGAPVADNNEGADGVGSSSGNWHCDSQWLGDRVITTSTRTWALPTYNNHLYKQISNSTSGGSSNDNAYFGYSTPWGYFDFNRFHCHFSPRDWQRLINNNWGFRPKRLNFKLFNIQVKEVTDNNGVKTIANNLTSTVQVFTDSDYQLPYVLGSAHEGCLPPFPADVFMIPQYGYLTLNDGSQAVGRSSFYCLEYFPSQMLRTGNNFQFSYEFENVPFHSSYAHSQSLDRLMNPLIDQYLHYLSKTINGSGQNQQTLKFSVAGPSNMAVQGRNYIPGPSYRQQRVSTTVTQNNNSEFAWPGASSWALNGRNSLMNPGPAMASHKEGEDRFFPLSGSLIFGKQGTGRDNVDADKVMITNEEEIKTTNPVATESYGQVATNHQSAQAQAQTGWVQNQGILPGMVWQDRDVYLQGPIWAKIPHTDGNFHPSPLMGGFGMKHPPPQILIKNTPVPADPPTAFNKDKLNSFITQYSTGQVSVEIEWELQKENSKRWNPEIQYTSNYYKSNNVEFAVNTEGVYSEPRPIGTRYLTRNL

SEQ ID NO: 704 - protein, 736 aa, Artificial Sequence
  Description of Artificial Sequence: Synthetic polypeptide
MAADGYLPDWLEDNLSEGIREWWALKPGAPQPKANQQHQDNARGLVLPGYKYLGPGNGLDKGEPVNAADAAALEHDKAYDQQLKAGDNPYLKYNHADAEFQERLKEDTSFGGNLGRAVFQAKKRLLEPLGLVEEAAKTAPGKKRPVEQSPQEPDSSAGIGKSGAQPAKKRLNFGQTGDTESVPDPQPIGEPPAAPSGVGSLTMASGGGAPVADNNEGADGVGSSSGNWHCDSQWLGDRVITTSTRTWALPTYNNHLYKQISNSTSGGSSNDNAYFGYSTPWGYFDFNRFHCHFSPRDWQRLINNNWGFRPKRLNFKLFNIQVKEVTDNNGVKTIANNLTSTVQVFTDSDYQLPYVLGSAHEGCLPPFPADVFMIPQYGYLTLNDGSQAVGRSSFYCLEYFPSQMLRTGNNFQFSYEFENVPFHSSYAHSQSLDRLMNPLIDQYLHYLSKTINGSGQNQQTLKFSVAGPSNMAVQGRNYIPGPSYRQQRVSTTVTQNNNSEFAWPGASSWALNGRNSLMNPGPAMASHKEGEDRFFPLSGSLIFGKQGTGRDNVDADKVMITNEEEIKTTNPVATESYGQVATNHQSAQAQAQTGWVQNQGILPGMVWQDRDVYLQGPIWAKIPHTDGNFHPSPLMGGFGMKHPPPQILIKNTPVPADPPTAFNKDKLNSFITQYSTGQVSVEIEWELQKENSKRWNPEIQYTSNYYKSNNVEFAVNTEGVYSEPRPIGTRYLTRNL

SEQ ID NO: 705 - protein, 736 aa, Artificial Sequence
  Description of Artificial Sequence: Synthetic polypeptide
  MOD_RES (442)..(442): Xaa = any amino acid
MAADGYLPDWLEDNLSEGIREWWALKPGAPQPKANQQHQDNARGLVLPGYKYLGPGNGLDKGEPVNAADAAALEHDKAYDQQLKAGDNPYLKYNHADAEFQERLKEDTSFGGNLGRAVFQAKKRLLEPLGLVEEAAKTAPGKKRPVEQSPQEPDSSAGIGKSGAQPAKKRLNFGQTGDTESVPDPQPIGEPPAAPSGVGSLTMASGGGAPVADNNEGADGVGSSSGNWHCDSQWLGDRVITTSTRTWALPTYNNHLYKQISTSTSGGSSNDNAYFGYSTPWGYFDFNRFHCHFSPRDWQRLINNNWGFRPKRLNFKLFNIQVKEVTDNNGVKTIANNLTSTVQVFTDSDYQLPYVLGSAHEGCLPPFPADVFMIPQYGYLTLNDGSQAVGRSSFYCLEYFPSQMLRTGNNFQFSYEFENVPFHSSYAHSQSLDRLMNPLIDXYLHYLSKTINGSGQNQQTLKFSVAGPSNMAVQGRNYIPGPSYRQQRVSTTVTQNNNSEFAWPGASSWALNGRNSLMNPGPAMASHKEGEDRFFPLSGSLIFGKQGTGRDNVDADKVMITNEEEIKTTNPVATESYGQVATNHQSAQAQAQTGWVQNQGILPDMVWQDRDVYLQGPIWAKIPHTDGNFHPSPLMGGFGMKHPPPQILIKNTPVPADPPTAFNKDKLNSFITQYSTGQVSVEIEWELQKENSKRWNPEIQYTSNYYKSNNVEFAVNTEGVYSEPRPIGTRYLTRNL

SEQ ID NO: 706 - protein, 736 aa, Artificial Sequence; identical to SEQ ID NO: 686
  Description of Artificial Sequence: Synthetic polypeptide

SEQ ID NO: 707 - protein, 736 aa, Artificial Sequence; identical to SEQ ID NO: 690
  Description of Artificial Sequence: Synthetic polypeptide

SEQ ID NO: 708 - protein, 736 aa, Artificial Sequence
  Description of Artificial Sequence: Synthetic polypeptide
MAADGYLPDWLEDNLSEGIREWWALKPGAPQPRANQQHQDNARGLVLPGYKYLGPGNGLDKGEPVNAADAAALEHDKAYDQQLKAGDNPYLKYNHADAEFQERLKEDTSFGGNLGRAVFQAKKRLLEPLGLVEEAAKTAPGKKRPVEQSPQEPDSSAGIGKSGAQPAKKRLNFGQTGDTESVPDPQPIGEPPAAPSGVGSLTMASGGGAPVADNNEGADGVGSSSGNWHCDSQWLGDRVITTSTRTWALPTYNNHLYKQISNSTSGGSSNDNAYFGYSTPWGYFDFNRFHCHFSPRDWQRLINNNWGFRPKRLNFKLFNIQVKEVTDNNGVKTIANNLTSTVQVFTDSDCQLPYVLGSAHEGCLPPFPADVFMIPQYGYLTLNDGSQAVGRSSFYCLEYFPSQMLRTGNNFQFSYEFENVPFHSSYAHSQSLDRLTNPLIDQYLYYLSKTINGSGQNQQTLKFSVAGPSNMAVQGRNYIPGPSYRQQRVSTTVTQNNNSEFAWPGASSWALNGRNSLMNPGPAMASHKEGEDRFFPLSGSLIFGKQGTGRDNVDADKVMITNEEEIKTTNPVATESHGQVATNHQSAQAQAQTGWVQNQGILPGMVWQDRDVYLQGPIWAKIPHTDGNFHPSPLMGGFGMKHPPPQILIKNTPVPADPPTAFNKDKLNSFITQYSTGQVSVEIEWELQKENSKRWNPEIQYTSNYYKSNNVEFAVNTEGVYSEPRPIGTRYLTRNL

SEQ ID NO: 709 - protein, 736 aa, Artificial Sequence
  Description of Artificial Sequence: Synthetic polypeptide
MAADGYLPDWLEDNLSEGIREWWALKPGAPQPKANQQHQDNARGLVLPGYKYLGPGNGLDKGEPVNAADAAALEHDKAYDQQLKAGDNPYLKYNHADAEFQERLKEDTSFGGNLGRAVFQAKKRLLEPLGLVEEAAKTAPGKKRPVEQSPQEPDSSAGIGKSGAQPAKKRLNFGQTGDTESVPDPQPIGEPPAAPSGVGSLTMASGGGAPVADNNEGADGVGSSSGNWHCDSQWLGDRVITTSTRTWALPTYNNHLYKQISNSTSGGSSNDNAYFGYSTPWGYFDFNRFHCHFSPRDWQRLINNNWGFRPKRLNFKLFNIQVKEVTDNNGVKTIANNLTSTVQVFTDSDYQLPYVLGSAHEGCLPPFPADVFMIPQYGYLTLNDGSQAVGRSSFYCLEYFPSQMLRTGNNFQFSYEFENVPFHSSYAHSQSLDRLMNPPIDQYLYYLSKTINGSGQNQQTLKFSVAGPSNMAVQGRNYIPGPSYRQQRVSTTVTQNNNSEFAWPGASSWALNGRNSLMNPGPAMASHKEGEDRFFPLSGSLIFGKQGTGRDNVDADKVMITNEEEIKTTNPVATESYGQVATNHQSAQAQAQTGWVQNQGILPGMVWQDRDVYLQGPIWAKIPHTDGNFHPSPLMGGFGMKHPPPQILIKNTPVPADPPTAFNKDKLNSFITQYSTGQVSVEIEWELQKENSKRWNPEIQYTSNYYKSNNVEFAVNTEGVYGEPRPIGTRYLTRNL

SEQ ID NO: 710 - protein, 736 aa, Artificial Sequence
  Description of Artificial Sequence: Synthetic polypeptide
MAADGYLPDWLEDNLSEGIREWWALKPGAPQPKANQQHQDNARGLVLPGYKYLGPGNGLDKGEPVNAADAAALEHDKAYDQQLKAGDNPYLKYNHADAEFQERLKEDTSFGGNLGRAVFQAKKRLLEPLGLVEEAAKTAPGKKRPVEQSPQEPDSSAGIGKSGAQPAKKRLNFGQTGDTESVPDPQPIGEPPAAPSGVGSLTMASGGGAPVADNNEGADGVGSSSGNWHCDSQWLGDRVITTSTRTWALPTYNNHLYKQISNSTSGGSSNDNAYFGYSTPWGYFDFNRFHCHFSPRDRQRLINNNWGFRPKRLNFKLFNIQVKEVTDNNGVKTIANNLTSTVQVFTDSDYQLPYVLGSAHEGCLPPFPADVFMIPQYGYLTLNDGSQAVGRSSFYCLEYFPSQMLRTGNNFQFSYEFENVPFHSSYAHSQSLDRLMNPLIDQYLYYLSKTINGSGQNQQTLKFSVAGPSNMAVQGRNYIPGPSYRQQRVSTTVTQNNNSEFAWPGASSWALNGRNSLMNPGPAMASHKEGEDRFFPLSGSLIFGKQGTGRDNVDADKVMITNEEEIKTTNPVATESYGQVATNHQSAQAQAQTGWVQNQGILPGMVWQDRDVYLQGPIWAKIPHTDGNFHPSPLMGGFGMKHPPPQILIKNTPVPADPPTAFNKDKLNSFITQYSTGQVSVEIEWELQKENSKRWNPEIQYTSNYYKSNNVEFAVNTEGVYSEPRPIGTRYLTRNL

SEQ ID NO: 711 - protein, 736 aa, Artificial Sequence
  Description of Artificial Sequence: Synthetic polypeptide
MAADGYLPDWLEDNLSEGIREWWALKPGAPQPKANQQHQDNARGLVLPGYKYLGPGNGLDKGEPVNAADAAALEHDKAYDQQLKAGDNPYLKYNHADAEFQERLKEDTSFGGNLGRAVFQAKKRLLEPLGLVEEAAKTAPGKKRPVEQSPQEPDSSAGIGKSGAQPAKKRLNFGQTGDTESVPDPQPIGEPPAAPSGVGSLTMASGGGAPVADNNEGADGVGSSSGNWHCNSQWLGDRVITTSTRTWALPTYNNHLYKQISNSTSGGSSNDNAYFGYSTPWGYFDFNRFHCHFSPRDWQRLINNNWGFRPKRLNFKLFNIQVKEVTDNNGVKTIANNLTSTVQVFTDSDYQLPYVLGSAHEGCLPPFPADVFMIPQYGYLTLNDGSQAVGRSSFYCLEYFPSQMLRTGNNFQFSYEFENVPFHSSYAHSQSLDRLMNPLIDQYLYYLSKTINGSGQNQQTLKFSVAGPGNMAVQGRNYIPGPSYRQQRVSTTVTQNNNSEFAWPGASSWALNGRNSLMNPGPAMASHKEGEDRFFPLSGSLIFGKQGTGRDNVDADKVMITNEEEIKTTNPVATESYGQVATNHQSAQAQAQTGWVQNQGILPGMVWQDRDVYLQGPIWAKIPHTDGNFHPSPLMGGFGMKHPPPQILIKNTPVPADPPTAFNKDKLNSFITQYSTGQVSVEIEWELQKENSKRWNPEIQYTSNYYKSNNVEFAVNTEGVYSEPRPIGTRYLTRNL

SEQ ID NO: 712 - protein, 736 aa, Artificial Sequence
  Description of Artificial Sequence: Synthetic polypeptide
MAADGYLPDWLEDNLSEGIREWWALKPGAPQPKANQQHQDNARGLVLPGYRYLGPGNGLDKGEPVNAADAAALEHDKAYDQQLKAGDNPYLKYNHADAEFQERLKEDTSFGGNLGRAVFQAKKRLLEPLGLVEEAAKTAPGKKRPVEQSPQEPDSSAGIGKSGAQPAKKRLNFGQTGDTESVPDPQPIGEPPAAPSGVGSLTMASGGGAPVADNNEGADGVGSSSGNWHCDSQWLGDRVITTSTRTWALPTYNNHLYKQISNSTSGGSSNDNAYFGYSTPWGYFDFNRFHCHFSPRDWQRLINNNWGFRPKRLNFKLFNIQVKEVTDNNGVKTVANNLTSTVQVFTDSDYQLPYVLGSAHEGCLPPFPADVFMIPQYGYLTLNDGSQAVGRSSFYCLEYFPSQMLRTGNNFQFSYEFENVPFHSSYAHSQSLDRLMNPLIDQYLYYLSKTINGSGQNQQTLKFSVAGPSNMAVQGRNYIPGPSYRQQRVSTTVTQNNNSEFAWPGASSWALNGRNSLMNPGPAMASHKEGEDRFFPLSGSLIFGKQGTGRDNVDADKVMITNEEEIKTTNPVATESYGQVATNHQSAQAQAQTGWVQNQGILPGMVWQDRDVYLQGPIWAKIPHTDGNFHPSPLMGGFGMKHPPPQILIKNTPVPADPPTAFNKDKLNSFITQYSTGQVSVEIEWELQKENSKRWNPEIQYTSNYYKSNNVEFAVNTEGVYSGPRPIGTRYLTRNL

SEQ ID NO: 713 - protein, 736 aa, Artificial Sequence; identical to SEQ ID NO: 123
  Description of Artificial Sequence: Synthetic polypeptide

SEQ ID NO: 714 - protein, 736 aa, Artificial Sequence
  Description of Artificial Sequence: Synthetic polypeptide
MAADGYLPDWLEDNLSEGIREWWALKPGAPQPKANQQRQDNARGLVLPGYKYLGPGNGLDKGEPVNAADAAALEHDKAYDQQLKAGGNPCLKYNHADAEFQERLKEDTSFGGNLGRAVFQAKKRLLEPLGLVEEAAKTAPGKKRPVEQSPQEPDSSAGIGRSGAQPAKKRLNFGQTGDTESVPDPQPIGEPPAAPSGVGSLTMASGGGAPVADNNEGADGVGSSSGNWHCDSQWLGDRVITTSTRTWALPTYNNHLYKQISNSTSGGSSNDNAYFGYSTPWGYFDFNRFHCHFSPRDWQRLINNNWGFRPKRLNFKLFNIQVKEVTDNNGVKAIANNLTSTVQVFTDSDYQLPYVLGSAHEGCLPPFPADVFMIPQYGYLTLNDGSQAVGRSSFYCLEYFPSQMLRTGNNFQFSYEFENVPFHSSYAHSQSLDRLMNPLIDQYLYYLSKTIDGSGQNQQTLKFSVAGPSNMAVQGRNYIPGPSYRQQRVSTTVTQNNNSEFAWPGASSWALNGRNSLMDPGPAMASHKEGEDRFFPLSGSLIFGKQGTGRDNVDADKVMITNEEEIKTTNPVATESYGQVATNHQSAQAQAQTGWVQNQGILPGMVWQDRDVYLQGPIWAKIPHTGGNFHPSPLMGGFGMKHPPPQILIKNTPVPADPPTAFNKDKLNSFITQYSTGQVSVEIEWELQKENSKRWNPEIQYTSNYYKSNNVEFAVNTEGVYSEPRPIGTRYLTRNL

SEQ ID NO: 715 - protein, 736 aa, Artificial Sequence
  Description of Artificial Sequence: Synthetic polypeptide
MAADGYLPDWLEDNLSEGIREWWALKPGAPQPKANQQHQDNARGLVLPGYKYLGPGNGLDKGEPVNAADAAALEHDKAYDQQLKAGDNPYLKYNHADAEFQERLKEDTSFGGNLGRAVFQAKKRLLEPLGLVEEAAKTAPGKKRPVEQSPQEPDSSAGIGKSGAQPAKKRLNFGQTGDTESVPDPQPIGEPPAAPSGVGSLTMASGGGAPVADNNEGADGVGSSSGNWHCDSQWLGDRVITTSTRTWALPTYNNHLYKQISNSTSGGSSNDNAYFGYSTPWGYFDFNRFHCHFSPRDWQRLINNNWGFRPKRLNFKLFNIQVKEVTDNNGVKTIANNLTSTVQVFTDSDYQLPYVLGSAHEGCLPPFPADVFMIPQYGYLTLNDGSQAVGRSSFYCLEYFPSQMLRTGNNFQFSYEFENVPFHSSYAHSQSLDRLMNPLIDQYLYYLSKTINGSGQNQQTLKFSVAGPSNMAVQGRNYIPGPSYRQQRVSTTVTQNNNSEFAWPGASSWALNGRNSLMNPGPAMASHKEGEDRFFPLSGSLIFGKQGTGRDNVDADKVMITNEEEIKTTNPVATESYGQVATNHQSAQAQAQTGWVQNQGILPGMVWQDRDVYLQGPIWAKIPHTDGNFHPSPLMGGFGMKHPPPQILIKNTPVPADPPTAFNKDKLNSFITQYSTGQVSVEIEWELQKENSKRWNPEIQYTSNYYKPNNVEFAVNTEGVYSEPRPIGTRYLTRNL

SEQ ID NO: 716 - protein, 736 aa, Artificial Sequence
  Description of Artificial Sequence: Synthetic polypeptide
MAADGYLPDWLEDNLSEGIREWWALKPGAPQPKANQQHQDNARGLVLPGYKYLGPGNGLDKGEPVNAADAAALEHNKAYDQQLKAGDNPYLKCNHADAEFQERLKEDTSFGGNLGRAVFQAKKRPLEPLGLVEEAAKTAPGKKRPVEQSPQEPDSSAGIGKSGAQPAKKRLNFGQTGDTESVPDPQPIGEPPAAPSGVRSLTMASGGGAPVADNNEGADGVGSSSGNWHCDSQWLGDRVITTSTRTWALPTYNNHLYKQISNSTSGGSSNDNAYLGYSTPWGYFDFNRFHCHFSPRDWQRLINNNWGFRPKRLNFKLFNIQVKEVTDNNGVKTIANNLTSTVQVFTDSDYQLPYVLGSAHEGCLPPFPADVFMIPQYGYLTLNDGSQAVGRSSFYCLEYFPSQMLRTGNNFQFSYEFENVPFHSSYAHSQSLDRLMNPLIDQYLYYLSKTINGSGQNQQTLKFSVAGPSNMAVQGRNYIPGPSYRQQRVSTTVTQNNNSEFAWPGASSWALNGRNSLMNPGPTMASHKEGEDRFFPLSGSLIFGKQGTGRDNVDADKVMITNEEEIKTTNPVATESYGQVATNHQSAQAQAQTGWVQNQGILPGMVWQDRDVYLQGPIWAKIPHTDGNFHPSPLMGGFGMKHPPPQILIKNTPVPADPPTAFNKDKLNSFITQYSTGQVSVEIEWELQKENSKRWNPEIQYTSNYYKSNNVEFAVNTEGVYSEPRPIGTRYLTRNL

SEQ ID NO: 717 - protein, 736 aa, Artificial Sequence
  Description of Artificial Sequence: Synthetic polypeptide
MAADGYLPDWLEDNLSEGIREWWALKPGAPQPKANQQHQDNARGLVLPGYKYLGPGNGLDKGEPVNAADAAALVHDKAYDQQLKAGDNPYLKCNHADAEFQERLKEDTSFGGNLGRAVFQAKKRLLEPLGLVEEAAKTAPGKKRPVEQSPQEPDSSAGIGKSGAQPAKKRLNFGQTGDTESVPDPQPIGEPPAAPSGVGSLTMASGGGAPVADNNEGADGVGSSSGNWHCDSQWLGDRVITTSTRTWALPTYNNHLYKQISNSTSGGSSNDNAYLGYSTPWGYFDFNRFHCHFSPRDWQRLINNNWGFRPKRLNFKLFNIQVKEVTDNNGVKTIANNLTSTVQVFTDSDYQLPYVLGSAHEGCLPPFPADVFTIPQYGYLTLNDGSQAVGRSSFYCLEYFPSQMLRTGNNFQFSYEFENVPFHSSYAHSQSLDRLMNPLIDQYLYYLSKTINGSGQNQQTLKFSVAGPSNMAVQGRNYIPGPSYRQQRVSTTVTQNNNSEFAWPGASSWALNGRNSLMNPGPAMASHKEGEDRFFPLSGSLIFGKQGTGRDNVDADKVMITNEEEIKTTNPVATESYGQVATNHQSAQAQAQTGWVQNQGILPGMVWQDRDVYLQGPIWAKIPHTDGNFHPSPLMGGFGMKHPPPQILIKNTPVPADPPTAFNKDKLNSFITQYSTGQVSVEIEWELQKENSKRWNPEIQYTSNYYKSNNVEFAVNTEGVYSEPRPIGPRYLTRNF

SEQ ID NO: 718 - protein, 736 aa, Artificial Sequence
  Description of Artificial Sequence: Synthetic polypeptide
MAADGYLPDWLEDNLSEGIREWWALKPGAPQPKANQQHQDNARGLVLPGYKYLGPGNGLDKGEPVNAADAAALEHNKAYDQQLKAGDNPYLKCNHADAEFQERLKEDTSFGGNLGRAVFQAKKRLLEPLGLVEEAAKTAPGKKRPVEQSPQEPDSSAGIGKSGAQPAKKRLNFGQTGDTESVPDPQPIGEPPAAPSGVRSLTMASGGGAPVADNNEGADGVGSSSGNWHCDSQWLGDRVITTSTRTWALPTYNNHLYKQISNSTSGGSSNDNAYLGYSTPWGYFDFNRFHCHFSPRDWQRLINNNWGFRPKRLNFKLFNIQVKEVTDNNGVKTIANNLTSTVQVFTDSDYQLPYVLGSAHEGCLPPFPADVFMIPQYGYLTLNDGSQAVGRSSFYCLEYFPSQMLRTGNNFQFSYEFENVPFHSSYAHSQSLDRLMNPLIDQYLYYLSKTINGSGQNQQTLKFSVAGPSNMAVQGRNYIPGPSYRQQRVSTTVTQNNNSEFAWPGASSWALNGRNSLMNPGPAMASHKEGEDRFFPLSGSLIFGKQGTGRDNVDADKVMITNEEEIKTTNPVATESYGQVATNHQSAQAQAQTGWVQNQGILPGMVWQDRDVYLQGPIWAKIPHTDGNFHPSPLMGGFGMKHPPPQILIKNTPVPADPPTAFNKDKLNSFITQYSTGQVSVEIEWELQKENSKRWNPEIQYTSNYYKSNNVEFAVNTEGVYSEPRPIGTRYLTRNL

SEQ ID NO: 719 - protein, 736 aa, Artificial Sequence
  Description of Artificial Sequence: Synthetic polypeptide
MAADGYLPDWLEDNLSEGIREWWALKPGAPQPKANQQHQDNARGLVLPGYKYLGPGNGLDKGEPVNAADAAALEHDKAYDQQLKAGDNPYLKCNHADAEFQERLKEDTSFGGNLGRAVFQAKKRLLEPLGLVEEAAKTAPGKKRPVEQSPQEPDSSAGIGKSGAQPAKKRLNFGQTGDTESVPDPQPIGEPPAAPSGVGSLTMASGGGAPVADNNEGADGVGSSSGNWHCDSQWLGDRVITTSTRTWALPTYNNHLYKQISNSTSGGSSNDNAYLGYSTPWGYFDFNRFHCHFSPRDWQRLINNNWGFRPKRLNFELFNIQVKEVTDNNGVKTIANNLTSTVQVFTDSDYQLPYVLGSAHEGCLPPFPADVFMIPQYGYLTLNDGSQAVGRSSFYCLEYFPSQMLRTGNNFQSSYEFENVPFHSSYAHSQSLDRLMNPLIDQYLYYLSKTINGSGQNQQTLKFSVAGPSNMAVQGRNYIPGPSYRQQRASTTVTQNNNSEFAWPGASSWALNGRNSLMNPGPAMASHKEGEDRFFPLSGSLIFGKQGTGRDNVDADKVMITNEEEIKTTNPVATESYGQVATNHQSAQAQAQTGWVQNQGILPGMVWQDRDVYLQGPIWAKIPHTDGNFHPSPLMGGFGMKHPPPQILIKNTPVPADPPTAFNKDKLNSFITQYSTGQVSVEIEWELQKENSKRWNPEIQYTSNYYKSNNVEFAVNTEGVYSEPRPIGTRYLTRNL

SEQ ID NO: 720 - protein, 736 aa, Artificial Sequence
  Description of Artificial Sequence: Synthetic polypeptide
MAADGYLPDWLEDNLSEGIREWWALKPGAPQPKANQQHQDNARGLVLPGYKYLGPGNGLDKGEPVNAADAAALEHDKAYDQQLKAGDNPYLKCNHADAEFQERLKEDTSFGGNLGRAVFQAKKRLLEPLGLVEEAAKTAPGKKRPVEQSPQEPDSSAGIGKSGAQPAKKRLNFGQTGDTESVPDPQPIGEPPAAPPGVGSLTMASGGGAPVADNNEGADGVGSSSGNWHCDSQWLGDRVITTSTRTWALPTYNNHLYKQISNSTSGGSSNDNAYLGYSTPWGYFDFNRFHCHFSPRDWQRLINNNWGFRPKRLNFKLFNIQVKEVTDNNGVKTIANNLTSTVQVFTDSDYQLPYVLGSAHEGCLPPFPADVFMIPQYGYLTLNDGSQAVGRSSFYCLEYFPSQMLRTGNNFQFSYEFENVPFHSSYAHSQSLDRLMNPLIDQYLYYLSKTISGSGQNQQTLKFSVAGPSNMAVQGRNYIPGPSYRQQRVSTTVTQNNSSEFAWPGASSWALNGRNSLMNPGPAMASHKEGEDRFFPLSGSLIFGKQGTGRDNVDADKVMITNEEEIKTTNPVATESYGQVATNHQSAQAQAQTGWVQNQGILSGMVWQDRDVYLQGPIWAKIPHTDGNFHPSPLMGGFGMKHPPPQILIKNTPVPADPPTAFNKDKLNSFITQYSTGQVSVEIEWELQKENSKRWNPEIQYTSNYYKSNNVEFAVNTEGVYSEPRPIGTRYLTRNL

SEQ ID NO: 721 - protein, 736 aa, Artificial Sequence
  Description of Artificial Sequence: Synthetic polypeptide
MAADGYLPDWLEDNLSEGIREWWALKPGAPQPKANQQHQDNARGLVLPGYKYLGPGNGLDKGEPVNAADAAALEHDKAYDQQLKAGDNPYLKCNHADAEFQERLKEDTSFGGNLGRAVFQAKKRLLEPLGLVEEAAKTAPGKKRPVEQSPQEPDSSAGIGKSGAQPAKKRLNFGQTGDTESVPDPQPIGEPPAAPSGVGSLTMASGGGAPVADNNEGADGVGSSSGNWHCDSQWLGDRVITTSTRTWALPTYNNHLYKQISNSTSGGSSNDNAYLGYSTPWGYFDFNRFHCHFSPRDWQRLINNNWGFRPKRLNFKLFNIQVKEVTDNNGVKTIANNLTSTVQVFTDSDYQLPYVLGSAHEGCLPPFPADVFMIPQYGYLTLNDGSQAVGRSSFYCLEYFPSQMLRTGNNFQFSYEFENVPFHSSYAHSQSLDRLMNPLIDQYLYYLSKTINGSGQNQQTLKFSVAGPSNMAVQGRNYIPGPSYRQQRVSTTVTQNNNSEFAWPGASSWALNGRNSLMNPGPAMASHKEGEDRFFPLSGSLIFGKQGTGRDNVDADKVMITNEEEIKTTNPVATESYGQVATNHQSAQAQAQTGWVQNQGILPGMVWQDRDVYLQGPIWAKIPHTDGNFHPSPLMGGFGMKHPPPQILIKNTPVPADPPTAFNKDKLNSFITQYSTGQVSVEIEWELQKENSKRWNPEIQYTSNYYKSNNVEFAVNTEGVYSEPRPIGTRYLTRNL

SEQ ID NO: 722 - protein, 736 aa, Artificial Sequence; identical to SEQ ID NO: 721
  Description of Artificial Sequence: Synthetic polypeptide

SEQ ID NO: 723 - protein, 736 aa, Artificial Sequence
  Description of Artificial Sequence: Synthetic polypeptide
MAADGYLPDWLEDNLSEGIREWWALKPGAPQPKANQQHQDNARGLVLPGYKYLGPGNGLDKGEPVNAADAAALEHDKAYDQQLKAGDNPYLKCNHADAEFQERLKEDTSFGGNLGRAVFQAKKRLLEPLGLVEEAAKTAPGKKRPVEQSPQEPDSSAGIGKSGAQPAKKRLNFGQTGDTESVPDPQPIGEPPAAPSGVGSLTMASGGGAPVADNNEGADGVGSSSGNWHCDSQWLGDRVITTSTRTWALPTYNNHLYKQISNSTSGGSSNDNAYLDYSTPWGYFDFNRFHCHFSPRDWQRLINNNWGFRPKRLNFKLFNIQVKEVTDNNGVKTIANNLTSTVQVFTDSDYQLPYVLGSAHEGCLPPFPADVFMIPQYGYLTLNDGSQAVGRSSFYCLEYFPSQMLRTGNNFQFSYEFENVPFHSSYAHSQSLDRLMNPLIDQYLYYLSKTINGSGQNQQTLKFSVAGPSNMAVQGRNYIPGPSYRQQRVSTTVTQNNNSEFAWPGASSWALNGRNSLMNPGPAMASHKEGEDRFFPLSGSLIFGKQGTGRDNVDADKVMITNEEEIKTTNPVATESYGQVATNHQSAQAQAQTGWVQNQGILPGMVWQGRDVYLQGPIWAKIPHTDGNFHPSPLMGGFGMKHPPPQILIKNTPVPADPPTAFNKDKLNSFITQYSTGQVSVEIEWELQKENSKRWNPEIQYTSNYYKSNNVEFAVNTEGVYSEPRPIGTRYLTRNL

SEQ ID NO: 724 - protein, 736 aa, Artificial Sequence; identical to SEQ ID NO: 721
  Description of Artificial Sequence: Synthetic polypeptide

SEQ ID NO: 725 - protein, 736 aa, Artificial Sequence
  Description of Artificial Sequence: Synthetic polypeptide
MAADGYPPDWLEDNLSEGIREWWALKPGAPQPKANQQHQDNARGLVLPGYKYLGPGNGLDKGEPVNAADAAALEHDKAYDQQLKAGDNPHLKYNHADAEFQERLKEDTSFGGNLGRAVFQAKKRLLEPLGLVEEAAKTAPGKKRPVEQSPQEPDSSAGIGKSGAQPAKKRLNFGQTGDTESVPDPQPIGEPPAAPSGVGSLTMASGGGAPVADNNEGADGVGSSSGNWHCDSQWLGDRVITTSTRTWALPTYNNHLYKQISNSTSGGSSNDNAYFGYSTPWGYFDFNRFHCHFSPRDWQRLINNNWGFRPKRLNFKLFNIQVKEVTDNNGVKTIANNLTSTVQVFTDSDYQLPYVLGSAHEGCLPPFPADVFMIPQYGYLTLNDGSQAVGRSSFYCLEYFPSQMLRTGNNFQFSYEFENVPFHSSYAHSQSLDRLMNPLIDQYLYYLSKTINGSGQNQQTLKFSVAGPSNMAVQGRNYIPGPSYRQQRVSTTVTQNNNSEFAWPGASSWALNGRNSLMNPGPAMASHKEGEDRFFPLSGSLIFGKQGTGRDNVDADKVMITNEEEIKTTNPVATESYGQVATNHQSAQAQAQTGWVQNQGILPGMVWQDRDVYLQGPIWAKIPHTDGNFHPSPLMGGFGVKHPPPQILIKNTPVPADPPTAFNKDRLNSFITQYSTGQVSVEIEWELQKENSKRWNPEIQYTSNYYKSNNVEFAVNTEGVYSEPRPIGTRYLTRNL

SEQ ID NO: 726 - protein, 736 aa, Artificial Sequence
  Description of Artificial Sequence: Synthetic polypeptide
MAADGYLPDWLEDNLSEGIREWWALKPGAPQPKANQQHQDNARGLVLPGYKYLGPGNGLDKGEPVNAADAAALEHDKAYDQQLKAGDNPYLKYNHADAEFQERLKEDTSFGGNLGRAVFQAKKRLLEPLGLVEEAAKTAPGKKRPVEQSPQEPDSSAGIGKSGAQPAKKRLNFGQTGDTESVPDPQPIGEPPAAPSGVGSLTMASGGGAPVADNNEGADGVGSSSGNWHCDSQWLGDRVITTSTRTWALPTYNNHLYKQISNSTSGGSSNDNAYFGYSTPWGYFDFNRFHCHFSPRDWQRLINNNWGFRPKRLNFKLFNIQVKEVTDNNGVKTIANNLTSTVQVFTDSDYQLPYVLGSAHEGCLPPFPADVFMIPQYGYLTLNDGSQAVGRSSFYCLEYFPSQMLRTGNNFQFSYEFENVPFHSSYAHSQSLDRLMNPLIDQYLYYLSKTINGSGQNQQTLKFSVAGPSNMAVQGRNYIPGPSYRQQRVSTTVTQNNNSEFAWPGASSWALNGRNSLMNPGPAMASHKEGEDRFFPLSGSLIFGKQGTGRDNVDADKVMITNEEEIKTTNPVATESYGQVATNHQSAQAQAQTGWVQNQGILPGMVWQDRDVYLQGPIWAKIPHTDGNFHPSPLMGGFGVKHPPPQILIKNTPVPADPPTAFNKDKLNSFITQYSTGQVSVEIEWELQKENSKRWNPEIQYTSNYYKSNNVEFAVNTEGVYSEPRPIGTRYLTRNL

SEQ ID NO: 727 - protein, 736 aa, Artificial Sequence
  Description of Artificial Sequence: Synthetic polypeptide
MAADGYLPDWLEDNLSEGIREWWALKPGAPQPKANQQHQDNARGLVLPGYKYLGPGNGLDKGEPVNAADAAALEHDKAYDQQLKAGDNPYLKYNHADAEFQERLKEDTSFGGNLGRAVFQAKKRLLEPLGLVEEAAKTAPGKKRPVEQSPQEPDSSAGIGKSGAQPAKKRLNFGQTGDTESVPDPQPIGEPPAAPSGVGSLTMASGGGAPVADNNEGADGVGSSSGNWHCDSQWLGDRVITTSTRTWALPTYNNHLYKQISNSTSGGSSNDNAYFGYSTPWGYFDFNRFHCHFSPRDWQRLTNNNWGFRPKRLNFKLFNIQVKEVTDNNGVKTIANNLTSTVQVFTDSDYQLPYVLGSAHEGCLPPFPADVFMIPQYGYLTLNDGSQAVGRSSFYCLEYIPSQMLRTGNNFQFSYEFENVPFHSSYAHSQSLDRLMNPLIDQYLYYLSKTINGSGQNQQTLKFSVAGPSNMAVQGRNYIPGPSYRQQRVSTTVTQNNNSEFAWPGASSWALNGRNSLMNPGPAMASHKEGEDRFFPLSGSLIFGKQGTGRDNVDADKVMITNEEEIKTTNPVATESYGQVATNHQSAQAQAQTGWVQNQGILPGMVWQDRDVYLQGPIWAKIPHTDGNFHPSPLMGGFGVKHPPPQILIKNTPVPADPPTAFNKDKLNSFITQYSTGQVSVEIEWELQKENSKRWNPEIQYTSNYYKSNNVEFAVNTEGVYSEPRPIGTRYLTRNL

SEQ ID NO: 728 - protein, 736 aa, Artificial Sequence
  Description of Artificial Sequence: Synthetic polypeptide
MAADGYLPDWLEDNLSEGIREWWALKPGAPQPKANQQHQDNARGLVLPGYKYLGPGNGLDKGEPVNAADAAALEHDKAYDQQLKAGDNPYLKYNHADAEFQERLKEDTSFGGNLGRAVFQAKKRLLEPLGLVEEAAKTAPGKKRPVEQSPQEPDSSAGIGKSGAQPAKKRLNFGQTGDTESVPDPQPIGEPPAAPSGVGSLTMASGGGAPVADNNEGADGVGSSSGNWHCDSQWLGDRVITTSTRTWALPTYNNHLYKQISNSTSGGSSNDNAYFGYSTPWGYFDFNRFHCHFSPRDWQRLINNNWGFRPKRLNFKLFNIQVKEVTDNNGVKTIANNLTSTVQVFTDSDYQLPYVLGSAHEGCLPPFPADVFMIPQYGYLTLNDGSQAVGRSSFYCLEYFPSQMLRTGNNFQFSYEFENVPFHSSYAHSQSLDRLMNPLIDQYLYYLSKTINGSGQNQQTLKFSVAGPSNMAVQGRNYIPGPSYRQQRVSTTVTQNNNSEFAWPGASSWALNGRNSLMNPGPAMASHKEGEDRFFPLSGSLISGKQGTGRDNVDANKVMITNEEEIKTTNPVATESYGQVATNHQSAQAQAQTGWVQNQGILPGMVWQDRDVYLQGPIWAKIPHTDGNFHPSPLMGGFEMKHPPPQILIKNTPVPADPPTAFNKDKLNSFITQYSTGQVSVEIEWELQKENSKRWNPEIQYTSNYYKSNNVEFAVNTEGVYSEPRPIGTRYLTRNL

SEQ ID NO: 729 - protein, 736 aa, Artificial Sequence
  Description of Artificial Sequence: Synthetic polypeptide
MAADGYLPDWLEDNLSEGIREWWALKPGAPQPKANQQHQDNARGLVLPGYKYLGPGNGLDKGEPVNAADAAALEHDKAYDQQLKAGDNPYLKYNHADAEFQERLKEDTSFGGNLGRAVFQAKKRLLEPLGLVEEAAKTAPGKKRPVEQSPQEPDSSAGIGKSGAQPAKKRLNFGQTGDTESVPDPQPIGEPPAAPSGVGSLTIASGGGAPVADNNEGADGVGSSSGNWHCDSQWLGDRVITTSTRTWALPTYNNHLYKRISNSTSGGSSNDNAYFGYSTPWGYFDFNRFHCHFSPRDWQRLINNNWGFRPKRLNFKLFNIRVKEVTDNNGVKTITNNLTSTVQVFTDSDYQLPYVLGSAHEGCLPPFPADVFMIPQYGYLTLNDGSQAVGRSSFYCLEYFPSQMLRTGNNFQFSYEFENVPFHSSYAHSQSLDRLMNPLIDQYLYYLSKTINGSGQNQQTLKFSVAGPSNMAVQGRNYIPGPSYRQQRVSTTVTRNNNSEFAWPGASSWALNGRNSLMNPGPAMASHKEGEDRFFPLSGSLIFGKQGTGRDNVDADKVMITNEEEIKTTNPVATESYGQVATNHQSAQAQAQTGWVQNQGILPGMVWQDRDVYLQGPIWAKIPHTDGNFHPSPLMGGFGVKHPPPQILIKNTPVPADPPTAFNKDKLNSFITQYSTGQVSVEIEWELQKENSKRWNPEIQYTSNYYKSNNVEFAVNTEGVYSEPRPIGTRYLTRNL

SEQ ID NO: 730 - protein, 736 aa, Artificial Sequence
  Description of Artificial Sequence: Synthetic polypeptide
MAADGYLPDWLEDNLSEGIREWWALKPGAPQPKANQQHQDNARGLVLPGYKYLGPGNGLDKGEPVNAADAAALEHDKAYDQQLKAGDNPYLKYNHADAEFQERLKEDTSFGGNLGRAVFQAKKRLLEPLGLVEEAAKTAPGKKRPVEQSPQEPDSSAGIGKSGAQPAKKRLNFGQTGDTEPVPDPQPIGEPPAAPSGVGSLTMASGGGAPVADNNEGADGVGSSSGNWHCDSQWLGDRVITTSTRTWALPTYNNHLYKQISNSTSGGSSNDNAYFGYSTPWGYFDFNRFHCHFSPRDWQRLINNNWGFRPKRLNFKLFNIQVKEVTDNNGVKTIANNLTSTVQVFTDSDYQLPYVLGSAHEGCLPPFPAGVFMIPQYGYLTLNDGSQAVGRSSFYCLEYFPSQMLRTGNNFQFSYEFENVPFHSSYAHSQSLDRLMNPLIDQYLYYLSKTINGSGQNQQTLKFSVAGPSNMAVQGRNYIPGPSYRQQRVSTTATQNNNSEFAWPGASSWALNGRNSLMNPGPAMASHKEGEDRFFPLSGSLIFGKQGTGRDNVDADKVMITNEEEIKTTNPVATESYGQVATNHQSAQAQAQTGWVQNQGILPGMVWQDRDVYLQGPIWAKIPHTDGNFHPSPLMGGFGMKHPPPQILIKNTPVPADPPTAFNKDKLNSFITQYSTGQVSVEIEWELQKENSKRWNPEIQYTSNYYKSNNVEFAVNTEGVYSEPRPIGTRYLTRNL

SEQ ID NO: 731 - protein, 736 aa, Artificial Sequence
  Description of Artificial Sequence: Synthetic polypeptide
MAADGYLPDWLEDNLSEGIREWWALKPGAPQPKANQQHQDNARGLVLPGYKYLGPGNGLDKGEPVNAADAAALEHDKAYDQQLKAGDNPYLKYNHADAGFQERLKEDTSFGGNLGRAVFQAKKRLLEPLGLVEEAAKTAPGKKRPVEQSPQEPDSSAGIGKSGAQPAKKRLNFGQTGDTESVPVPQPIGEPPAAPSGVGSLTMASGGGAPVADNNEGADGVGSSSGNWHCDSQWLGDRVITTSTRTWALPTYNNHLYKQISNSTSGGSSNDNAYFGYSTPWGYFDFNRFHCHFSPRDWQRLINNNWGFRPKRLNFKLFNIQVKEVTDNNGVKTIANNLTSTVQVFTDSDYQLPYVLGSAHEGCLPPFPADVFMIPQYGYLTLNDGSQAVGRSSFYCLEYFPSQMLRTGNNFQFSYEFENVPFHSSYAHSQSLDRLMNPLIDQYLYYLSKTINGSGQNQQTLKFSVAGPSNMAVQGRNYIPGPSYRQQRVSTTVTQNNNSEFAWPGASSWALNGRNSLMNPGPAMASHKEGEDRFFPLSGSLIFGKQGAGRDNVDADKVMITNEEEIKTTNPVATESYGQVATNHQSAQAQAQTGWVQNQGILPGMVWQDRDVYLQGPIWAKIPHTDGNFHPSPLMGGFGMKHPPPQILIKNTPVPADPPTAFNKDKLNSFITQYSTGQVSVEIEWELQKENSKRWNPEIQYTSNYYKSNNVEFAVNTEGVYSEPRPIGTRYLTRNL

SEQ ID NO: 732 - protein, 736 aa, Artificial Sequence
  Description of Artificial Sequence: Synthetic polypeptide
  MOD_RES (126)..(126): Xaa = any amino acid
MAADGYLPDWLEDNLSEGIRERWALKPGAPQPKANQQHQDNARGLVLPGYKYLGPGNGLDKGEPVNAADAAALEHDKAYDQQLKAGDNPYLKYNHADAEFQERLKEDTSFGGNLGRAVFQAKKRLXEPLGLVEEAAKTAPGKKRPVEQSPQEPDSSAGIGKSGAQPAKKRLNFGQTGDTESVPDPQPIGEPPAAPSGVGSLTMASGGGAPVADNNEGADGVGSSSGNWHCDSQWLGDRVITTSTRTWALPTYNNHLYKQISNSTSGGSSNDNAYFGYSTPWGYFDFNRFHCHFSPRDWQRLINNNWGFRPKRLNFKLFNIQVKEVTDNNGVKTIANNLTSTVQVFTDSDYQLPYVLGSAHEGCLPPFPADVFMIPQYGYLTLNDGSQAVGRSSFYCLEYFPSQMLRTGNNFQFSYEFENVPFHSSYAHSQSPDRLMNPLIDQYLYYLSKTINGSGQNQQTLKFSVAGPSNMAVQGRNYIPGPSYRQQRVSTTVTQNNNSEFAWPGASSWALNGRNSLMNPGPAMASHKEGEDRFFPLSGSLIFGKQGTGRDNVDADKVMITNEEEIKTTNPVATESYGQVATNHQSAQAQAQTGWVQNQGILPGMVWQDRDVYLQGPIWAKIPHTDGNFHPSPLMGGFGVKHPPPQILIKNTPVPADPPTAFNKDKLNSFITQYSTGQVSVEIEWELQKENSKRWNPEIQYTSNYYKSNNVEFAVNTEGVYSEPRPIGTRYLTRNL

SEQ ID NO: 733 - protein, 736 aa, Artificial Sequence
  Description of Artificial Sequence: Synthetic polypeptide
MAADGYLPDWLEDNLSEGIREWWALKPGAPQPKANQQHQDNARGLVLPGYKYLGPGNGLDKGEPVNAADAAALEHDKAYDQQLKAGDNPYLKYNHADAEFQERLKEDTSFGGNLGRAVFQAKKRLLEPLGLVEEAAKTAPGKKRPVEQSPQEPDSSAGIGKSGAQPAKKRLNFGQTGDTESVPDPQPIGEPPAAPSGVGSLTMASGGGAPVADNNEGADGVGSSSGNWHCDSQWLGDRVITTSTRTWALPTYNNHLYKQISNSTSGGSSNDNAYLGYSTPWGYFDFNRFHCHFSPRDWQRLINNNWGFRPKRLNFKLFNIQVKEVTDNNGVKTIANNLTSTVQVFTDSDYQLPYVLGSAHEGCLPPFPADVFMIPQYGYLTLNDGSQAVGRSSFYCLEYFPSQMLRTGNNFQFSYEFENVPFHSSYAHSQSLDRLMNPLIDQYLYYLSKTINGSGQNQQTLKFSVAGPSNMAVQGRNYIPGPSYRQQRVSTTVTQNNNSEFAWPGASSWALNGRNSLMNPGPAMASHKEGEDRFFPLSGSLIFGKQGTGRDNVDADKVMITNEEEIKTTNPVATESYGQVATNHQSAQAQAQTGWVQNQGILPGMVWQDRDVYLQGPIWAKIPHTDGNFHPSPLMGGFGMKHPPPQILIKNTPVPADPPTAFNKDKLNSFITQYSTGQVSVEIEWELQKENSKRWNPEIQYTSNYYKSNNVEFAVNTEGVYSEPRPIGTRYLTRNL

SEQ ID NO: 734 - protein, 736 aa, Artificial Sequence
  Description of Artificial Sequence: Synthetic polypeptide
MAADGYLPDWLEDNLSEGIREWWALKPGAPQPKANQQHQDNARGLVLPGYKYLGPGNGLDKGEPVNAADAAALEHDKAYDQQLKAGDNPYLKYNHADAEFQERLKEDTSFGGNLGRAVFQAKKRLLEPLGLVEEAAKTAPGKKRPVEQSPQEPDSSAGIGKSGAQPAKKRLNFGQTGDTESVPDPQPIGEPPAAPSGVGSLTMASGGGAPVADNNEGADGVGSSSGNWHCDSQWLGDRVITTSTRTWALPTYNNHLYKQISNSTSGGSSNDNAYFGYSTPWGYFDFNRFHCHFSPRDWQRLINNNWGFRPKRLNFKLFNIQVKEVTDNNGVKTIANNLTSTVQVFTDSDYQLPYVLGSAHEGCLPPFPADVFMIPQYGYLTLNDGSQAVGRSSFYCLEYFPSQMLRTGNNFQFSYEFENVPFHSSYAHSQSLDRLMNPLIDQYLYYLSKTINGSGQNQQTLKFSVAGPSNMAVQGRNYIPGPSYRQQRVSTTVTQNNNSEFAWPGASSWALNGRNSLMNPGPAMASHKEGEDRFFPLSGSLIFGKQGTGRDNVDADKVMITNEEEIKTTNPVATESYGQVATNHQSAQAQAQTGWVQNQGILPGMVWQDRDVYLQGPIWAKIPHTDGNFHPSPLMGGFGMKHPPPQILIKNTPVPADPPTAFNKDKLDSFITQYSTGQVSVEIEWELQKENSKRWNPVIQYTSNYYKSNNVEFAVNTEGVYSEPRPIGTRYLTRNL

SEQ ID NO: 735 - protein, 736 aa, Artificial Sequence
  Description of Artificial Sequence: Synthetic polypeptide
MAADGYLPDWLEDNLSEGIREWWDLKPGAPKPKANQQKQDDGRGLVLPGYKYLGPFNGLDKGEPVNAADAAALEHDKAYDQQLKAGDNPYLRYNHADAEFQERLQEDTSFGGNLGRAVFQAKKRVLEPLGLVEEGAKTAPGKKRPVEQSPQEPDSSSGIGKTGQQPAKKRLNFGQTGDSESVPDPQPLGEPPATPAAVGPTTMASGGGAPMADNNEGVDGVGNASGNWHCDSTWLGDRVITTSTRTWALPTYNNHLYKQISSASTGASNDNHYFGYSTPWGYFDFNRFHCHFSPRDWQRLINNNWGFRPKRLNFKLFNIQVKEVTTNDGVTTIANNLTSTVQVFSDSEYQLPYVLGSAHQGCLPPFPADVFMIPQYGYLTLNNGSQAVGRSSFYCLEYFPSQMLRTGNNFTFSYTFEEVPFHSSYAHSQSLDRLMNPLIDQYLYYLNRTQNQSGSAQNKDLLFSRGSPAGMSVQPKNWLPGPCYRQQRVSKTKTDNNNSNFTWTGASKYNLNGRESIINPGTAMASHKDDEDKFFPMSGVMIFGKESAGASNTALDNVMITDEEEIKATNPVATERFGTVAVNFQSSSTDPATGDVHAMGALPGMVWQDRDVYLQGPIWAKIPHTDGHFHPSPLMGGFGLKNPPPQILIKNTPVPANPPAEFSATKLASFITQYSTGQVSVEIEWELQKENSKRWNPEVQYTSNYAKSANVDFTVDNNGLYTEPRPIGTRYLTRPL

SEQ ID NO: 736 - protein, 736 aa, Artificial Sequence
  Description of Artificial Sequence: Synthetic polypeptide
MAADGYLPDWLEDNLSEGIREWWDLKPGAPKPKANQQKQDDGRGLVLPGYKYLGPFNGLDKGEPVNAADAAALEHDKAYDQQLKAGDNPYLRYNHADAEFQERLQEDTSFGGNLGRAVFQAKKRVLEPLGLVEEGAKTAPGKRRPVEQSPQEPDSSSGIGKTGQQPAKKRLNFGQTGDSESVPDPQPLGEPPATPAAVGPTTMASGGGAPMADNNEGADGVGNASGNWHCDSTWLGDRVITTSTRTWALPTYNNHLYKQISSASTGASNDNHYFGYSTPWGYFDFNRFHCHFSPRDWQRLINNNWGFRPKRLNFKLFNIQVKEVTTNDGVTTIANNLTSTVQVFSDSEYQLPYVLGSAHQGCLPPFPADVFMIPQYGYLTLNNGSQAVGRSSFYCLEYFPSQMLRTGNNFTFSYTFEEVPFHSSYAHSQSLDRLMNPLIDQYLYYLNRTQNQSGSAQNKDLLFSRGSPAGMSVQPKNWLPGPCYRQQRVSKTKTDNNNSNFTWTGASKYNLNGRESIINPGTAMASHKDDEDKFFPMSGVMIFGKESAGASNTALDNVMITDEEEIKATNPVATERFGTVAVNFQSSSTDPATGDVHAMGALPGMVWQDRDVYLQGPIWAKIPHTDGHFHPSPLMGGFGLKNPPPQILIKNTPVPANPPAEFSATKFASFITQYSTGQVSVEIEWELQKENSKRWNPEVQYTSNYAKSANVDFTVDNNGLYTEPRPIGTRYLTRPL

SEQ ID NO: 737 - protein, 736 aa, Artificial Sequence
  Description of Artificial Sequence: Synthetic polypeptide
MAADGYLPDWLEDNLSEGIREWWDLKPGAPKPKANQQKQDDGRGLVLPGYKYLGPFNGLDKGEPVNAADAAALEHDKAYDQQLKAGDNPYPRYNHADAEFQERLQEDTSFGGNLGRAVFQAKKRVLEPLGLVGEGAKTAPGKKRPVEQSPQEPDSSSGIGKTGQQPAKKRLNFGQTGDSESVPDPQPLGEPPATPAAVGPTTMASGGGAPMADNNEGADGVGNASGNWHCDSTWLGDRVITTSTRTWALPTYNNHLYKQISSASTGASNDNHYFGYSTPWGYFDFNRFHCHFSPRDWQRLINNNWGFRPKRLNFKLFNIQVKEVTTNDGVTTIANNLTSTVQVFSDSEYQLPYVLGSAHQGCLPPFPADVFMIPQYGYLTLNNGSQAVGRSSFYCLEYFPSQMLRTGNNFTFSYTFEEVPFHSSYAHSQSLDRLMNPPIDQYLYYLNRTQNQSGSAQNKDLLFSRGSPAGMSVQPKNWLPGPCYRQQRVSKTKTDNNNSNFTWTGASKYNLNGRESIINPGTAMASHKDDEDKFFPMSGVMIFGKESAGASNTALDNVMITDEEEIKATNPVATERFGTVAVNFQSSSTDPATGDVHAMGALPGMVWQDRDVYLQGPIWAKIPHTDGHFHPSPLMGGFGLKNPPPQILIKNTPVPANPPAEFSATKFASFITQYSTGQVSVEIEWELQKENSKRWNPEVQYTSNYAKSANVDFTVDNNGLYTEPRPIGTRYLTRPL

SEQ ID NO: 738 - protein, 736 aa, Artificial Sequence
  Description of Artificial Sequence: Synthetic polypeptide
MAADGYLPDWLEDNLSEGIREWWDLKPGAPKPKANQQKQDDGRGLVLPGYKYLGPFNGLDKGEPVNAADAAALEHDKAYDQQLKAGDNPYLRYNHADAEFQERLQEDTSFGGNLGRAVFQAKKRVLEPLGLVEEGAKTAPGKKRPVEQSPQEPDSSSGIGKTGQQPAKKRLNFGQTGDSESVPDPRPLGEPPATPAAVGPTTMASGGGAPMADNNEGADGVGNASGNWHCDSTWLGDRVITTSTRTWALPTYNNHLYKQISSASTGASNDNHYFGYSTPWGYFDFNRFHCHFSPRDWQRLINNNWGFRPKRLNFKLFNIQVKEVTTNDGVTTIANNLTSTVQVFSDSEYQLPYVLGSAHQGCLPPFPADVFMIPQYGYLTLNNGSQAVGRSSFYCLEYFPSQMLRTGNNFTFSYTFEEVPFHSSYAHSQSLDRLMNPLIDQYLYYLNRTQNQSGSAQNKDLLFSRGPPAGMSVQPKNWLPGPCYRQQRVSKTKTDNNNSNFTWTGASKYNLNGRESIINPGTAMASHKDDEDKFFPMSGVMIFGKESAGASNTALDNVMITDEEEIKATNPVATERFGTVAVNFQSSSTDPATGDVHAMGALPGMVWQDRDVYLQGPIWAKIPHTDGHFHPSPLMGGFGLKNPPPQILIKNTPVPANPPAEFSATKFASFITQYSTGQVSVEIEWELQKENSKRWNPEVQYTSNYAKSANVDFTVDNNGLYTEPRPIGTRYLTRPL

SEQ ID NO: 739 - protein, 736 aa, Artificial Sequence
  Description of Artificial Sequence: Synthetic polypeptide
MAADGYLPDWLEDNLSEGIREWWDLKPGAPKPKANQQKQDDGRGLVLPGYKYLGPFNGLDKGEPVNAADAAALEHDKAYDQQLKAGDNPYLRYNHADAEFQERLQEDTSFGGNLGRAVFQAKKRVLEPLGLVEEGAKTAPGKKRPVEQSPQEPDSSSGIGKTGQQPAKKRLNFGQTGGSESVPDPQPLGEPPATPAAVGPTTMASGGGAPMADNNEGADGVGNASGNWHCDSTWLGDRVITTSTRTWALPTYNNHLYKQISSASTGASNDNHYFGYSTPWGYFDFNRFHCHFSPRDWQRLINNNWGFRPKRLNFKLFNIQVKEVTTNDGVTTIANNLTSTVQVFSDSEYQLPYVLGSAHQGCLPPFPADVFMIPQYGYLTLNNGSQAVGRSSFYCLEYFPSQMLRTGNNFTFSYTFEEVPFHSSYAHSQSLDRLMNPPIDQYLYYLNRTQNQSGSAQNKDLLFSRGSPAGMSVQPKNWLPGPCYRQQRVSKTKTDNNNSNFTWTGASKYNLNGRESIINPGTAMASHKDDEDKFFPMSGVMIFGKESAGASNTALDNVMITDEEEIKATNPVATERFGTVAVNFQSSSTDPATGDVHAMGALPGMVWQDRDVYLQGPIWAKIPHTDGHFHPSPLMGGFGLKNPPPQILIKNTPVPANPPAEFSATKFASFITQYSTGQVSVEIEWELQKENSKRWNPEVQYTSNYAKSANVDFTVDNNGLYTEPRPIGTRYLTRPL

SEQ ID NO: 740 - protein, 736 aa, Artificial Sequence
  Description of Artificial Sequence: Synthetic polypeptide
MAADGYLPDWLEDNLSEGIREWWDLKPGAPKPKANQQKQDDGRGLVLPGYKYLGPFNGLDKGEPVNAADAAALEHDKAYDQQLKAGDNPYLRYNHADAEFQERLQEDTSFGGNLGRAVFQAKKRVLEPLGLVEEGAKTAPGKKRPVEQSPQEPDSSSGIGKTGQQPAKKRLNFGQTGDSESVPDPQPLGEPPATPAAVGPTTMASGGGAPMADNNEGADGVGNASGNWHCDSTWLGDRVITTSTRTWALPTYNNHLYKQISSASTGASNDNHYFGYSTPWGYFDFNRFHCHFSPRDWQRLINNNWGFRPKRLNFKLFNIQVKEVTTNDGVTTIANNLTSTVQVFSDSEYQLPYVLGSAHQGCLPPFPADVFMIPQYGYLTLNNGSQAVGRSSFYCLEYFPSQMLRTGNNFTFSYTFEEVPFHSSYAHSQSLDRLMNPLIDQYLYYLNRTQNQSGSAQNKDLLFSRGSPAGMSVQPKNWLPGPCYRQQRVSKTKTDNNNSNFTWTGASKYNLNGRESIINPGTAVASHKDDEDKFFPMSGVMIFGKESAGASNTALDNVMITDEEEIKATNPVATERFGTVAVNFQSSSTDPATGDVHAMGALPGMVWQDRDVYLQGPIWAKIPHTDGHFHPSPLMGGFGLKNPPPQILIKNTPVPANPPAEFSATKFASFITQYSTGQVSVEIEWELQKENSKRWNPEVQYTSNYAKSANVDFTVDNNGLYTEPRPIGTRYLTRPL

SEQ ID NO: 741 - protein, 736 aa, Artificial Sequence
  Description of Artificial Sequence: Synthetic polypeptide
MAADGYLPDWLEDNLSEGIREWWDLKPGAPKPKANQQKQDDGRGLVLPGYKYLGPFNGLDKGEPVNAADAAALEHDKAYDQQLKAGDNPYLRYNHADAEFQERLQEDTSFGGNLGRAVFQAKKRVLEPLGLVEEGAKTAPGKKRPVEQSPQEPDSSSGIGKTGQQPAKKRLNFGQTGDSESVPDPQPLGEPPATPAAVGPTTMASGGGAPMADNNEGADGVGNASGNWHCDSTWLGDRVITTSTRTWALPTYNNHLYKQISSASTGASNDNHYFGYSTPWGYFDFNRFHCHFSPRDWQQLINNNWGFRPKRLNFKLFNIQVKEVTTNDGVTTIANNLTSTVQVFSDSEYQLPYVLGSAHQGCLPPFPADVFMIPQYGYLTLNNGSQAVGRSSFYCLEYFPSQMLRTGNNFTFSYTFEEVPFHSSYAHSQSLDRLMNPLIDQYLYYLNRTQNQSGSAQNKDLLFSRGSPAGMSVQPKNWLPGPCYRQQRVSKTKTDNNNSNFTWTGASKYNLNGRESIINPGTAMASHKDDEDKFFPMSGVMIFGKESAGASNTALDNVMITDEEEIKATNPVATERFGTVAVNFQSTSTDPATGDVHAMGALPGMVWQDRDVYLQGPIWAKIPHTDGHFHPSPLMGGFGLKNPPPQILIKNTPVPANPPAEFSATKFASFITQYSTGQVSVEIEWELQKENSKRWNPEVQYTSNYAKSADVDFTVDNNGLYTEPRPIGTRYLTRPL

SEQ ID NO: 742 - protein, 736 aa, Artificial Sequence
  Description of Artificial Sequence: Synthetic polypeptide
MAADGYLPDWLEDNLSEGIREWWDLKPGAPKPKANQQKQDDGRGLVLPGYKYLGPFNGLDKGEPVNAADAAALEHDKAYDQQLKAGDNPYLRYNHADAEFQERLQEDTSFGGNLGRAVFQAKKRVLEPLGLVEEGAKTAPGKKRPVEQSPQEPDSSSGIGKTGQQPAKKRLNFGQTGDSESVPDPQPLGEPPATPAAVGPTTMASGGGAPMADNNEGADGVGNASGNWHCDSTWLGDRVITTSTRTWALPTYNNHLYKQISSASTGASNDNHYFGYSTPWGYFDFNRFHCHFSPRDWQRLINNNWGFRPKRLNFKLFNIQVKEVTTNDGVTTIANNLTSTVQVFSDSEYQPPYVLGSAHQGCLPPFPADVFMIPQYGHLTLNNGSQAVGRSSFYCLEYFPSQMLRTGNNFTFSYTFEEVPFHSSYAHSQSLDRLTNPLIDQYLYYLNRTQNQSGSAQNKDLLFSRGSPAGMSVQPKNWLPGPCYRQQRVSKTKTDNNNSNFTWTGASKYNLNGRESIINPGTAMASHKDDEDKFFPMSGVMIFGKESAGASNTALDNVMITDEEEIKATNPVATERFGTVAVNFQSSSTDPATGDVHAMGALPGMVWQDRDVYLQGPIWAKIPHTDGHFHPSPLMGGFGLKNPPPQILIKNTPVPANPPAEFSATKFASFITQYSTGQVSVEIEWELQKENSKRWNPEVQYTSNYAKSANVDFTVDNNGLYTEPRPIGTRYLTRPL

SEQ ID NO: 743 - protein, 736 aa, Artificial Sequence
  Description of Artificial Sequence: Synthetic polypeptide
MAADGYLPDWLEDNLSEGIREWWDLKPGAPKPKANQQEQDDGRGLVLPGYKYLGPFNGLDKGEPVNAADAAALEHDKAYDQQLKAGDNPYLRYNHADAEFQERLQEDTSFGGNLGRAVFQAKKRVLEPLGLVEEGAKTAPGKKRPVEQSPQEPDSSSGIGKTGQQPAKKRLNFGQTGDSESVPDPQPLGEPPATPAAVGPTTMASGGGAPMADNNEGADGVGNASGNWHCDSTWLGDRVITTSTRTWALPTYNNHLYKQISSASTGASNDNHYFGYSTPWGYFDFNRFHCHFSPRDWQRLINNNWGFRPKRLNFKLFNIQVKEVTTNDGVTTIANNLTSTVQVFSDSEYQLPYVLGSAHQGCLPPFPADVFMIPQYGYLTLNNGSQAVGRSSFYCLEYFPSQMLRTGNNFTFSYTFEEVPFHSSYAHSQSLDRLMNPLIDQYLYYLNRTQNQSGSAQNKDLLFSRGSPAGMSVQPKNWLPGPCYRQQRVSKTKTDNNNSNFTWTGASKYNLNGRESIINPGTAMASHKDDEDKFFPMSGVMIFGKESAGASNTALDNVMITDEEEIKATNPVATERFGTVAVNFQSSSTDPATGDVHATGTLPGMVWQDRDVYLQGPIWAKIPHTDGHFHPSPLMGGFGLKNPPPQILIKTTPVPANPPAEFSATKFASFITQYSTGQVSVEIEWELQKENSKRWNPEVQYTSNYAKSANVDFTVDDNGLYTEPRPIGTRYLTRPL

SEQ ID NO: 744 - protein, 736 aa, Artificial Sequence
  Description of Artificial Sequence: Synthetic polypeptide
MAADGYLPDWLEDNLSEGIREWWDLKPGAPKPKANQQKQDDGRGLVLPGYKYLGPFNGLDKGEPVNAADAAALEHDKAYDQQLKAGDNPYLRYNHADAEFQERLQEDTSFGGNLGRAVFQAKKRVLEPLGLVEEGAKTAPGKKRPVEQSLQEPDSSSGIGKTGQQPAKKRLNFGQTGDSESVPDPQPLGEPPATPAAVGPTTMASGGGAPMADNNEGADGVGNASGNWHCDSTWLGDRVITTSTRTWALPTYNNHLYKQISSASTGASNDNHYFGYSTPWGYFDFNRFHCHFSPRDWQRLINNNWGFRPKRLNFKLFNIQVKEVTTNDGVTTIANNLTSTVQVFSDSEYQLPYVLGSAHQGCLPPFPADVFMIPQYGYLTLNNGSQAVGRSSFYCLEYFPSQMLRTGNNFTFSYTFEEVPFHSSYAHSQSLDRLMNPLIDQYLYYLNRTQNQSGSAQNKDLLFSRGSPAGMSVQPKNWLPGPCYRQQRVSKTKTDNDNSNFTWTGASKYNLNGRESIINPGTAMASHKDDEDKFFPMSGVMIFGKESAGASNTALDNVMITDEEEIKATNPVATERFGTVAVNFQSSSTDPATGDVHAMGALPGMVWQDRDVYLQGPIWAKIPHTDGHFHPSPLMGGFGLKNPPPQILIKNTPVPANPPAEFSATKFASFITQYSTGQVSVEIEWELQKENSKRWNPEVQYTSNYAKSANVDFTVDNNGLYTEPRPIGTRYLTRPL

SEQ ID NO: 745 - protein, 736 aa, Artificial Sequence
  Description of Artificial Sequence: Synthetic polypeptide
MAADGYLPDWLEDNLSEGIREWWDLKPGAPKPKANQQKQDDGRGLVLPGYKYLGPFNGLDKGEPVNAADAAALEHDKAYDQQLKAGDNPYLRYNHADAEFQERLQEDTSFGGNLGRAVFQAKKRVLEPLGLVEEGAKTAPGKKRPVEQSPQEPDSSSGIGKTGQQPAKKRLNFGQTGDSESVPDPQPLGEPPATPAAVGPTTMASGGGAPMADNNEGADGVGNASGNWHCDSTWLGDRVITTSTRTWALPTYNNHLYKQISSASTGASNDNHYFGYSTPWGYFDFNRFHCHFSPRDWQRLINNNWGFRPKRLNFKLFNIQVKEVTTNDGVTTIANNLTSTVQVFSDSEYQLPYVLGSAHQGCLPPFPADVFMIPQYGYLTLNNGSQAVGRSSFYCLEYFPSQMLRTGNNFTFSYTFEEAPFHSSYAHSQSLDRLMNPLIDQYLYYLNRTQNQSGSAQNKDLLFSRGSPAGMSVQPKNWLPGPCYRQQRVSKTKTDNNNSNFTWTGASKYNLNGRESIINPGTAMASHKDDEDKFFPMSGVMIFGKESAGASNTALDNVMITDEEEIKATNPVATERFGTVAVNFQSSSTDPATGDVHAMGALPGMVWQDRDVYLQGPIWAKIPHTDGHFHPSPLMGGFGLKNPPPQILIKNTPVPANPPAEFSATKFASFITQYSTGQVSVEIEWELQKENSKRWNPEVQYTSNYAKSANVDFTVDNNGLYTEPRPVGTRYLTRPL

SEQ ID NO: 746 - protein, 736 aa, Artificial Sequence
  Description of Artificial Sequence: Synthetic polypeptide
MAADGYLPDWLEDNLSEGIREWWDLKPGAPKPKANQQKQDDGRGLVLPGYKYLGPFNGLDKGEPVNAADAAALEHDKAYDQQLKAGDNPYLRYNHADAEFQERLQENTSFGGNLGRAVFQAKKRVLEPLGLVEEGAKTAPGKKRPVEQSPQEPDSSSGIGKTGQQPAKKRLNFGQTGDSESVPDPQPLGEPPATPAAVGPTTMASGGGAPMADNNEGADGVGNASGNWHCDSTWLGDRVITTSTRTWALPTYNNHLYKQISSASTGASNDNHYFGYSTPWGYFDFNRFHCHFPPRDWQRLINNNWGFRPKRLNFKLFNIQVKEVTSNDGVTTIANNLTSTVQVFSDSEYQLPYVLGSAHQGCLPPFPADVFMIPQYGYLTLNNGSQAVGRSSFYCLEYFPSQMLRTGNNFTFSYTFEEVPFHSSYAHSQSLDRLMNPLIDQYLYYLNRTQNQSGSAQNKDLLFSRGSPAGMSVQPKNWLPGPCYRQQRVSKTKTDNNNSNFTWTGASKYNLNGRESIINPGTAMASHKDDEDKFFPMSGVMIFGKESAGASNTALDNVMITDEEEIKATNPVATERFGTVAVNFQSSSTDPATGDVHAMGALPGMVWQDRDVYLQGPIWAKIPHTDGHFHPSPLMGGFGLKNPPPQILIKNTPVPANPPAEFSATKFASFITQYSTGQVSVEIEWELQKENSKRWNPEVQYTSNYAKSANVDFTVDNNGLYTEPRPIGTRYLTRPL

SEQ ID NO: 747 - protein, 736 aa, Artificial Sequence
  Description of Artificial Sequence: Synthetic polypeptide
MAADGYLPDWLEDNLSEGIREWWDLKPGAPKPKANQQKQDDGRGLVLPGYKYLGPFNGLDKGEPVNAADAAALEHDKAYDQQLKAGDNPYLRYNHADAEFQERLQEDTSFGGNLGRAVFQAKKRVLEPLGLVEEGAKTAPGKKRPVEQSPQEPDSSSGIGKTGQQPAKKRLNFGQTGDSESVPDPQPLGEPPATPAAVGPTTMASGGGAPMADNNEGADGVGNASGNWHCDSTWLGDRVITTSTRTWALPTYNNHLYKQISSASTGASNDNHYFGYSTPWGYFDFNRFHCHFSPRDWQRLINNNWGFRPKRLNFKLFNIQVKEVTTNDGVTTIANNLTSTVQVFSDSEYQLPYVLGSAHQGCLPPFPADVFMIPQYGYLTLNNGSQAVGRSSFYCLEYFPSQMLRTGNNFTFSYTFEEVPFHSSYAHSQSLDRLMNPLIDQYLYYLNRTQNQSGSAQNKDLLFSRGSPAGTSVQPKNWLPGPCYRQQRVSKTKTDNNNSNFTWTGASKYNLNGRESIINPGTAMASHKDDEDKFFPMSGVMIFGKESAGASNTALDNVMITDEEEIKATNPVATERFGTVAVNFQSSSTDPATGDVHAMGALPGMVWQDRDVYLQGPIWAKIPHTDGHFHPSPLMGGFGLKNPPPQILIKNTPVPANPPAEFSATKFASFITQYSTGQVSVEIEWELQKENSKRWNPEVQYTSNYAKSANVDFTVDNNGLYTGPRPIGTRYLTRPL

SEQ ID NO: 748 - protein, 736 aa, Artificial Sequence
  Description of Artificial Sequence: Synthetic polypeptide
MAADGYLPDWLEDNLSEGIREWWDLKPGAPKPKANQQKQDDGRGLVLPGYKYLGPFNGLDKGEPVNAADAAALEHDKAYDQQLKAGDNPYLRYNHADAEFQERLQEDTSFGGNLGRAVFQAKKRVLEPLGLVEEGAKTAPGKKRPVEQSPQEPDSSSGIGKTGQQPAKKRLNFGQTGDSESVPDPQPLGEPPATPAAVGPTTMASGGGAPMADNNEGADGVGNAPGNWHCDSTWLGDRVITTSTRTWALPTYNNHLYKQISSASTGASNDNHYFGYSTPWGYFDFNRFHCHFSPRDWQRLINNNWGFRPKRLNFKLFNIQVKEVTTNDGVTTIANNLTSTVQVFSDSEYQLPYVLGSAHQGCLPPFPADVFMIPQYGYLTLNNGSQAVGRSSFYCLEYFPSQMLRTGNNFTFSYTFEEVPFHSSYAHSQSLDRLMNPLIDQYLYYLNRTQNQSGSAQNKDLLFSRGSPAGMSVQPKNWLPGPCYRQQRVSKTKTDNNNSNFTWTGASKYNLNGRESIINPGTAMASHKDDEDKFFPMSGVMIFGKESAGASNTALDNVMITGEEEIKATNPVATERFGTVAVNFQSSSTDPATGDVHAMGALPGMVWQDRDVYLQGPIWAKIPHTDGHFHPSPLMGGFGLKNPPPQILIKNTPVPANPPAEFSATKFASFITQYSTGQVSVEIEWELQKENSKRWNPEVQYTSNYAKSANVDFTVDNNGLYTEPRPIGTRYLTRPL

SEQ ID NO: 749 - protein, 736 aa, Artificial Sequence
  Description of Artificial Sequence: Synthetic polypeptide
MAADGYLPDWLEDNLSEGIREWWDLKPGAPKPKANQQKQDDGRGLVLPGYKYLGPFNRLDKGEPVNAADAAALEHDKAYDQQLKAGDNPYLRYNHADAEFQERLQEDTSFGGNLGRAVFQAKKRVLEPLGLVEEGAKTAPGRKRPVEQSPQEPDSSSGIGKTGQQPAKKRLNFGQTGDSESVPDPQPLGEPPATPAAVGPTTMASGGGAPMADNNEGADGVGNASGNWHCDSTWLGDRVITTSTRTWALPTYNNHLYKQISSASTGASNDNHYFGYSTPWGYFDFNRFHCHFSPRDWQRLINNNWGFRPKRLNFKLFNIQVKEVTTNDGVTTIANNLTSTVQVFSDSEYQLPYVLGSAHQGCLPPFPADVFMIPQYGYLTLNNGGQAVGRSSFYCLEYFPSQMLRTGNNFTFSYTFEEVPFHSSYAHSQSLDRLMNPLIDQYLYYLNRTQNQSGSAQNKDLLFSRGSPAGMSVQPKNWLPGPCYRQQRVSKTKTDNNNSNFTWTGASKYSLNGRESIINPGTAMASHKDDEDKFFPMGGVMIFGKESAGASNTALDNAMITDEEEIKATNPVATERFGTVAVNFQSSSTDPATGDVHAMGALPGMVWQDRDVYLQGPIWAKIPHTDGHFHPSPLMGGFGLKNPPPQILIKNTPVPANPPAEFSATKFASFITQYSTGQVSVEIEWELQKENSKRWNPEVQYTSNYAKSANVDFTVDNNGLYTEPRPIGTRYLTRPL

SEQ ID NO: 750 - protein, 736 aa, Artificial Sequence
  Description of Artificial Sequence: Synthetic polypeptide
MAADGYLPDWLEDNLSEGIREWWDLKPGAPKPKANQQKQDDGRGLVLPGYKYLGPFNGLDKGEPVNAADAAALEHDKAYDQQLKAGDNPYLRYNHADAEFQERLQEDTSFGGNLGRAVFQAKKRVLEPLGLVEEGAKTAPGKKRPVEQSPQEPDSSSGIGKTGQQPAKKRLNFGQTGDSESVPDPQPLGEPPATPAAVGPTTMASGGGAPMADNNEGADGVGNASGNWHCDSTWLGGRVITTSTRTWALPTYNNHLYKQISSASTGASNDNHYFGYSTPWGYFDFNRFHCHFSPRDWQRLINNNWGFRPKRLNFKLFNIQVKEVTTNDGVTTIANNLTSTVQVFSDSEYQLPYVLGSAHQGCLPPFPADVFMIPQYGYLTLNNGSQAVGRSSFYCLEYFPSQMLRTGNNSTFSYTFEEVPFHSSYAHSQSLDRLMNPLIDQYLYYLNRTQNQSGSAQNKDLLFSRGSPAGMSVQPKNWLPGPCYRQQRVSKTKTDNNNSNFTWTGASKYNLNGRESIINPGTAMASHKDDEDKFFPMSGVMIFGKESAGASNTALDNVMITDEEEIKATNPVATERFGTVAVNFQSSSTDPATGDVHAMGTLPGMVWQDRDVYLQGPIWAKIPHTDGHFHPSPLMGGFGLKNPPPQILIKNTPVPANPPAEFSATKFASFITQYSTGQVSVEIEWELQKENSKRWNPEVQYTSNYAKSANVDFTVDNNGLYTEPRPIGTRYLTRPL

SEQ ID NO: 751 - protein, 736 aa, Artificial Sequence
  Description of Artificial Sequence: Synthetic polypeptide
MAADGYLPDWLEDNLSEGIREWWDLKPGAPKPKANQQKQDDGRGLVLPGYKYLGPFNGLDKGEPVSAADAAALEHDKAYDQQLKAGDNPYLRYNHADAEFQERLQEDTSFGGNLGRAVFQAKKRVLEPLGLVEEGAKTAPGKKRPVEQSPQEPDSSSGIGKTGQQPAKERLNFGQTGDSESVPDPQPLGEPPATPAAVGPTTMASGGGAPMADNNEGADGVGNASGNWHCDSTWLGDRVITTSTRTWALPTYNNHLYKQISSASTGASNDNHYFGYSTPWGYFDFNRFHCHFSPRDWQRLINNNWGFRPKRLNFKLFNIQVKEVTTNDGVTTIANNLTSTVQVFSDSEYQLPYVLGSAHQGCLPPFPADVFMIPQYGYLTLNNGSQAVGRSSFYCLEYFPSQMLRTGNNFTFSYTFEEVPFHSSYAHSQSLDRLMNPLIDQYLYYLNRTQNQSGSAQNKDLLFSRGSPAGMSVQPKNWLPGPCYRQQRVSKTKTDNNNSNFTWTGASKYNLNGRESIINPGTAMASHKDDEDKFFPMSGVMIFGKESAGASNTALDNVMITDEEEIKATNPVATERFGTVAVNFQSSSTDPATGDVHAMGALPGMVWQDRDVYLQGPIWAKIPHTDGHFHPSPLMGGFGLKNPPPQILIKNTPVPANPPAEFSATKFASFITQYSTGQVSVEIEWELQKENSKRWNPEVQYTSNYAKSANVDFTVDNNGLYTEPRPIGTRYLTRPL

SEQ ID NO: 752 - protein, 736 aa, Artificial Sequence
  Description of Artificial Sequence: Synthetic polypeptide
MAADGYLPDWLEDNLSEGIREWWDLKPGAPKPKANQQKQDDGRGLVLPGYKYLGPFNGLDKGEPVNAADAAALEHDKAYDQQLKAGDNPYLRYNHADAEFQERLQEDTSFGGNLGRAVFQAKKRVLEPLGLVEEGAKTAPGKKRPVEQSPQEPDSSSGIGKTGQQPAKKRLNFGQTGDSESVPDPQPLGEPPATPAAVGPTTMASGGGAPMADNNEGADGVGNASGNWHCDSTWLGDRVITTSTRTWALPTYNNHLYKQISSASTGASNDNHYFGYSTPWGYFDFNRFHCHFSPRDWQRLINNNWGFRPKRLNFKLFNIQVKEVTTNDGVTTIANNLTSTVQVFSDSEYQLPYVLGSAHQGCLPPFPADVFMIPQYGYLTLNNGSQAVGRSSFYCLEYFPSQMLRTGNNFTFSYTFEEVPFHSSYAHSQSLDRLMNPLIDQYLYYLNRTQNQSGSAQNKDLLFSRGSPAGMSVQPKNWLPGPCYRQQRVSKTKTDNNNSNFTWTGASKYNLNGRESIINPGTAMASHKDDEDKFFPMSGVMIFGKESAGASNTALDNVMITDEGEIKATNPVATERFGTVAVNFQSSSTDPATGDVHAMGALPGMVWQDRDVYLQGPIWAKIPHTDGHFHPSPLMGGFGLKNPPPQILIKNTPVPANPPAEFSATKFASFITQYSTGQVSVEIEWELQKENSKRWNPEVQYTSNYAKSANVDFTVDNNGLYTEPRPIGTRYLTRPL

SEQ ID NO: 753 - protein, 736 aa, Artificial Sequence
  Description of Artificial Sequence: Synthetic polypeptide
MAADGYLPDWLEDNLSEGIREWWDLKPGAPKPKANQQKQDDGRGLVLPGYKYLGPFNGLDKGEPVNAADAAALEHDKAYDQQLKAGDNPYLRYNHADAEFQERLQEDTSFGGNLGRAVFQAKKRVLEPFGLVEEGAKTAPGKKRPVEQSPQEPDSSSGIGKTGQQPAKKRLNFGQTGDSESVPDPQPLGEPPATPAAVGPTTMASGGGAPMADNNEGADGVGNASGNWHCDSTWLGDRVITTSTRTWALPTYNNHLYKQISSASTGASNDNHYFGYSTPWGYFDFNRFHCHFSPRDWQRLINNNWGFRPKRLNFKLFNIQVKEVTTNDGVTTIANNLTSTVQVFSDSEYQLPYVLGSAHQGCLPPFPADVFMIPQYGYLTLNNGSQAVGRSSFYCPEYFPSQMLRTGNNFTFSYTFEEVPFHSSYAHSQSLDRLMNPLIDQYLYYLNRTQNQSGSAQNKDLLFSRGSPAGMSVQPKNWLPGPCYRQQRVSKTKTDNNNSNFTWTGASKYNLNGRESIINPGTAMASHKDDKDKFFPMSGVMIFGKESAGASNTALDNVMITDEEEIKATNPVATERFGTVAVNFQSSNTDPATGDVHVMGALPGMVWQDRDVYLQGPIWAKIPHTDGHFHPSPLMGGFGLKHPPPQILIKNTPVPANPPAEFSATKFASFITQYSTGQVSVEIEWELQKENSKRWNPEVQYTSNYAKSANVDFTVDNNGLYTEPRPIGTRYLTRPL

SEQ ID NO: 754 - protein, 736 aa, Artificial Sequence
  Description of Artificial Sequence: Synthetic polypeptide
MAADGYLPDWLEDNLSEGIREWWDLKPGAPKPKANQQKQDDGRGLVLPGYKYLGPFNGLDKGEPVNAADAAALEHDKAYDQQLKAGDNPYLRYNHADAEFQERLQEDTSFGGNLGRAVFQAKKRVLEPFGLVEEGAKTAPGKKRPVEQSPQEPDSSSGIGKTGQQPAKKRLNFGQTGDSESVPDPQPLGEPPATPAAVGPTTMASGGGAPMADNNEGADGVGNASGNWHCDSTWLGDRVITTSTRTWALPTYNNHLYKQISSASTGASNDNHYFGYSTPWGYFDFNRFHCHFSPRDWQRLINNNWGFRPKRLNFKLFNIQVKEVTTNDGVTTIANNLTSTVQVFSDSEYQLPYVLGSAHQGCLPPFPADVFMIPQYGYLTLNNGSQAVGRSSFYCLEYFPSQMLRTGNNFTFSYTFEEVPFHSSYAHSQSLDRLMNPLIDQYLYYLNRTQNQSGSAQNKDLLFSRGSPAGMSVQPKNWLPGPCYRQQRVSKTKTDNNNSNFTWTGASKYNLNGRESIINPGTAMASHKDDKDKFFPMSGVMIFGKESAGASNTALDNVMITDEEEIKATNPVATERFGTVAVNFQSSDTDPATGDVHVMGALPGMVWQDRDVYLQGPIWAKIPHTDGHFHPSPLMGGFGLKHPPPQILIKNTPVPANPPAEFSATKFASFITQYSTGQVSVEIEWELQKENSKRWNPEVQYTSNYAKSANVDFTVDNNGLYTEPRPIGTRYLTRPL

SEQ ID NO: 755 - protein, 736 aa, Artificial Sequence
  Description of Artificial Sequence: Synthetic polypeptide
MAADGYLPDWLEDNLSEGIREWWDLKPGAPKPKANQQKQGDGRGLVLPGYKYLGPFNGLDKGEPVNAADAAALEHDKAYDQQLKAGDNPYLRYNHADAEFQERLQEDTSFGGNLGRAVFQAKKRVLEPFGLVEEGAKTAPGKKRPVEQSPQEPDSSSGIGKTGQQPAKKRLNFGQTGDSESVPDPQPLGEPPATPAAVGPTTMASGGGAPMADNNEGADGVGNASGNWHCDSTWLGDRVITTNTRTWALPTYNNHLYKQISSASTGASNDNHYFGYSTPWGYFDFNRFHCHFSPRDWQRLINNNWGFRPKRLNFKLFNIQVKEVTTNDGVTTIANNLTSTVQVFSDSEYQLPYVLGSAHQGCLPPFPADVFMIPQYGYLTLNNGSQAVGRSSFYCLEYFPSQMLRTGNNFTFSYTFEEVPFHSSYGHSQSLDRLMNLLIDQYLYYLNRTQNQSGSAQNKDLLFSRGSPAGMFVQPKNWLPGPCYRQQRVSKTKTDNNNSNFTWTGASKYNLNGRESIINPGTAMASHKDDEDKFFPMSGVMIFGKESAGASNTALDNVMITDEEEIKATNPVATERFGTVAVNFQSSSTDPATGDVHVMGALPGMVWQDRDVYLQGPIWAKIPHTDGHFHPSPLMGGFGLKHPPPQILIKNTPVPANPPAEFSATKFASFITQYSTGQVSVEIEWELQKENSKRWNPEVQYTSNYAKSANVDFTVDNNGLYTEPRPIGTRYLTRPL

SEQ ID NO: 756 - protein, 736 aa, Artificial Sequence
  Description of Artificial Sequence: Synthetic polypeptide
MAADGYLPDWLEDNLSEGIREWWDLKPGAPKPKANQQKQDDGRGLVLPGYKYLGPFNGLDKGEPVNAADAAALEHDKAYDQQLKAGDNPYLRYNHADAEFQERLQEDTSFGGNLGRAVFQAKKRVLEPFGLVEEGAKTAPGKKRPVEQSPQEPDSSSGIGKTGQQPAKKRLNFGQTGDSESVPDPQPLGEPPATPAAVGPTTMASGGGAPMADNNEGADGVGNASGNWHCDSTWLGDRVITTNTRTWALPTYNNHLYKQISSASTGASNDNHYFGYSTPWGYFDFNRFHCHFSPRDWQRLINNNWGFRPKRLNFKLFNIQVKEVTTNDGVTTIANNLTSTVQVFSDSEYQLPYVLGSAHQGCLPPFPADVFMIPQYGYLMLNNGSQAVGRSSFYCLEYFPSQMLRTGNNFTFSYTFEEVPFHSSYAHSQSLDRLMNPLIDQYLYYLNRTQNQSGSAQNKDLLFSRGSPAGMSVQPKNWLPGPCYRQQRVSKTKTDNNNSNFTWTGASKYNLNGRESIINPGTAMASHKDDEDKFFPMSGVMIFGKESAGASNTALDNVMITDEEEIKATNPAATERFGTVAVNFQSSSTDPATGDVHVMGALPGMVWQDRDVYLQGPIWAKIPHTDGHFHPSPLMGGFGLKHPPPQILIKNTPVPANPPAEFSATKFASFITQYSTGQVSVEIEWELQKENSKRWNPEVQYTSNYAKSANVDFTVDNNGLYTEPRPIGTRYLTRPL

SEQ ID NO: 757 - protein, 736 aa, Artificial Sequence
  Description of Artificial Sequence: Synthetic polypeptide
MAADGYLPDWLEDNLSEGIREWWDLKPGAPKPKANQQKQDDGRGLVLPGYKYLGPFNGLDKGEPVNAADAAALEHDKAYDQQLKAGDNPYLRYNHADAEFQERLQEDTSFGGNLGRAVFQAKKRVLEPFGLVEEGAKTAPGKKRPVEQSPQEPDSSSGIGKTGQQPAKKRLNFGQTGDSESVPDPQPLGEPPATPAAVGPTTMASGGGAPMADNNEGADGVGNASGNWHCDSTWLGDRVITTSTRTWALPTYNNHLYKQISSASTGASNDNHYFGYSTPWGYFDFNRFHCHFSPRDWQRLINNNWGFRPKRLNFKLFNIQVKEVTTNDGVTTIANNLTSTVQVFSDSEYQLPYVLGSAHQGCLPPFPADVFMIPQYGYLTLNNGSQAVGRSSFYCLEYFPSQMLRTGNNFTFSYTFEEVPFHSSYAHSQSLDRLMNPLIDQYLYYLNRTQNQSGSAQNKDLLFSRGSPAGMSVQPKNWLPGPCYRQQRVSKTKTDNNNSNFTWTGASKYNLNGRESIINPGTAMASHKDDEDKFFPMSGVMIFGKESAGASNTALDNVMITDEEEIKATNPVATERFGTVAVNFQSSSTDPATGDVHVMGALPGMVWQDRDVYLQGPIWAKIPHTDGHFHPSPLMGGFGLKHPPPQILIKNTPVPANPPAEFSATKFASFITQYSTGQVSVEIEWELQKENSKRWNPEVQYTSNYAKSANVDFTVDNNGLYTEPRPIGTRYLTRPL

SEQ ID NO: 758 - protein, 736 aa, Artificial Sequence
  Description of Artificial Sequence: Synthetic polypeptide
  MOD_RES (102)..(102): Xaa = any amino acid
MAADGYLPDWLEDNLSEGIREWWDLKPGAPKPKANQQKQDDGRGLVLPGYKYLGPFNGLDKGEPVNAADAAALEHDKAYDQQLKAGDNPYLRYNHADAEFQXRLQEDTSFGGNLGRAVFQAKKRVLEPFGLVEEGAKTAPGKKRPVEQSPQEPDSSSGIGKTGQQPAKKRLNFGQTGDSESVPDPQPLGEPPATPAAVGPTTMASGGGAPMADNNEGADGVGNASGNWHCDSTWLGGRVITTSTRTWALPTYNNHLYKQISSASTGASNDNHYFGHSTPWGYFDFNRFHCHFSPRDWQRLINNNWGFRPKRLNFKLFNIQVKEVTTNDGVTTIANNLTSTVQVFSDSEYQLPYVLGSAHQGCLPPSPADVFMIPQYGYLTLNNGSQAVGRSSFYCLEYFPSQMLRTGNNFTFSYTFEEVPFHSSYAHSQSLDRLMNPLIDQYLYYLNRTQNQSGSAQNKDLLFSRGSPAGMSVQPKNWLPGPCYRQQRVSKTKTDNNNSNFTWTGASKYNLNGRESIINPGTAMASHKDDKDKFFPMSGVMIFGKESAGASNTALDNVMITDEEEIKATNPVATERFGTVAVNFQSSNTDPATGDVHVMGALPGMVWQDRDVYLQGPIWAKIPHTDGHFHPSPLMGGFGLKHPPPQILIKNTPVPANPPAEFSATKFASFITQYSTGQVSVEIEWELQKENSKRWNPEVQYTSNYAKSANVDFTVDNNGLYTEPRPIGTRYLTRPL

SEQ ID NO: 759 - protein, 736 aa, Artificial Sequence
  Description of Artificial Sequence: Synthetic polypeptide
MAADGYFPDWLEDNLSEGIREWWDLKPGAPKPKANQQKQDDGRGLVLPGYKYLGPFNGLDKGEPVNAADAAALEHDKAYDQQLKAGDNPYLRYNHADAEFQERLQEDTSFGGNLGRAVFQAKKRVLEPFGLVEEGAKTAPGKKRPVEQSPQEPDSSSGIGRTGQQPAKKRLNFGQTGDSESVPDPQPLGEPPATPAAVGPTTMASGGGAPMADNNEGADGVGNASGNWHCDSTWLGDRVITTSTRTWALPTYNNHLYKQISSASTGASNDNHYFGYSTPWGYFDFNRFHCHFSPRDWQRLINNNWGFRPKRLNFKLFNIQVKEVTTNDGVTTIANNLTSTVQVFSDSEYQLPYVLGSAHQGCLPPFPADVFMIPQYGYLTLNNGSQAVGRSSFYCLEYFPSQMLRTGNNFTFSYTFEEVPFHSSYAHSQSLDRLMNPLIDQYLYYLNRTQNQSGSAQNKDLLFSRGSPAGMSVQPKNWLPGPCYRQQRVSKTKTDNNNSNFTWTGASKYNLNGRESIINPGTAMASHKDDEDKFFPMSGVMIFGKESAGASNTALDNVMITDEEEIKATNPVATERFGTVAVNFQSSSPDPATGDVHVMGALPGMVWQDRDVYLQGPIWAKIPHTDGHFHPSPLMGGFGLKHPPPQILIKNTPVPANPPAEFSATKFASFITQYSTGQVSVEIEWELQKENSKRWNPEVQYTSNYAKSANVDFTVDNNGLYSEPRPIGTRYLTRPL

SEQ ID NO: 760 - protein, 736 aa, Artificial Sequence
  Description of Artificial Sequence: Synthetic polypeptide
MAADGYLPDWLEDNLSEGIREWWDLKPGAPKPKANQQKQDDGRGLVLPGYKYLGPFNGLDKGEPVNAADAAALEHDKAYDQQLKAGDNPYLRYNHADAEFQERLQEDTSFGGNLGRAVFQAKKRVLEPFGLVEEGAKTAPGKKRPVEQSPQEPDSSSGIGKTGQQPAKKRLNFGQTGDSESVPDPQPLGEPPATPAAVGPTTMASGGGAPMADNNEGADGVGNASGNWHCDSTWLGDRVITTSTRTWALPTYNNHLYKQTSSASTGASNDNHYFGYSTPWGYFDFNRFHCHFSPRDWQRLINNNWGFRPKRLNFKLFNIQVKEVTTNDGVTTIANNLTSTVQVFSDSEYQLPYVLGSAHQGCLPPFPADVFMIPQYGYLTLNNGSQAVGRSSFYCLEYFPSQMLRTGNNFTFSYTFEEVPFHSSYAHSQSLDRLMNPLIDQYLYYLNRTQNQSGSAQNKDLLFSRGSPAGMSVQPKNWLPGPCYRQQRVSKTKTDYNNSNFTWTGASKYNLNGRESIINPGTAMASHKDDEDKFFPMSGVMIFGKESAGASNTALDNVMITDEEEIKATNPVATERFGTVAVNFQSSSTDPATGDVHVMGALPGMVWQDRDVYLQGPIWAKIPHTDGHFHPSPLMGGFGLKHPPPQILIKNTPVPANPPAEFSATKFASFITQYSTGQVSVEIEWELQKENSKRWNPEVQYTSNYAKSANVDFTVDNNGLYTEPRPIGTRYLTRPL

SEQ ID NO: 761 - protein, 736 aa, Artificial Sequence
  Description of Artificial Sequence: Synthetic polypeptide
MAADGYPPDWLEDNLSEGIREWWDLKPGVPKPKANQQKQDDGRGLVLPGYKYLGPFNGLDKGEPVNAADAAALEHDKAYDQQLKAGDNPYLRYNHADAEFQERLQEDTSFGGNLGRAVFQAKKRVLEPFGLVEEGAKTAPGKKRPVEQSPQEPDSSSGIGKTGQQPAKKRLNFGQTGDSESVPDPQPLGEPPATPAAVGPTTMASGGGAPMADNNEGADGVGNASGNWHCDSTWLGDRVITTSTRTWALPTYNNHLYKQISSASTGASNDNHYFGYSTPWGYFDFNRFHCHFSPRDWQRLINNNWGFRPKRLNFKLFNIQVKEVTTNDGVTTIANNLTSTVQVFSDSEYQLPYVLGSAHQGCLPPFPADVFMIPQYGYLTLNNGSQAVGRSSFYCLEYFPSQMLRTGNNFTFSYTFEEVPFHSSYAHSQSLDRLMNPLIDQYLYYLNRTQNQSGSAQNKDLLFSRGSPAGMSVQPKNWLPGPCYRQQRVSKTKTDNNNSNFTWTGASKYNLNGRESIINPGTAMASHKDDEDKFFPMSGVMIFGKESAGASNTALDNVMITDEEEIKATNPVATERFGTVAVNFQSSSTDPATGDVHVMGALPGMVWQDRDVYLQGPIWAKIPHTDGHFHPSPLMGGFGLKHPPPQILIKNTPVPANPPAEFSATKFASFITQYSTGQVSVEIEWELQKENSKRWNPEVQYTSNYAKSANVDFTVDNNGLYTEPRPIGTRYLTRPL

SEQ ID NO: 762 - protein, 732 aa, Artificial Sequence
  Description of Artificial Sequence: Synthetic polypeptide
MAADGYLPDWLEDNLSEGIREWWDLKPGAPKPKANQQKQDDGRGLVLPGYKYLGPFNGLDKGEPVNAADAAALEHDKAYDQQLKAGDNPYLRYNHADAEFQERLQEDTSFGGNLGRAVFQAKKRVLEPFGLVEEGAKTAPGKKRPVEQSPQEPDSSSGIGKTGQQPAKKRLNFGQTGDSESVPDPQPLGEPPATPAAVGPTTMASGGGAPMADNNEGADGVGNASGNWHCDSTWLGDRVITTSTRTWALPTYNNHLYKQISSASTGASNDNHYFGYSTPWGYFDFNRFHCHFSPRDWQRLINNNWGFRPKRLNFKLFNIQVKEVTTNDGVTTIANNLTSTVQAFSDSEYQLPYVLGSAHQGCLPPFPADVFMIPQYGYLTLNNGSQAVGRSSFYCLEYFPSQMLRTGNNFTFSYTFEEVPFHSSYAHSQSLDRLMNPLIDPYLYYLNRTQNQSGSAQNKDLLFSRGSPAGMSVQPKNWLPGPCYRQQRVSKTKTDNNNSNFTWTGASKYNLNGRESIINPGTAMASHKDDEDKFFPMSGVMIFGKESAGASNTALDNVMITDEEEIKATNPVATERFGTVAVNFQSSSTDPATGDVHVMGALPGMVWQDRDVYLQGPIWAKIPHTDGHFHPSPLMGGFGLKHPPPQILIKNTPVPANPPAEFSATKFASFITQYSTGQVSVEIEWELQKENSKRWNPEVQYTSNYAKSANVDFTVDNNGLYTEPRPIGTRYL

SEQ ID NO: 763 - protein, 736 aa, Artificial Sequence
  Description of Artificial Sequence: Synthetic polypeptide
MAADGYLPDWLEDNLSEGIREWWDLKPGAPKPKANQQKQDDGRGLVLPGYKYLGPFNGLDKGEPVNAADAAALEHDKAYDQQLKAGDNPYLRYNHADAEFQERLQEDTSFGGNLGRAVFQAKKRVLEPFGLVEEGAKTAPGKKRPVEQSPQEPDSSSGIGKTGQQPAKKRLNFGQTGDSESVPDPQPLGEPPATPAAVGPTTMASGGGAPMADNNEGADGVGNASGNWHCDSTWLGDRVITTSTRTWALPTYNNHLYKQISSASTGASNDNHYFGYSTPWGYFDFNRFHCHFSPRDWQRLINNNWGFRPKRLNFKLFNIQVKEVTTNDGVTTIANNLTSTVQVFSDSEYQLPYVLGSAHQGCLPPFPADVFMIPQYGYLTLNNGSQAVGRSSFYCLEYFPSQMLRTGNNFTFSYTFEEVPFHSSYAHSQSLDRLMNPLIDQYLYYLNRTQNQSGSAQNKDLLFSRGSPAGMSVQPKNWLPGPCYRQQRVSKTKTDNNNSNFTWTGASKYNLNGRESIINPGTAMASHKDDEDKFFPMSGVMIFGKESAGASNTALDNVMITDEEEIKATNPVATERFGTVAVNFQSSSTDPATGDVHVMGALPGMVWQDRDVYLQGPIWAKIPHTDGHSHPSPLMGGFGLKHPPPQILIKNTPVPANPPAEFSATKFASFITQYSTGQVSVEIEWELQKENSKRWNPEVQYTSNYAKSANVDFTVDNNGLYTEPRPIGTRYLTRPL

SEQ ID NO: 764 - protein, 736 aa, Artificial Sequence
  Description of Artificial Sequence: Synthetic polypeptide
MAADGYLPDWLEDNLSEGIREWWDLKPGAPKPKANQQKQDDGRGLVLPGYKYLGPFNGLDKGEPVNAADAAALEHDKAYDQQLKAGDNPYLRYNHADAEFQERLQEDTSFGGNLGRAVFQAKKRVLEPFGLVEEGAKTAPGKKRPVEQSPQEPDSSSGIGKTGQQPAKKRLNFGQTGDSESVPDPQPLGEPPATPAAVGPTTMASGGGAPMADNNEGADGVGNASGNWHCDSTWLGDRVITTSTRTWALPTYNNHLYKQISSASTGASNDNHYFGYSTPWGYFDFNRFHCHFSPRDWQRLINNNWGFRPKRLNFKLFNIQVKEVTTNDGVTTIANNLTSTVQVFSDSEYQLPYVLGSAHQGCLPPFPADVFMIPQYGYLTLNNGSQAVGRSSFYCLEYFPSQMLRTGNNFTFSYTFEEVPFHSSYAHSQSLDRLMNPLIDLYLYYLNRTQNQSGSAQNKDLLFSRGSPAGMSVQPKNWLPGPCYRQQRVSKTKTDNNNSNFTWTGASKYNLNGRESIINPGTAMASHKDDEDKFFPMSGVMIFGKESAGTSNTALDNVMITDEEEIKATNPVATERFGTVAVNFQSSSTDPATGDVHVMGALPGMVWQDRDVYLQGPIWAKIPHTDGHFHPSPLMGGFGLKHPPPQILIKNTPVPANPPAEFSATKFASFITQYSTGQVSVEIEWELQKENSKRWNPEVQYTSNYAKSANVDFTVDNNGLYTEPRPIGTRYLTRPL

SEQ ID NO: 765 - protein, 736 aa, Artificial Sequence
  Description of Artificial Sequence: Synthetic polypeptide
MAADGYLPDWLEDSLSEGIREWWDLKPGAPKPKANQQKQDDGRGLVLPGYKYLGPFNGLDKGEPVNAADAAALEHDKAYDQQLKAGDNPYLRYNHADAEFQERLQEDTSFGGNLGRAVFQAKKRVLEPFGLVEEGAKTAPGKKRPVEQSPQEPDSSSGIGKTGQQPAKKRLNFGQTGDSESVPDPQPLGEPPATPAAVGPTTMASGGGAPMADNNEGADGVGNASGNWHCDSTWLGDRVITTSTRTWALPTYNNHLYKQISSASTGASNDNHYFGYSTPWGYFDFNRFHCHFSPRDWQRLINNNWGFRPKRLNFKLFNIQVKEVTTNDGVTTIANNLTSTVQVFSDSEYQLPYVLGSAHQGCLPPFPADVFMIPQYGYLTPNNGSQAVGRSSFYCLEYFPSQMLRTGNNFTFSYTFEEVPFHSSYAHSQSLDRLMNPLIDQYQYYLNRTQNQSGSAQNKDLLFSRGSPAGMSVQPKNWLPGPCYRQQRVSKTKTDNNNSNFTWTGASKYNLNGRESIINPGTAMASHKDDEDKFFPMSGVMIFGKESAGASNTALDNVMITDEEEIKATNPVATERFGTVAVNFQSSSTDPATGDVHVMGALPGMVWQDRDVYLQGPIWAKIPHTDGHFHPSPLMGGFGLKHPPPQILIKNTPVPANPPAEFSATKFASFITQYSTGQVSVEIEWELQKENSKRWNPEVQYTSNYAKSANVDFTVDNNGLYTEPRPIGTRYLTRPL

SEQ ID NO: 766 - protein, 736 aa, Artificial Sequence; identical to SEQ ID NO: 757
  Description of Artificial Sequence: Synthetic polypeptide

SEQ ID NO: 767 - protein, 735 aa, Artificial Sequence
  Description of Artificial Sequence: Synthetic polypeptide
MAADGYLPDWLEDTLSEGIRQWWKLKPGPPPPKPAERHKDDSRGLVLPGYKYLGPFNGLDKGEPVNEADAAALEHDKAYDRQLDSGDNPYLKYNHADAEFQERLKEDTSFGGNLGRAVFQAKKRVLEPLGLVEEPVKTAPGKKRPVEHSPVEPDSSSGTGKAGQQPARKRLNFGQTGDADSVPDPQPLGQPPAAPSGLGTNTMATGSGAPMADNNEGADGVGNSSGNWHCDSTWMGDRVITTSTRTWALPTYNNHLYKQISSQSGASNDNHYFGYSTPWGYFDFNRFHCHFSPRDWQRLINNNWGFRPKRLNFKLFNIQVKEVTQNDGTTTIANNLTSTVQVFTDSEYQLPYVLGSAHQGCLPPFPADVFMVPQYGYLTLNNGSQAVGRSSFYCLEYFPSQMLRTGNNFTFSYTFEDVPFHSSYAHSQSLDRLMNPLIDQYLYYLSRTNTPSGTTTQSRLQFSRAGASDIRDQSRNWLPGPCYRQQRVSKTSADNNNSEYSWTGATKYHLNGRDSLVNPGPAMASHKDDEEKFFPQSGVLIFGKQGSEKTNVDIEKVMITDEEEIRTTNPVATEQYGSVSTNLQRGNRQAATADVNTQGVLPGMVWQDRDVYLQGPIWAKIPHTDGHFHPSPLMGGFGLKHPPPQILIKNTPVPANPSTTFSAAKFASFITQYSTGQVSVEIEWELQKENSKRWNPEIQYTSNYNKSVNVDFTVDTNGVYSEPRPIGTRYLTRNL

SEQ ID NO: 768 - DNA, 2211 bp, Artificial Sequence
  Description of Artificial Sequence: Synthetic polynucleotide
atggctgctgacggttatcttccagattggctcgaggacaacctttctgaaggcattcgtgagtggtgggctctgaaacctggagtccctcaacccaaagcgaaccaacaacaccaggacaaccgtcggggtcttgtgcttccgggttacaaatacctcggacccggtaacggactcgacaaaggagagccggtcaacgaggcggacgcggcagccctcgaacacgacaaagcttacgaccagcagctcaaggccggtgacaacccgtacctcaagtacaaccacgccgacgccgagtttcaggagcgtcttcaagaagatacgtcttttgggggcaaccttggcagagcagtcttccaggccaaaaagaggatccttgagcctcttggtctggttgaggaagcagctaaaacggctcctggaaagaagaggcctgtagatcagtctcctcaggaaccggactcatcatctggtgttggcaaatcgggcaaacagcctgccagaaaaagactaaatttcggtcagactggcgactcagagtcagtcccagaccctcaacctctcggagaaccaccagcagcccccacaagtttgggatctaatacaatggcttcaggcggtggcgcaccaatggcagacaataacgagggtgccgatggagtgggtaattcctcaggaaattggcattgcgattcccaatggctgggcgacagagtcatcaccaccagcaccagaacctgggccctgcccacttacaacaaccatctctacaagcaaatctccagccaatcaggagcttcaaacgacaaccactactttggctacagcaccccttgggggtattttgactttaacagattccactgccacttctcaccacgtgactggcagcgactcattaacaacaactggggattccggcccaagaaactcagcttcaagctcttcaacatccaagttaaagaggtcacgcagaacgatggcacgacgactattgccaataaccttaccagcacggttcaagtgtttacggactcggagtatcagctcccgtacgtgctcgggtcggcgcaccaaggctgcctcccgccgtttccagcggacgtcttcatggtccctcagtatggatacctcaccctgaacaacggaagtcaagcggtgggacgctcatccttttactgcccggagtacttcccttcgcagatgctaaggactggaaataacttccaattcagctataccttcgaggatgtaccttttcacagcagctacgctcacagccagagtttggatcgcttgatgaatcctcttattgatcagtatctgtactacctgaacagaacgcaaggaacaacctctggaacaaccaaccaatcacggctgctttttagccaggctgggcctcagtctatgtctttgcaggccagaaattggctacctgggccctgctaccggcaacagagactttcaaagactgctaacgacaacaacaacagtaactttccttggacagcggccagcaaatatcatctcaatggccgcgactcgctggtgaatccaggaccagctatggccagtcacaaggacgatgaagaaaaatttttccctatgcacggcaatctaatatttggcaaagaagggacaacggcaagtaacgcagaattagataatgtaatgattacggatgaagaagagattcgtaccaccaatcctgtggcaacagagcagtatggaactgtggcaaataacttgcagagctcaaatacagctcccacgactagaactgtcaatgatcagggggccttacctggcatggtgtggcaagatcgtgacgtgtaccttcaaggacctatctgggcaaagattcctcacacggatggacactttcatccttctcctctgatgggaggctttggactgaaacatccgcctcctcaaatcatgatcaaaaatactccggtaccggcaaatcctccgacgactttcagcccggccaagtttgcttcatttatcactcagtactccactggacaggtcagcgtggaaattgagtgggagctacagaaagaaaacagcaaacgttggaatccagagattcagtacacttccaactacaacaagtctgttaatgtggactttactgtagacactaatggtgtttatagtgaacctcaccctattggaacccggtatctcacacgaaacttgtaa

SEQ ID NO: 769 - DNA, 2211 bp, Artificial Sequence
  Description of Artificial Sequence: Synthetic polynucleotide
atggctgctgatggttatcttccagattggctcgaggacaacctttctgaaggcattcgtgagtggtgggctctgaaacctggagtccctcaacccaaagcgaaccaacaacaccaggacaaccgtcggggtcttgtgcttccgggttacaaatacctcggacccggtaacggactcgacaaaggagagccggtcaacgaggcggacgcggcagccctcgaacacgacaaagcttacgaccagcagctcaaggccggtgacaacccgtacctcaagtacaaccacgccgacgccgagtttcaggagcgtcttcaagaagatacgtcttttgggggcaaccttggcagagcagtcttccaggccaaaaagaggatccttgagcctcttggtctggttgaggaagcagctaaaacggctcctggaaagaagaggcctgtagatcagtctcctcaggaaccggactcatcatctggtgttggcaaatcgggcaaacagcctgccagaaaaagactaaatttcggtcagactggcgactcagagtcagtcccagaccctcaacctctcggagaaccaccagcagcccccacaagtttgggatctaatacaatggcttcaggcggtggcgcaccaatggcagacaataacgagggtgccgatggagtgggtaattcctcaggaaattggcattgcgattcccaatggctgggcgacagagtcatcaccaccagcaccagaacctgggccctgcccacttacaacaaccatctctacaagcaaatctccagccaatcaggagcttcaaacgacaaccactactttggctacagcaccccttgggggtattttgactttaacagattccactgccacttctcaccacgtgactggcagcgactcattaacaacaactggggattccggcccaagaaactcagcttcaagctcttcaacatccaagttaaagaggtcacgcagaacgatggcacgacgactgttgccaataaccttaccagcacggttcaagtgtttacggactcggagtatcaactcccgtacgtgctcgggtcggcgcaccaaggctgtctcccgccgtttccagcggacgtcttcatggtccctcagtatggatacctcaccctgaacaacggaagtcaagcggtgggacgctcatccttttactgcctggagtacttcccttcgcagatgctaaggactggaaataacttccaattcagctataccttcgaggatgtaccttttcacagcagctacgctcacagccagagtttggatcgcttgatgaatcctcttattgatcagtatctgtactacctgaacagaacgcaaggaacaacctctggaacaaccaaccaatcacggctgctttttagccaggctgggcctcagtctatgtctttgcaggccagaaattggctacctgggccctgctaccggcaacagagactttcaaagactgctaacgacaacaacaacagtaactttccttggacagcggccagcaaatatcatctcaatggccgcgactcgctggtgaatccaggaccagctatggccagtcacaaggacgatgaagaaaaatttttccctatgcacggcaatctaatatttggcaaagaagggacaacggcaagtaacgcagaattagataatgtaatgattacggatgaagaagagattcgtaccaccaatcctgtggcaacagagcagtatggaactgtggcaaataacttgcagagctcaaatacagctcccacgactagaactgtcaatgatcagggggccttacctggcatggtgtggcaagatcgtgacgtgtaccttcaaggacctatctgggcaaagattcctcacacggatggacactttcatccttctcctctgatgggaggctttggactgaaacatccgcctcctcaaatcatgatcaaaaatactccggtaccggcaaatcctccgacgactttcagcccggccaagtttgcttcatttatcactcagtactccactggacaggtcagcgtggaaattgagtgggagctacagaaagaaaacagcaaacgttggaatccagagattcagtacacttccaactacaacaagtctgttaatgtggactttactgtagacactaatggtgtttatagtgaacctcgccctattggaacccggtatctcacacgaaacttgtaa

SEQ ID NO: 770 - DNA, 2211 bp, Artificial Sequence
  Description of Artificial Sequence: Synthetic polynucleotide
atggctgctgacggttatcttccagattggctcgaggacaacctttctgaaggcattcgtgagtggtgggctctgaaacctggagtccctcaacccaaagcgaaccaacaacaccaggacaaccgtcggggtcttgtgcttccgggttacaaatacctcggacccggtaacggactcgacaaaggagagccggtcaacgaggcggacgcggcagccctcgaacacgacaaagcttacgaccagcagctcaaggccggtgacaacccgtacctcaagtacaaccacgccgacgccgagtttcaggagcgtcttcaagaagatacgtcttttgggggcaaccttggcagagcagtcttccaggccaaaaagaggatccttgagcctcttggtctggttgaggaagcagctaaaacggctcctggaaagaagaggcctgtagatcagtctcctcaggaaccggactcatcatctggtgttggcaaatcgggcaaacagcctgccagaaaaagactaaatttcggtcagactggcgactcagagtcagtcccagaccctcaacctctcggagaaccaccagcagcccccacaagtttgggatctaatacaatggcttcaggcggtggcgcaccaatggcagacaataacgagggtgccgatggagtgggtaattcctcaggaaattggcattgcgattcccaatggctgggcgacagagtcatcaccaccagcaccagaacctgggccctgcccacttacaacaaccatctctacaagcaaatctccggccaatcaggagcttcaaacgacaaccactactttggctacagcaccccttgggggtattttgactttaacagattccactgccacttctcaccacgtgactggcagcgactcattaacaacaactggggattccggcccaagaaactcagcttcaagctcttcaacatccaagttaaagaggtcacgcagaacgatggcacgacgactattgccaataaccttaccagcacggttcaagtgtttacggactcggagtatcagctcccgtacgtgctcgggtcggcgcaccaaggctgtctcccgccgtttccagcggacgtcttcatggtccctcagtatggatacctcaccctgaacaacggaagtcaagcggtgggacgctcatccttttactgcctggagtacttcccttcgcagatgctaaggactggaaataacttccaattcagctataccttcgaggatgtaccttttcacagcagctacgctcacagccagagtttggatcgcttgatgaatcctcttattgatcagtatctgtactacctgaacagaacgcaaggaacaacctctggaacaaccaaccaatcacggctgctttttagccaggctgggcctcagtctatgtctttgcaggccagaaattggctacctgggccctgctaccggcaacagagactttcaaagactgctaacggcaacaacaacagtaactttccttggacagcggccagcaaatatcatctcaatggccgcgactcgctggtgaatccaggaccagctatggccagtcacaaggacgatgaagaaaaatttttccctatgcacggcaatctaatatttggcaaagaagggacaacggcaagtaacgcagaattagataatgtaatgattacggatgaagaagagattcgtaccaccaatcctgtggcaacagagcagtgtggaactgtggcaaataacttgcagagctcaaatacagctcccacgactagaactgtcaatgatcagggggccttacctggcatggtgtggcaagatcgtgacgtgtaccttcaaggacctatctgggcaaagattcctcacacggatggacactttcatccttctcctctgatgggaggctttggactgaaacatccgcctcctcaaatcatgatcaaaaatactccggtaccggcaaatcctccgacgactttcagcccggccaagtttgcttcatttatcactcagtactccactggacaggtcagcgtggaaattgagtgggagctacagaaagaaaacagcaaacgttggaatccagagattcagtacacttccaactacaacaagtctgttaatgtggactttactgtagacactaatggtgtttatagtgaacctcgccctattggaacccggtatctcacacgaaacttgtaa

SEQ ID NO: 771 - DNA, 2212 bp, Artificial Sequence
  Description of Artificial Sequence: Synthetic polynucleotide
  misc_feature (1283)..(1283): n is a, c, t, or g
atggctgctgacggttatcttccagattggctcgaggacaacctttctgaaggcattcgtgagtggtgggctctgaaacctggagtccctcaacccaaagcgaaccaacaacaccaggacaaccgtcggggtcttgtgcttccgggttacaaatacctcggaccgggtaacggactcgacaaaggagagccggtcaacgaggcggacgcggcagccctcgaacacgacaaagcttacgaccagcagctcaaggccggtgacaacccgtacctcaagtacaaccacgccgacgccgagtttcaggagcgtcttcaagaagatacgtcttttgggggcaaccttggcagagcagtcttccaggccaaaaagaggatccttgagcctcttggtctggttgagggagcagctaaaacggctcctggaaagaagaggcctgtagatcagtctcctcaggaaccggactcatcatctggtgttggcaaatcgggcaaacagcctgccagaaaaagactaaatttcggtcagactggcgactcagagtcagtcccagaccctcaacctctcggagaaccaccagcagcccccacaagtttgggatctaatacaatggcttcaggcggtggcgcaccaatggcagacaataacgagggtgccgatggagtgggtaattcctcaggaaattggcattgcgattcccaatggctgggcgacagagtcatcaccaccagcaccagaacctgggccctgcccacttacaacagccatctctacaagcaaatctccagccaatcaggagcttcaaacgacaaccactactttggctacagcaccccttgggggtattttgactttaacagattccactgccacttctcaccacgtgactggcagcgactcattaacaacaactggggattccggcccaagaaactcagcttcaagctcttcaacatccaagttaaagaggtcacgcagaacgatggcacgacgactattgccaataaccttaccagcacggtccaagtgtttacggactcggagtatcagctcccgtacgtgctcgggtcggcgcaccaaggctgtctcccgccgtttccagcggacgccttcatggtccctcagtatggatacctcaccctgaacaacggaagtcaagcggtgggacgctcatccttttactgcctggagtacttcccttcgcagatgctaaggactggaaataacttccaattcagctataccttcgaggatgtaccttttcacggcagctacgctcacagccngagtttggatcgcttgatgaatcctcttattgatcagtatctgtactacctgaacagaacgcaaggaacaacctctggaacaaccaaccaatcacggctgctttttagccaggctgggcctcagtctatgtctttgcaggccagaaattggctacctgggccctgctaccggcaacagagacttttcaaagactgctaacgacaacaacaacagtaactttccttggacagcggccagcaaatatcatctcaatggccgcgactcgctggtgaatccaggaccagctatggccagtcacaaggacgatgaagaaaaatttttccctatgcacggcaatctaatatttggcaaagaagggacaacggcaagtaacgcagaattagataatgtaatgattacggatgaagaagagattcgtaccaccaatcctgtggcaacagagcagtatggaactgtggcaaataacttgcagagctcaaatacagctcccacgactagaactgtcaatgatcagggggccttacctggcatggtgtggcaagatcgtgacgtgtaccttcaaggacctatctgggcaaagattcctcacacggatggacactttcatccttctcctctgatgggaggctttggactgaaacatccgcctcctcaaatcatgatcaaaaatactccggtaccggcaaatcctccgacgactttcagcccggccaagtttgcttcatttatcactcagtactccactggacaggtcagcgtggaaattgagtgggagctacagaaagaaaacagcaaacgttggaatccagagattcagtacacttccaactacaacaagtctgttaatgtggactttactgtagacactaatggtgtttatagtgaacctcgccctattggaacccggtatctcacacgaaactcgtaa

SEQ ID NO: 772 - DNA, 2212 bp, Artificial Sequence
  Description of Artificial Sequence: Synthetic polynucleotide
atggctgctgacggttatcttccagattggctcgaggacaacctttctgaaggcattcgtgagtggtgggctctgaaacctggagtccctcaacccaaagcgaaccaacaacaccaggacaaccgtcggggtcttgtgcttccgggttacaaatacctcggacccggtaacggactcgacaaaggagagccggtcaacgaggcggacgcggcagccctcgaacacgacaaagcttacgaccagcagctcaaggccggtgacaacccgtacctcaagtacaaccacgccgacgccgagtttcaggagcgtcttcaagaagatacgtcttttgggggcaaccttggcagagcagtcttccaggccaaaaagaggatccttgagcctcttggtctggttgagggagcagctaaaacggctcctggaaagaagaggcctgtagatcagtctcctcaggaaccggactcatcatctggtgttggcaaatcgggcaaacagcttgccagaaaaagactaaatttcggtcagactggcgactcagagtcagtcccagaccctcaacctctcggagaaccaccagcagcccccacaagtttgggatctaatacaatggcttcaggcggtggcgcaccaatggcagacaataacgagggtgccgatggagtgggtaattcctcaggaaattggcattgcgattcccaatggctgggcgacagagtcatcaccaccagcaccagaacctgggccctgcccacttacaacagccatctctacaagcaaatctccggccaatcaggagcttcaaacgacaaccactactttggctacagcaccccctgggggtattttgactttaacagattccactgccacttctcaccacgtgactggcagcgactcattaacaacaactggggattccggcccaagaaactcagcttcaagctcttcaacatccaagttaaagaggtcacgcagaacgatggcacgacgactattgccaataaccttaccagcacggttcaagtgtttacggactcggagtatcagctcccgtacgtgctcgggtcggcgcaccaaggctgtctcccgccgtttccagcggacgtcttcatggtccctcagtatggatacctcaccctgaacaacggaagtcaagcggtgggacgctcatccttttactgcctggagtacttcccttcgcagatgctaaggactggaaataacttccaattcagctataccttcgaggatgtaccttttcacagcagctacgctcacagccagagtttggatcgcttgatgaatcctcttattgatcagtatctgtactacctgaacagaacgcaaggaacaacctctggaacaaccaaccaatcacggctgctttttagccaggctgggcctcagtctatgtctttgcaggccagaaattggctacctgggccctgctaccggcaacagagactttcaaagactgctaacgacaacaacaacagtaactttccttggacagcggccagcaaatatcatctcaatggccgcgactcgctggtgaatcccaggaccagctatggccagtcacaaggacgatgaagaaaaatttttccctatgcacggcaatctaatatttggcaaagaagggacaacggcaagtaacgcagaattagataatgtaatgattacggatgaagaagagattcgtaccaccaatcctgtggcaacagagcagtatggaactgtggcaaataacttgcagagctcaaatacagctcccacgactagaactgtcaatgatcagggggccttacctggcatggtgtggcaagatcgtgacgtgtaccttcaaggacctatctgggcaaagattcctcacacggatggacactttcatccttctcctctgatgggaggctttggactgaaacatccgcctcctcaaatcatgatcaaaaatactccggtaccggcaaatcctccgacgactttcagcccggccaagtttgcttcatttatcactcagtactccactggacaggtcagcgtggaaattgagtgggagctacagaaagaaaacagcaaacgttggaatccagagattcagtacacttccaactacaacaagtctgttaatgtggactttactgtagacactaatggtgtttatagtgaacctcgccctattggaacccggtatctcacacgaaacttgtaa

SEQ ID NO: 773 - DNA, 2212 bp, Artificial Sequence
  Description of Artificial Sequence: Synthetic polynucleotide
atggctgctgacggttatcttccagattggctcgaggacaacctttctgaaggcattcgtgagtggtgggctctgaaacctggagtccctcaacccaaagcgaaccaacaacaccaggacgaccgtcggggtcttgtgcttccgggttacaaatacctcggacccggtaacggactcgacaaaggagagccggtcaacgaggcggacgcggcagccctcgaacacgacaaagcttacgaccagcagctcaaggccggtgacaacccgtgcctcaagtacaaccacgccgacgccgagtttcaggagcgtcttcaagaagatacgtcttttgggggcaaccttggcagagcagtcttccaggccaaaaagaggatccttgagcctcttggtctggttgaggaagcagctaaaacggctcctggaaagaagaggcctgtagatcagtctcctcaggaaccggactcatcatctggtgttggcaaatcgggcaaacagcctgccagaaaaagactaaatttcggtcagactggcgactcagagtcagtcccagaccctcaacctctcggagaaccaccagcagcccccacaagtttgggatctaatacaatggcttcaggcggtagcgcaccaatggcagacaataacgagggtgccgatggagtgggtaattcctcaggaaattggcattgcgattcccaatggctgggcgacagagtcatcaccaccagcaccagaacctgggccctgcccacttacaacaaccatctctacaagcaaatctccagccaatcaggagcttcaaacgacaaccactactttggctacagcaccccttgggggtattttgactttaacagattccactgccacttctcaccacgtgactggcagcgactcattaacaacaactggggattccggcccaagaaactcagcttcaagctcttcaacatccaagttaaagaggtcacgcagaacgatggcacgacgactattgccaataaccttaccagcacggttcaagtgtttacggactcggagtatcagctcccgtacgtgctcgggtcggcgcaccaaggctgtctcccgccgtttccagcggacgtcttcatggtccctcagtatggatacctcaccctgaacaacggaagtcaagcggtgggacgctcatccttttactgcctggagtacttcccttcgcagatgctaaggactggaaataacttccaattcagctataccttcgaggatgtaccttttcacagcagctacgctcacagccagagtttggatcgcttgatggatcctcttattgatcagtatctgtactacctgaacagaacgcaaggaacaacctctggaacaaccaaccaatcacggctgctttttagccaggctgggcctcagtctatgtctttgcaggccagaaattggctacctgggccctgctaccggcaacagagactttcaaagactgctaacgacaacaacaacagtaactttccttggacagcggccagcaaatatcatctcaatggccgcgactcgctggtgaatccaggaccagctatggccagtcacaaaggacgatgaagaaaaatttttccctatgcacggcaatctaatatttggcaaagaagggacaacggcaagtaacgcagaattagataatgtaatgattacggatgaagaagagattcgtaccaccaatcctgtggcaacagagcagtatggaactgtggcaaataacttgcagagctcaaatacagctcccacgactagaactgtcaatgatcagggggccttacctggcatggtgtggcaagatcgtgacgtgtaccttcaaggacctatctgggcaaagattcctcacacggatggacactttcatccttctcctctgatgggaggctttggactgaaacatccgcctcctcaaatcatgatcaaaaatactccggtaccggcaaatcctccgacgactttcagcccggccaagtttgcttcatttatcactcagtactccactggacaggtcagcgtggaaattgagtgggagctacagaaagaaaacagcaaacgttggaatccagagattcagtacacttccaactacaacaagtctgttaatgtggactttactgtagacactaatggtgtttatagtgaacctcgccctattggaacccggtatctcacacgaaacctgtaa

SEQ ID NO: 774 - DNA, 2211 bp, Artificial Sequence
  Description of Artificial Sequence: Synthetic polynucleotide
atggctgctgacggttatcttccagattggctcgaggacaacctttctgaaggcattcgtgagtggtgggctctgaaacctggagtccctcaacccaaagcgaaccaacaacaccaggacgaccgtcggggtcttgtgcttccgggttacaaatacctcggacccggtaacggactcgacaaaggagagccggtcaacgaggcggacgcggcagccctcgaacacgacaaagcttacgaccagcagctcaaggccggtgacaacccgtacctcaagtacaaccacgccgacgccgagtttcaggagcgtcttcaagaagatacgtcttttgggggcaaccttggcagagcagtcttccaggccaaaaagaggatccttgagcctcttggtctggttgaggaagcagctaaaacggctcctggaaagaagaggcctgtagatcagtctcctcaggaaccggactcatcatctggtgttggcaaatcgggcaaacagcctgccagaaaaagactaaatttcggtcagactggcgactcagagtcagtcccagaccctcaacctctcggagaaccaccagcagcccccacaagtttgggatctaatacaatggcttcaggcggtggcgcaccaatggcagacaataacgagggtgccgatggagtgggtaattcctcaggaaattggcattgcgattcccaatggctgggcaacagagtcatcaccaccagcaccagaacctgggccctgcccacttacaacaaccatctctacaagcaaatctccagccaatcaggagcttcaaacgacaaccactactttggctacagcaccccttgggggtattttgactttaacagattccactgccacttctcaccacgtgactggcagcgactcattaacaacaactggggattccggcccaagaaactcagcttcaagctcttcaacatccaagttaaagaggtcacgcagaacgatggcacgacgactattgccaataaccttaccagcacggttcaagtgtttacggactcggagtatcagctcccgtacgtgctcgggtcggcgcaccaaggctgtctcccgccgtttccagcggacgtcttcatggtccctcagtatggatacctcaccctgaacaacggaagtcaagcggtgggacgctcatccttttactgcctggagtacttcccttcgcagatgctaaggactggaaataacttccaattcagctataccttcgaggatgtaccttttcacagcagctacgctcacagccagagtttggatcgcttgatgaatcctcttattgatcagtatctgtactacctgaacagaacgcaaggaacaacctctggaacaaccaaccaatcacggctgctttttagccaggctgggcctcagtctatgtctttgcaggccagaaattggctacctgggccctgctaccggcaacagagactttcaaagactgctaacgacaacaacaacagtaactttccttggacagcggccagcaaatatcatctcaatggccgcgactcgctggtgaatccaggaccagctatggccagtcacaaggacgatgaagaaaaatttttccctatgcacggcaatctaatatttggcaaagaagggacaacggcaagtaacgcagaattagataatgtaatgattacggatgaagaagagattcgtaccaccaatcctgtggcaacagagcagtatggaactgtggcaaataacttgcagagctcaaatacagctcccacgactagaactgtcaatgatcagggggccttacctggcatggtgtggcaagatcgtgacgtgtaccttcaaggacctatctgggcaaagattcctcacacggatggacactttcatccttctcctctgatgggaggctttggactgaaacatccgcctcctcaaatcatgatcaaaaatactccggtaccggcaaatcctccgacgactttcagcccggccaagtttgcttcatttatcactcagtactccactggacaggtcagcgtggaaattgagtgggagctacagaaagaaaacagcaaacgttggaatccagagattcagtacacttccaactacaacaagtctgttaatgtggactttactgtagacactaatggtgtttatagtgaacctcgccctattggaacccggtatctcacacgaaacttgtaa

SEQ ID NO: 775 - DNA, 2211 bp, Artificial Sequence
  Description of Artificial Sequence: Synthetic polynucleotide
atggctgctgacggttatcttccagattggctcgaggacaacctttctgaaggcattcgtgagtggtgggctctgaaacctggagtccctcaacccaaagcgaaccaacaacaccaggacgaccgtcggggtcttgtgcttccgggttacaaatacctcggacccggtaacggactcgacaaaggagagccggtcaacgaggcggacgcggcagccctcgaacacgacaaagcttacgaccagcagctcaaggccggtgacaacccgtacctcaagtacaaccacgccgacgccgagtttcaggagcgtcttcaagaagatacgtcttttgggggcaaccttggcagagcagtcttccaggccaaaaagaggatccttgagcctcttggtctggttgaggaagcagctaaaacggctcctggaaagaagaggcctgtagatcagtctcctcaggaaccggactcatcatctggtgttggcaaatcgggcaaacagcctgccagaaaaagactaaatttcggtcagactggcgactcagagtcagtcccagaccctcaacctctcggagaaccaccagcagcccccacaagtttgggatctaatacaatggcttcaggcggtggcgcaccaatggcggacaataacgagggtgccgatggagtgggtaattcctcaggaaattggcattgcgattcccaatggctgggcgacagagtcatcaccaccagcaccagaacctgggccctgcccacttacaacaaccatctctacaagcaaatctccagccaatcaggagcttcaaacgacaaccactactttggctacagcaccccttgggggtattttgactttaacagattccactgccacttctcaccacgtgactggcagcgactcattaacaacaactggggattccggcccaagaaactcagcttcaagctcttcaacatccaagttaaagaggtcacgcagaacgatggcacgacgactattgccaataaccttaccagcacggttcaagtgtttacggactcggagtatcagctcccgtacgtgctcgggtcggcgcaccaaggctgtctcccgccgtttccagcggacgtcttcatggtccctcagtatggatacctcaccctgaacaacggaagtcaagcggtgggacgctcatccttttactgcctggagtacttcccttcgcagatgctaaggactggaaataacttccaattcagctataccttcgaggatgtaccttttcacagcagctacgctcacagccagagtttggatcgcttgatgaatcctcttattgatcagtatctgtactacctgaacagaacgcaaggaacaacctctggaacaaccaaccaatcacggctgctttttagccaggctgggcctcagtctatgtctttgcaggccagaaattggctacctgggccctgctaccggcaacagagactttcaaagactgctaacgacaacaacaacagtaactttccttggacagcggccagcaaatatcatctcaatggccgcgactcgctggtgaatccaggaccagctatggccagtcacaaggacgatgaagaaaaatttttccctatgcacggcaatctaatatttggcaaagaagggacaacggcaagtaacgcagaattagataatgtaatgattacggatgaagaagagattcgtaccaccaatcctgtggcaacagtgcagtatggaactgtggcaaataacttgcagagctcaaatacagctcccacgactagaactgtcaatgatcagggggccttacctggcatggtgtggcaagatcgtgacgtgtaccttcaaggacctatctgggcaaagattcctcacacggatggacactttcatccttctcctctgatgggaggctttggactgaaacatccgcctcctcaaatcatgatcaaaaatactccggtaccggcaaatcctccgacgactttcagcccggccaagtttgcttcatttatcactcagtactccactggacaggtcagcgtggaaattgagtgggagctacagaaagaaaacagcaaacgttggaatccagagattcagtacacttccaactacaacaagtctgttaatgtggactttactgtagacactaatggtgtttatagtgaacctcgccctattggaacccggtatctcacacgaaacttgtaa

SEQ ID NO: 776 - DNA, 2211 bp, Artificial Sequence
  Description of Artificial Sequence: Synthetic polynucleotide
atggctgctgacggttatcttccagattggctcgaggacaacctttctgaaggcattcgtgagtggtgggctctgaaacctggagtccctcaacccaaagcgaaccaacaacaccaggacaaccgtcggggtcttgtgcttccgggttacaaatacctcggacccggtaacggactcgacaaaggagagccggtcaacgaggcggacgcggcagccctcgaacacgacaaagcttacgaccagcagctcaaggccggtgacaacccgtacctcaagtacaaccacgccgacgccgagtttcaggagcgtcttcaagaagatacgtcttttgggggcaaccttggcagagcagtcttccaggccaaaaaggggatccttgagcctcttggtctggttgaggaagcagctaaaacggctcctggaaagaagaggcctgtagatcagtctcctcaggaaccggactcatcatctggtgttggcaaatcgggcaaacagcctgccagaaaaagactaaatttcggtcagactggcgactcagagtcagtcccagaccctcaacctctcggagaaccaccagcagcccccacaagtttgggatctaatacaatggcttcaggcggtggcgcaccaatggcagacaataacgagggtgccgatggagtgggtaattcctcaggaaattggcattgcgattcccaatggctgggcgacagagtcatcaccaccagcaccagaacctgggccctgcccacttacaacaaccatctctacaagcaaatctccagccaatcaggagcttcaaacgacaaccactactttggctacagcaccccttgggggtattttgactttaacagattccactgccacttctcaccacgtgactggcagcgactcattaacaacaactggggattccggcccaagaaactcagcttcaagctcttcaacatccaagttaaagaggtcacgcagaacgatggcacgacgactattgccaataaccttaccagcacggttcaagtgtttacggactcggagtatcagctcccgtacgtgttcgggtcggcgcaccaaggctgtctcccgccgtttccagcggacgtcttcatggtccctcagtatggatacctcaccctgaacaacggaagtcaagcggtgggacgctcatccttttactgcctggagtacttcccttcgcagatgctaaggactggaaataacttccaattcagctataccttcgaggatgtaccttttcacagcagctacgctcacagccagagttcggatcgcttgatgaatcctcttattgatcagtatctgtactacctgaacagaacgcaaggaacaacctctggaacaaccaaccaatcacggctgctttttagccaggctgggcctcagtctatgtctttgcaggccagaaattggctacctgggccctgctaccggcaacagagactttcaaagactgctaacgacaacaacaacagtaactttccttgaacagcggccagcaaatatcatctcaatggccgcgactcgctggtgaatccaggaccagctatggccagtcacaaggacgatgaagaaaaatttttccctatgcacggcaatctaatatttggcaaagaagggacaacggcaagtaacgcagaattagataatgtaatgattacggatgaagaagagattcgtaccaccaatcctgtggcaacagagcagtatggaactgtggcaaataacttgcagagctcaaatacagctcccacgactagaactgtcaatgatcagggggccttacctggcatggtgtggcaagatcgtgacgtgtaccttcaaggacctatctgggcaaagattcctcacacggatggacactttcatccttctcctctgatgggaggctttggactgaaacatccgcctcctcaaatcatgatcaaaaatactccggtaccggcaaatcctccgacgactttcagcccggccaagtttgcttcatttatcactcagtactccactggacaggtcagcgtggaaattgagtgggagctacagaaagaaaacagcaaacgttggaatccagagattcagtacacttccaactacaacaagtctgttaatgtggactttactgtagacactaatggtgtttatagtgaacctcgccctattggaacccggtatctcacacgaaacttgtaa

SEQ ID NO: 777 - DNA, 2211 bp, Artificial Sequence
  Description of Artificial Sequence: Synthetic polynucleotide
atggctgctgacggttatcttccagattggctcgaggacaacctttctgaaggcattcgtgagtggtgggctctgaaacctggagtccctcaacccaaagcgaaccaacaacaccaggacaaccgtcggggtcttgtgcttccgggttacaaatacctcggacccggtaacggactcgacgaaggagagccggtcaacgaggcggacgcggcagccctcgaacacgacaaagcttacgaccagcagctcaaggccggtgacaacccgtacctcaagtacaaccacgccgacgccgagtttcaggagcgtcttcaagaagatacgtcttttgggggcaaccttggcagagcagtcttccaggccaaaaagaggatccttgagcctcttggtctggttgagggagcagctaaaacggctcctggaaagaagaggcctgtagatcagtctcctcaggaaccggactcatcatctggtgttggcaaatcgggcaaacagcctgccagaaaaagactaaatttcggtcagactggcgactcagagtcagtcccagaccctcaacctctcggagaaccaccagcagcccccacaagtttgggatctaatacaatggcttcaggcggtggcgcaccaatggcagacaataacgagggtgccgatggagtgggtaattcctcaggaaattggcattgcgattcccaatggctgggcgacagagtcatcaccaccagcaccagaacctgggccctgcccacttacaacagccacctctacaagcaaatctccagccaatcaggagcttcaaacgacaaccactactttggctacagcaccccttgggggtattttgactttaacagattccactgccacttctcaccacgtgactggcagcgactcattaacaacaactggggattccggcccaagaaactcagcttcaagctcttcaacatccaagttaaagaggtcacgcagaacgatggcacgacgactattgccaataaccttaccagcacggttcaagtgtttacggactcggagtatcagctcccgtacgtgctcgggtcggcgcaccaaggctgtctcccgccgtttccagcggacgtcttcatggtccctcagtatggatacctcaccctgaacaacggaagtcaagcggtgggacgctcatccttttactgcctggagtacttcccttcgcagatgctaaggactggaaataacttccaattcagctataccttcgaggatgtaccttttcacagcagctacgctcacagccagagtttggatcgcttgatgaatcctcttattgatcagtatctgtactacctgaacagaacgcaaggaacaacctctggaacaaccaaccaatcacggctgctttttagccaggctgggcctcagtctatgtctttgcaggccagaaattggctacctgggccctgctaccggcaacagagactttcaaagactgctaacgacaacaacaacagtaactttccttggacagcggccagcaaatatcatctcaatggccgcgactcgctggtgaatccaggaccagctatggccagtcacaaggacgatgaagaaaaatttttccctatgcacggcaatctaatatttggcaaagaagggacaacggcaagtaacgcagaattagataatgtaatgattacggatgaagaagagattcgtaccaccaatcctgtggcaacagagcagtatggaactgtggcaaataacttgcagagctcaaatacagctcccacgactagaactgtcaatgatcagggggccttacctggcatggtgtggcaagatcgtgacgtgtaccttcaaggacctatctgggcaaagattcctcacacggatggacactttcatccttctcctctgatgggaggctttggactgaaacatccgcctcctcaaatcatgatcaaaaatactccggtaccggcaaatcctccgacgactttcagcccggccaagtttgcttcatttatcactcagtactccactggacaggtcagcgtggaaattgagtgggagctacagaaagaaaacagcaaacgttggaatccagagattcagtacacttccaactacaacaagtctgttaatgtggactttactgtagacactaatggtgtttatagtgaacctcgccctattggaacccggtatctcacacgaaacttgtaa

SEQ ID NO: 778 - DNA, 2211 bp, Artificial Sequence
  Description of Artificial Sequence: Synthetic polynucleotide
atggctgctgacggttatcttccagattggctcgaggacaacctttctgaaggcattcgtgagtggtgggctctgaaacctggagtccctcaacccaaagcgaaccaacaacaccaggacaaccgtcggggtcttgtgcttccgggttacaaatacctcggacccggtaacggactcgacaaaggagagccggtcaacgaggcggacgcggcagccctcgaacacgacaaagcttacgaccagcagctcaaggccggtgacaacccgtacctcaagtacaaccacgccgacgccgagtttcaggagcgtcttcaagaagatacgtcttttgggggcaaccttggcagagcagtcttccaggccaaaaagaggatccttgagcctcttggtctggttgagggagcagctaaaacggctcctggaaagaagaggcctgtagatcagtctcctcaggaaccggactcatcatctggtgttggcaaatcgggcaaacagcctgccagaaaaagactaaatttcggtcagactggcgactcagagtcagtcccagaccctcaacctctcggagaaccaccagcagcccccacaagtttgggatctaatacaatggcttcaggcggtggcgcaccaatggcagacaataacgagggtgccgatggagtgggtaattcctcaggaaattggcattgcgattcccaatggctgggcgacagagtcatcaccaccagcaccagaacctgggccctgcccacttacaacagccatctctacaagcaaatctccagccaatcaggagcttcaaacgacaaccactactttggctacagcaccccttggggtattttgactttaacagattccactgccacttctcaccacgtgactggcagcgactcattaacaacaactggggattccggcccaagaaactcagcttcaagctcttcaacatccaagttaaagaggtcacgcagaacgatggcacgacgactattgccaataaccttaccagcacggttcaagtgtttacggactcggagtatcagctcccgtacgtgctcgggtcggcgcaccaaggctgtctcccgccgtttccagcggacgccttcatggtccctcagtatggatacctcaccctgaacaacggaagtcaagcggtgggacgctcatccttttactgcctggagtacttcccttcgcagatgctaaggactggaaataacttccaattcagctataccctcgaggatgtaccttttcacagcagctacgctcacagccagagtttggatcgcttgatgaatcctcttattgatcagtatctgtactacctgaacagaacgcaaggaacaacctctggaacaaccaaccaatcacggctgctttttagccaggctgggcctcagtctatgtctttgcaggccagaaattggctacctgggccctgctaccggcaacagagactttcaaagactgctaacgacaacaacaacagtaactttccttggacagcggccagcaaatatcatctcaatggccgcgactcgctggtgaatccaggaccagctatggccagtcacaaaggacgatgaagaaaaatttttccctatgcacggcaatctaatatttggcaaagaagggacaacggcaagtaacgcagaattagatagtgtaatgattacggatgaagaagagattcgtaccaccaatcctgtggcaacagagcagtatggaactgtggcaaataacttgcagagctcaaatacagctcccacgactagaactgtcaatgatcagggggccttacctggcatggtgtggcaagatcgtgacgtgtaccttcaaggacctatctgggcaaagattcctcacacggatggacactttcatccttctcctctgatgggaggctttggactgaaacatccgcctcctcaaatcatgatcaaaaatactccggtaccggcaaatcctccgacgactttcagcccggccaagtttgcttcatttatcactcagtactccactggacaggtcagcgtggaaattgagtgggagctacagaaagaaaacagcaaacgttggaatccagagattcagtacacttccaactacaacaagtctgttaatgtggactttactgtagacactaatggtgtttatagtgaacctcgccctattggaacccggtatctcacacgaaacttgtaa

SEQ ID NO: 779 - DNA, 2205 bp, Artificial Sequence
  Description of Artificial Sequence: Synthetic polynucleotide
atgactgacggttaccttccagattggctagaggacaacctctctgagggcgttcgagagtggtgggcgctgcaacctggagcccctaaacccaaggcaaatcaacaacatcaggacaacgctcggggtcttgtgcttccgggttacaaatacctcggacccggcaacggactcgacaagggggaacccgtcaacgcagcggacgcggcagccctcgagcacgacaaggcctacgaccagcagctcaaggccggtgacaacccctacctcaagtacaaccacgccgacgcggagttccagcagcggcttcagggcgacacatcgtttgggggcaacctcggcagagcagtcttccaggccaaaaagagggttcttgaacctcttggtctggttgagcaagcgggtgagacggctcctggaaagaagagaccgttgattgaatccccccagcagcccgactcctccacgggtatcggcaaaaaaggcaagcagccggctaaaaagaagctcgttttcgaagacgaaactggagcaggcgacggaccccctgagggatcaacttccggagccatgtctgatgacagtgagatgcgtgcagcaactggcggagctgcagtcgagggcggacaaggtgccgatggagtgggtaatgcctcgggtgattggcattgcgattccacctggtctgagggccacgtcacgaccaccagcaccagaacctgggtcttgcccacctacaacaaccacctctacaagcgactcggagagagcctgcagtccaacacctacaacggattctccaccccctggggatactttgacttcaaccgcttccactgccacttctcaccacgtgactggcagcgactcatcaacaacaactggggcatgcgacccaaagccatgcgggtcaaaatcttcaacatccaggtcaaggaggtcacgacgtcgaacggcgagacaacggtggctaataaccttaccagcacggttcagatctttgcggactcgtcgtacgaactgccgtacgtgatggatgcgggtcaagagggcagcctgcctccttttcccaacgacgtctttatggtgccccagtacggctactgtggactggtgaccggcaacacttcgcagcaacagactgacagaaatgccttctactgcctggagtactttccttcgcagatgctgcggactggcaacaactttgaaattacgtacagttttgagaaggtgcctttccactcgatgtacgcgcacagccagagcctggaccggctgatgaaccctctcatcgaccagtacctgtggggactgcaatcgaccaccaccggaaccaccctgaatgccgggactgccaccaccaactttaccaagctgcggcctaccaacctttccaactttaaaaagaactggctgcccgggccttcaatcaagcagcagggcttctcaaagactgccaatcaaaactacaagatccctgccaccgggtcagacagtctcatcaaatacgagacgcacagcactctggacggaagatggagtgccctgacccccggacctccaatggccacggctggacctgcggacagcaagttcagcaacagccagctcatctttgcggggcctaaacagaacggcaacacggccaccgtacccgggactctgatcttcacctctgaggaggagctggcagccaccaacgctaccgatacggacatgtggggcaacctacctggcggtgaccagagcaacagcaacctgccgaccgtggacagactgacagccttgggagccgtgcctggaatggtctggcaaaacagagacatttactaccagggtcccatttgggccaagattcctcataccgatggacactttcacccctcaccgctgattggtgggtttgggctgaaacacccgcctcctcaaatttttatcaagaacaccccggtacctgcgaatcctgcgacgaccttcagctctactccggtaaactccttcattactcagtacagcactggccaggtgtcggtgcagattgactgggagatccagaaggagcggtccaaacgctggaaccccgaggtccagtttacctccaactacggacagcaaaactctctgttgtgggctcccgatgcggctgggaaatacactgagcctagggctatcggtacccgctacctcacccaccacctgtaa

SEQ ID NO: 780 - DNA, 2205 bp, Artificial Sequence
  Description of Artificial Sequence: Synthetic polynucleotide
atgactgacggttaccttccagattggctagaggacaacctctctgaaggcgttcgagagtggtgggcgctgcaacctggagcccctaaacccaaggcaaatcaacaacatcaggacaacgctcggggtcttgtgcttccgggttacaaatacctcggacccggcaacggactcgacaagggggaacccgtcaacgcagcggacgcggcagccctcgagcacgacaaggcctacgaccagcagctcaaggccggtgacaacccctacctcaagtacaaccacgccgacgcggagttccagcagcggcttcagggcgacacatcgtttgggggcaacctcggcagagcagtcttccaggccaaaaagagggttcttgaacctcttggtctggttgagcaagcgggtgagacggctcctggaaagaagagaccgttgattgaatccccccagcagcccgactcctccacgggtatcggcaaaaaaggcaagcagccggctaaaaagaagctcgttttcgaagacgaaactggagcaggcgacggaccccctgagggatcaacttccggagccatgtctgatgacagtgagatgcgtgcagcagctggcggagctgcagtcgagggcggacaaggtgccgatggagtgggtaatgcctcgggtgattggcattgcgattccacctggtctgagggccacgtcacgaccaccagcaccagaacctgggtcttgcccacctacaacaaccacctctacaagcgactcggagagagcctgcagtccaacacctacaacggattctccaccccctggggatactttgacttcaaccgcttccactgccacttcttaccacgtgactggcagcgactcatcaacaacaactggggcgtgcgacccaaagccatgcgggtcaaaatcttcaacatccaggtcaaggaggtcacgacgtcgaacggcgagacaacggtggctaataaccttaccagcacggttcagatctttgcggactcgtcgtacgaactgccgtacgtgatggatgcgggtcaagagggcagcctgcctccttttcccaacgacgtctttatggtgccccagtacggctactgtggactggtgaccggcgacacttcgcagcaacagactgacagaaatgccttctactgcctggagtactttccttcgcagatgctgcggactggcaacaactttgaaattacgtacagttttgagaaggtgcctttccactcgatgtacgcgcacagccagagcctggaccggctgatgaaccctctcatcgaccagtacctgtggggactgcaatcgaccaccaccggaaccaccctgaatgccgggactgccaccaccaactttaccaagctgcggcctaccaacttttccaactttaaaaagaactggctgcccgggccttcaatcaagcagcagggcttctcaaagactgccaatcaaaactacaagatccctgccaccgggtcagacagtctcatcaaatacgagacgcacagcactctggacggaagatggagtgccctgacccccggacctccaatggccacggctggacctgcggacagcaagttcagcaacagccagctcatctttgcggggcctaaacagaacggcaacacggccaccgtacccgggactctgatcttcacctctgaggaggagctggcagccaccaacgccaccgatacggacatgtggggcaacctacctggcggtgaccagagcaacagcaacctgccgaccgtggacagactgacagccttgggagccgtgcctggaatggtctggcaaaacagagacatttactaccagggtcccatttgggccaagattcctcataccgatggacactttcacccctcaccgctgattggtgggtttgggctgaaacacccgcctcctcaaatttttatcaagaacaccccggtacctgcgaatcctgcgacgaccttcagctctactccggtaaactccttcattactcagtacagcactggccaggtgtcggtgcagattgactgggagatccagaaggagcggtccaaacgctggaaccccgaggtccagtttacctccaactacggacagcaaaactctctgttgtgggctcccgatgcggctgggaaatacactgagcctagggctatcggtacccgctacctcacccaccacctgtaa

SEQ ID NO: 781 - DNA, 2205 bp, Artificial Sequence
  Description of Artificial Sequence: Synthetic polynucleotide
atgactgacggttaccttccagattggctagaggacaacctctctgaaggcgttcgagagtggtgggcgctgcaacctggagcccctaaacccaaggcaaatcaacaacatcaggacaacgctcggggtcttgtgcttccgggttacaaatacctcggacccggcaacggactcgacgagggggaacccgtcaacgcagcggacgcggcagccctcgagcacgacaaggcctacgaccagcagctcaaggccggtgacaacccctacctcaagtacaaccacgccgacgcggagttccagcagcggcttcagggcgacacatcgtttgggggcaacctcggcagagcagtcttccaggccaaaaagagggttcttgaacctcttggtctggttgagcaagcgggtgagacggctcctggaaagaagagaccgttgattgaatccccccagcagcccgactcctccacgggtatcggcaaaaaaggcaagcagccggctaaaaagaagctcgttttcgaagacgaaactggagcaggcgacggaccccctgagggatcaacttccggagccatgtctgatgacagtgagatgcgtgcagcagctggcggagctgcagtcgagggcggacaaggtgccgatggagtgggtaatgcctcgggtgattggcattgcgattccacctggtctgagggccacgtcacgaccaccagcaccagaacctgggtcttgcccacctacaacaaccacctctacaagcgactcggagagagcctgcagtccaacacctacaacggattctccaccccctggggatactttgacttcaaccgcttccactgccacttctcaccacgtgactggcagcgactcatcaacaacaactggggcatgcgacccaaagccatgcgggtcaaaatcttcaacatccaggtcaaggaggtcacgacgtcgaacggcgagacaacggtggctaataaccttaccagcacggttcagatctttgcggactcgtcgtacgaactgccgtacgtgatggatgcgggtcaagagggcagcctgcctccttttcccaacgacgtctttatggtgccccagtacggctactgtggactggtgaccggcaacacttcgcagcaacagactgacagaaatgccttctactgcctggagtactttccttcgcagatgctgcggactggcaacaactttgaaattacgtacagttttgagaaggtgcctttccactcgatgtacgcgcacagccagagcctggaccggctgatgaaccctctcatcgaccagtacctgtggggactgcaatcgaccaccaccggaaccaccctgaatgccgggactgccaccaccaactttaccaagctgcggcctaccaacttttccaactttaaaaagaactggctgcccgggccttcaatcaagcagcagggcttctcaaagactgccaatcaaaactacaagatccctgccaccgggtcagacagtctcatcaaatacgagacgcacagcactctggacggaagatggagtgccctgacccccggacctccaatggccacggctggacctgcggacagcaagttcagcaacagccagctcatctttgcggggcctaaacagaacggcaacacggccaccgtacccgggactctgatcttcacctctgaggaggagctggcagccaccaacgctaccgatacggacatgtggggcaacctacctggcggtgaccagagcaacagcaacctgccgaccgtggacagactgacagccttgggagccgtgcctggaatggtctggcaaaacagagacatttactaccagggtcccatttgggccaagattcctcataccgatggacactttcacccctcaccgctgattggtgggtttgggctgaaacacccgcctcctcaaatttttatcaagaacaccccggtacctgcgaatcctgcgacgaccttcagctctactccggtaaactccttcattactcagtacagcactggccaggtgtcggtgcagattgactgggagatccagaaggagcggtccaaacgctggaaccccgaggtccagtttacctccaactacggacagcaaaactctctgttgtgggctcccgatgcggctgggaaatacactgagcctagggctatcggtacccgctacctcacccaccacctgtaa

SEQ ID NO: 782 - DNA, 2205 bp, Artificial Sequence
  Description of Artificial Sequence: Synthetic polynucleotide
atgactgacggttaccttccagattggctagaggacaacctctctgaaggcgttcgagagtggtgggcgctgcaacctggagcccctaaacccaaggcaaatcaacaacatcaggacaacgctcggggtcttgtgcttccgggttacaaatacctcggacccggcaacggactcgacaagggggaacccgtcaacgcagcggacgcggcagccctcgagcacgacaaggcctacgaccagcagctcaaggccggtgacaacccctacctcaagtacaaccacgccgacgcggagttccagcagcggcttcagggcgacacatcgtttgggggcaacctcggcagagcagtcttccaggccaaaaagagggttcttgaacctcttggtctggttgagcaagcgggtgagacggctcctggaaagaagagaccgttgattgaatccccccagcagcccgactcctccacgggtatcggcaaaaaaggcaagcagccggctaaaaagaagctcgttttcgaagacggaactggagcaggcgacggaccccctgagggatcaacttccggagccatgtctgatgacagtgagatgcgtgcagcagctggcggagctgcagtcgagggcggacaaggtgccgatggagtgggtaatgcctcgggtgattggcattgcgattccacctggtctgagggccacgtcacgaccaccagcaccagaacctgggtcttgcccacctacaacaaccacctctacaagcgactcggagagagcctgcagtccaacacctacaacggattccccaccccctggggatactttgacttcaaccgcttccactgccacttctcaccacgtgactggcagcgactcatcaacaacaactggggcatgcgacccaaagccatgcgggtcaaaatcttcaacatccaggtcaaggaggtcacgacgtcgaacggcgagacaacggcggctaataaccttaccagcacggttcagatctttgcggactcgtcgtacgaactgccgtacgtgatggatgcgggtcaagagggcagcctgcctccttttcccaacgacgtctttatggtgccccagtacggctactgtggactggtgaccggcaacacttcgcagcaacagactgacagaaatgccttctactgcctggagtactttccttcgcagatgctgcggactggcaacaactttgaaattacgtacagttttgagaaggtgcctttccactcgatgtacgcgcacagccagagcctggaccggctgatgaaccctctcatcgaccagtacctgtggggactgcaatcgaccaccaccggaaccaccctgaatgccgggactgccaccaccaactttaccaagctgcggcctaccaacttttccaactttaaaaagaactggctgcccgggccttcaatcaagcagcagggcttctcaaagactgccaatcaaaactacaagatccctgccaccgggtcagacagtctcatcaaatacgagacgcacagcactctggacggaagatggagtgccctgacccccggacctccaatggccacggctggacctgcggacagcaagttcagcaacagccagctcatctttgcggggcctaaacagaacggcaacacggccaccgtacccgggactctgatcttcacctctgaggaggagctggcagccaccaacgccaccgatacggacatgtggggcaacctacctggcggtgaccagagcaacagcaacctgccgaccgtggacagactgacagccttgggagccgtgcctggaatggtctggcaaaacagagacatttactaccagggtcccatttgggccaagattcctcataccgatggacactttcacccctcaccgctgattggtgggtttgggctgaaacacccgcctcctcaaatttttatcaagaacaccccggtacctgcgaatcctgcgacgaccttcagctctactccggtaaactccttcattactcagtacagcactggccaggtgtcggtgcagattgactgggagatccagaaggagcggtccaaacgctggaaccccgaggtccagtttacctccaactacggacagcaaaactctctgttgtgggctcccgatgcggctgggaaatacactgagcctagggctatcggtacccgctacctcacccaccacctgtaa

SEQ ID NO: 783 - DNA, 2205 bp, Artificial Sequence
  Description of Artificial Sequence: Synthetic polynucleotide
atgactgacggttaccttccagattggctagaggacaacctctctgaaggcgttcgagagtggtgggcgctgcaacctggagcccctaaacccaaggcaaatcaacaacatcaggacaacgctcggggtcttgtgcttccgggttacaaatacctcggacccggcaacggactcgacaagggggaacccgtcaacgcagcggacgcggcagccctcgagcacgacaaggcctacgaccagcagctcaaggccggtgacaacccctacctcaagtacaaccacgccgacgcggagttccagcagcggcttcagggcgacacatcgtttgggggcaacctcggcagagcagtcttccaggccaaaaagagggttcttgaacctcttggtctggttgagcaagcgggtgagacggctcctggaaagaagagaccgttgattgaatccccccagcagcccgactcctccacgggtatcggcaaaaaaggcaagcagccggctaaaaagaagctcgttttcgaagacgaaactggagcaggcgacggaccccctgagggatcaacttccggagccatgtctgatgacagtgagatgcgtgcagcagctggcggagctgcagtcgagggcggacaaggtgccgatggagtgggtaatgcctcgggtgattggcattgcgattccacctggtctgagggccacgtcacgaccaccagcaccagaacctgggtcttgcccacctacaacaaccacctctacaagcgactcggagagagcctgcagtccaacacctacaacggattctccaccccctggggatactttgacttcaaccgcttccactgccacttctcaccacgtgactggcagcgactcatcaacaacaactggggcatgcgacccaaagccatgcgggtcaaaatcttcaacatccaggtcaaggaggtcacgacgtcgaacggcgagacaacggtggctaataaccttaccagcacggttcagatctttgcggactcgtcgtacgaactgccgtacgtgatggatgcgggtcaagagggcagcctgcctccttttcccaacgacgtctttatggtgccccagtacggctaccgtggactggtgaccggcaacacttcgcagcaacagactgacagaaatgccttctactgcctggagtactttccttcgcagatgctgcggactggcaacaactttgaaattacgtacagttttgagaaggtgcctttccactcgatgtacgcgcacagccagagcctggaccggctgatgaaccctctcatcgaccagtacctgtggggactgcaatcgaccaccaccggaaccaccctgaatgccgggactgccaccaccaactttaccaagctgcggcctaccaacttttccaactttaaaaagaactggctgcccgggccttcaatcaagcagcagggcttctcaaagactgccaatcaaaactacaagatccctgccaccgggtcagacagtctcatcaaatacgagacgcacagcactctggacggaagatggagtgccctgacccccggacctccaatggccacggctggacctgcggacagcaagttcagcaacagccagctcatctttgcggggcctaaacagaacggcaacacggccaccgtacccgggactctgatcttcacctctgaggaggagctggcagccaccaacgccaccgatacggacatgtggggcaacctacctggcggtgaccagagcaacagcaacctgccgaccgtggacagactgacagccttgggagccgtgcctggaatggtctggcaaaacagagacatttactaccagggtcccatttgggccaagattcctcataccgatggacactttcacccctcaccgctgattggtgggtttgggctgaaacacccgcctcctcaaatttttatcaagaacaccccggtacctgcgaatcctgcgacgaccttcagctctactccggtaaactccttcattactcagtacagcactggccaggtgtcggtgcagattgactgggagatccagaaggagcggtccaaacgctggaaccccgaggtccagtttacctccaactacggacagcaaaactctctgttgtgggctcccgatgcggctgggaaatacactgagcctagggctatcggtacccgctacctcacccaccacctgtaa

SEQ ID NO: 784 - DNA, 2205 bp, Artificial Sequence
  Description of Artificial Sequence: Synthetic polynucleotide
atgactgacggttaccttccagattggctagaggacaacctctctgaaggcgttcgagagtggtgggcgctgcaacctggagcccctaaacccaaggcaaatcaacaacatcaggacaacgctcggggtcttgtgcttcagggttacaaatacctcggacccggcaacggactcgacaagggggaacccgtcaacgcagcggacgcggcagccctcgagcacgacaaggcctacgaccagcagctcaaggccggtgacaacccctacctcaagtacaaccacgccgacgcggagttccagcagcggcttcagggcgacacatcgtttgggggcaacctcggcagagcagtcttccaggccaaaaagagggttcttgaaccccttggtctggttgagcaagcgggtgagacggctcctggaaagaagagaccgttgattgaatccccccagcagcccgactcctccacgggtatcggcaaaaaaggcaagcagccggctaaaaagaagctcgttttcgaagacgaaactggagcaggcgacggaccccctgagggatcaacttccggagccatgtctgatgacagtgagatgcgtgcagcagctggcggagctgcagtcgagggcggacaaggtgccgatggagtgggtaatgcctcgggtgattggcattgcgattccacccggtctgagggccacgtcacgaccaccagcaccagaacctgggtcttgcccacctacaacaaccacctctacaagcgactcggagagagcctgcagtccaacacctacaacggattctccaccccctggggatactttgacttcaaccgcttccactgccacttctcaccacgtgactggcagcgactcatcaacaataactggggcatgcgacccaaagccatgcgggtcaaaatcttcaacatccaggtcaaggaggtcacgacgtcgaacggcgagacaacggtggctaataaccttaccagcacggttcagatctttgcggactcgtcgtacgaactgccgtacgtgatggatgcgggtcaagagggcagcctgcctccttttcccaacgacgtctttatggtgccccagtacggctactgtggactggtgaccggcaacacttcgcagcaacagactgacagaaatgccttctactgcctggagtactttccttcgcagatgctgcggactggcaacaactttgaaattacgtacagttttgagaaggtgcctttccactcgatgtacgcgcacagccagagcctggaccggctgatgaaccctctcatcgaccagtacctgtggggactgcaatcgaccaccaccggaaccaccctgaatgccgggactgccaccaccaactttaccaagctgcggcctaccaacttttccaactttaaaaagaactggctgcccgggccttcaatcaagcagcagggcttctcaaagactgccaatcaaaactacaagatccctgccaccgggtcagacagtctcatcaaatacgagacgcacagcactctggacggaagatggagtgcccggacccccggacctccaatggccacggctggacctgcggacagcaagttcagcaacagccagctcatctttgcggggcctaaacagaacggcaacacggccaccgtacccgggactctgatcttcacctctgaggaggagctggcagccaccaacgccaccgatacggacatgtggggcaacctacctggcggtgaccagagcaacagcaacctgccgaccgtggacagactgacagccttgggagccgtgcctggaatggtctggcaaaacagagacatttactaccagggtcccatttgggccaagattcctcataccgatggacactttcacccctcaccgctgattggtgggtttgggctgaaacacccgcctcctcaaatttttatcaagaacaccccggtacctgcgaatcctgcgacgaccttcagctctactccggtaaactccttcattactcagtacagcactggccaggtgtcggtgcagattgactgggagatccagaaggagcggtccaaacgctggaaccccgaggtccagtttacctccaactacggacagcaaaactctctgttgtgggctcccgatgcggctgggaaatacactgagcctagggctatcggtacccgctacctcacccaccacctgtaa

SEQ ID NO: 785 - DNA, 2175 bp, Artificial Sequence
  Description of Artificial Sequence: Synthetic polynucleotide
atgtcttttgttgatcaccctccagattggttggaagaagttggtgaaggtcttcgcgagtttttgggccttgaagcgggcccaccgaaaccaaaacccaatcagcagcatcaagatcaagcccgtggtcttgtgctgcctggttataactatctcggacccggaaacggtctcgatcgaggagagcctgtcaacagggcagacgaggtcgcgcgagagcacgacatctcgtacaacgagcagcttgaggcgggagacaacccctacctcaagtacaaccacgcggacgccgagtttcaggagaggctcgccgacgacacatccttcgggggaaacctcggaaaggcagtctttcaggccaagaaaagggttctcgaaccttttggcctggttgaagagggtgctaagacggcccctaccggaaagcggatagacgaccactttccaaaaagaaagaaggcccggaccgaagaggactccaagccttccacctcgtcagacgccgaagctggacccagcggatcccagcagctgcaaatcccagcccaaccagcctcaagtttgggagctgatacaatgtctgcgggaggtggcggcccattgggcgacaataaccaaggtgccgatggagtgggcaatgcctcgggagattggcattgcgattccacgtggatgggggacagagtcgtcaccaagtccacccgaacctgggtgctgcccagctacaacaaccaccagtaccgagagatcaaaagcggctccgtcgacggaagcaacgccaacgcctactttggatacagcaccccctgggggtactttgactttaaccgcttccacagccactggagcccccgagactggcaaagactcatcaacaactactggggcttcagaccccggtccctcagagtcaaaatcttcaacattcaagtcaaagaggtcacggtgcaggactccaccaccaccatcgccaacaacctcacctccaccgtccaagtgtttacggacgacgactaccagctgccctacgtcgtcggcaacgggaccgagggatgcctgccggccttccctccgcaggtctttacgctgccgcagtacggttacgcgacgctgaaccgcgacaacacagaaaatcccaccgagaggagcagcttcttctgcctagagtactttcccagcaagatgctgagaacgggcaacaactttgagtttacctacaactttgaggaggtgcccttccactccagcttcgctcccagtcagaacctcttcaagctggccaacccgctggtggaccagtacttgtaccgcttcgtgagcacaaataacactggcggagtccagttcaacaagaacctggccgggagatacgccaacacctacaaaaactggttcccggggcccatgggccgaacccagggctggaacctgggctccggggtcaaccgcgccagtgtcagcgccttcgccacgaccaataggatggagctcgagggcgcgagttaccaggtgcccccgcagccgaacggcatgaccaacaacctccagggcagcaacacctatgccctggagaacactatgatcttcaacagccagccggcgaacccgggcaccaccgccacgtacctcgagggcaacatgctcatcaccagcgagagcgagacgcagccggtgaaccgcgtggcgtacaacgtcggcgggcagatggccaccaacaaccagagctccaccactgcccccgcgaccggcacgtacaacctccaggaaatcgtgcccggcagcgtgtggatggagagggacgtgtacctccaaggacccatctgggccaagatcccagagacggaggcgcactttcacccctctccggccatgggcggattcggactcaaacacccaccgcccatgatgctcatcaagaacacgcctgtgcccggaaatatcaccagcttctcggacgtgcccgtcagcagcttcatcacccagtacagcaccgggcaggtcaccgtggagatggagtgggagctcaagaaggaaaactccaagaggtggaacccagagatccagtacacaaacaactacaacgacccccagtttgtggactttgccccggacagcaccggggaatacagaaccaccagacctatcggaacccgataccttacccgacccctttaa

SEQ ID NO: 786 - DNA, 2175 bp, Artificial Sequence
  Description of Artificial Sequence: Synthetic polynucleotide
atgtcttttgttgatcaccctccagattggttggaagaagttggtgaaggtcttcgcgagtttttgggccttgaagcgggcccaccgaaaccaaaacccaatcagcagcatcaagatcaagcccgtggtcttgtgctgcctggttataactatctcggacccggaaacggtctcgatcgaggagagcctgtcaacagggcagacgaggtcgcgcgagagcacgacatctcgtacaacgagcagcttgaggcgggagacaacccctacctcaagtacaaccacgcggacgccgagtttcaggagaagctcgccgacgacacatcctccgggggaaacctcggaaaggcagtctttcaggccaagaaaagggttctcgaaccttttggcctggttgaagagggtgctaagacggcccctaccggaaagcggatagacgaccactttccaaaaagaaagaaggcccggaccgaagaggactccaagccttccacctcgtcagacgccgaagctggacccagcggatcccagcagctgcaaatcccagcccaaccagcctcaagtttgggagctgatacaatgtctgcgggaggtggcggcccattgggcgacaataaccaaggtgccgatggagtgggcaatgcctcgggagattggcattgcgattccacgtggatgggggacagagtcgtcaccaagtccacccgaacctgggtgctgcccagctacaacaaccaccagtaccgagagatcaaaagcggctccgtcgacggaagcaacgccaacgcctactttggatacagcaccccctgggggtactttgactttaaccgcttccacagccactggagcccccgagactggcaaagactcatcaacaactactggggcttcagaccccggtccctcagagtcaaaatcttcaacattcaagtcaaagaggtcacggtgcaggactccaccaccaccatcgccaacaacctcacctccaccgtccaagtgtttacggacgacgactaccagctgccctacgtcgtcggcaacgggaccgagggatgcctgccggccttccctccgcaggtctttacgctgccgcagtacggttacgcgacgctgaaccgcgacaacacagaaaatcccaccgagaggagcagcttcttctgcctagagtactttcccagcaagatgctgagaacgggcaacaactttgagtttacctacaactttgaggaggtgcccttccactccagcttcgctcccagtcagaacctcttcaagctggccaacccgctagtggaccagtacttgtaccgcttcgtgagcacaaataacactggcggagtccagttcaacaagaacctggccgggagatacgccaacacctacaaaaactggttcccggggcccatgggccgaacccagggctggaacctgggctccggggtcaaccgcgccagtgtcagcgccttcgccacgaccaataggatggagctcgagggcgcgagttaccaggtgcccccgcagccgaacggcatgaccaacaacctccagggcagcaacacctatgccctggagaacactatgatcttcaacagccagccggcgaacccgggcaccaccgccacgtacctcgagggcaacatgctcatcaccagcgagagcgagacgcagccggtgaaccgcgtggcgtacaacgtcggcgggcagatggccaccaacaaccagagctccaccactgcccccgcgaccggcacgtacaacctccaggaaatcgtgcccggcagcgtgtggatggagagggacgtgtacctccaaggacccatctgggccaagatcccagagacgggggcgcactttcacccctctccggccatgggcggattcggactcaaacacccaccgcccatgatgctcatcaagaacacgcctgtgcccggaaatatcaccagcttctcggacgtgcccgtcagcagcttcatcacccagtacagcaccgggcaggtcaccgtggagatggagtgggagctcaagaaggaaaactccaagaggtggaacccagagatccagtacacaaacaactacaacgacccccagtttgtggactttgccccggacagcaccggggaatacagaaccaccagacctatcggaacccgataccttacccgacccctttaa

SEQ ID NO: 787 - DNA, 2175 bp, Artificial Sequence
  Description of Artificial Sequence: Synthetic polynucleotide
atgtcttttgttgatcaccctccagattggttggaagaagttggtgaaggtcttcgcgagtttttgggccttgaagcgggcccaccgaaaccaaaacccaatcagcagcatcaagatcaagcccgtggtcttgtgctgcctggttataactatctcggacccggaaacggtctcgatcgaggagagcctgtcaacagggcagacgaggtcgcgcgagagcacgacatctcgtacaacgagcagcttgaggcgggagacaacccctacctcaagtacaaccacgcggacgccgagtttcaggagaagctcgccgacgacacatccttcgggggaaacctcggaaaggcagtctttcaggccaagaaaagggttctcgaaccttttggcctggttgaagagggtgctaagacggcccctaccggaaagcggatagacgaccactttccaaaaagaaagaaggcccggaccgaagaggactccaagccttccacctcgtcagacgccgaagctggacccagcggatcccagcagctgcaaatcccagcccaaccagcctcaagtttgggagctgatacaatgtctgcgggaggtggcggcccattgggcgacaataaccaaggtgccgatggagtgggcaatgcctcgggagattggcattgcgattccacgtggatgggggacagagtcgtcaccaagtccacccgaacctgggtgctgcccagctacaacaaccaccagtaccgagagatcaaaagcggctccgtcgacggaagcaacgccaacgcctactttggatacagcaccccctgggggtactttgactttaaccgcttccacagccactggagcccccgagactggcaaagactcatcaacaactactggggcttcagaccccggtccctcagagtcaaaatcttcaacattcaagtcaaagaggtcacggtgcaggactccaccaccaccatcgccaacaacctcacctccaccgtccaagtgtttacggacgacgactaccagctgccctacgtcgtcggcaacgggaccgagggatgcctgccggccttccctccgcaggtctttacgctgccgcagtacggttacgcgacactgaaccgcgacaacacagaaaatcccaccgagaggagcagcttcttctgcctagagtactttcccagcaagatgctgagaacgggcaacaactttgagtttacctacaactttgaggaggtgcccttccactccagcttcgctcccagtcagaacctcttcaagctggccaacccgctggtggaccagtacttgtaccgcttcgtgagcacaaataacactggcggagtccagttcaacaagaacctggccgggagatacgccaacacctacaaaaactggttcccggggcccatgggccgaacccagggctggaacctgggctccggggtcaaccgcgccagtgtcagcgccttcgccacgaccaataggatggagctcgagggcgcgagttaccaggtgcccccgcagccgaacggcatgaccaacaacctccagggcagcaacacctatgccctggagaacactatgatcttcaacagccagccggcgaacccgggcaccaccgccacgtacctcgagggcaacatgctcatcaccagcgagagcgagacgcagccggtgaaccgcgtggcgtacaacgtcggcgggcagatggccaccaacaaccagagctccaccactgcccccgcgaccggcacgtacaacctccaggaaatcgtgcccggcagcgtgtggatggagagggacgtgtacctccaaggacccatctgggccaagatcccagagacgggggcgcactttcacccctctccggccatgggcggattcggactcaaacacccaccgcccatgatgctcatcaagagcacgcctgtgcccggaaatatcaccagcttctcggacgtgcccgtcagcagcttcatcacccagtacagcaccgggcaggtcaccgtggagatggagtgggagctcaagaaggaaaactccaagaggtggaacccagagatccagtacacaaacaactacaacgacccccagtttgtggactttgccccggacagcaccggggaatacagaaccaccagacctatcggaacccgataccttacccgacccctttaa

SEQ ID NO: 788 - DNA, 2175 bp, Artificial Sequence
  Description of Artificial Sequence: Synthetic polynucleotide
atgtcttttgttgatcaccctccagattggttggaagaagttggtgaaggtcttcgcgagtttttgggccctgaagcgggcccaccgaaaccaaaacccaatcagcagcatcaagatcaagcccgtggtcttgtgctgcctggttataactatctcggacccggaaacggtctcgatcgaggagagcctgtcaacagggcagacgaggtcgcgcgagagcacgacatctcgtacaacgagcagcttgaggcgggagacaacccctacctcaagtacaaccacgcggacgccgagtttcaggagaagctcgccgacgacacatccttcgggggaaacctcggaaaggcagtctttcaggccaagaaaagggttctcgaaccttttggcctggttgaagagggtgctaagacggcccctaccggaaagcggatagacgaccactttccaaaaagaaagaaggtccggaccgaagaggactccaagccttccacctcgtcagacgccgaagctggacccagcggatcccagcagctgcaaatcccagcccaaccagcctcaagtttgggagctgatacaatgtctgcgggaggtggcggcccattgggcgacaataaccaaggtgccgatggagtgggcaatgcctcgggagattggcattgcgattccacgtggatgggggacagagtcgtcaccaagtccacccgaacctgggtgccgcccagctacaacaaccaccagtaccgagagatcaaaagcggctccgtcgacggaagcaacgccaacgcctactttggatacagcaccccctgggggtactttgactttaaccgcttccacagccactggagcccccgagactggcaaagactcatcaacaactactggggcttcagaccccggtccctcagagtcaaaatcttcaacattcaagtcaaagaggtcacggtgcaggactccaccaccaccatcgccaacaacctcacctccaccgtccaagtgtttacggacgacgactaccagctgccctacgtcgtcggcaacgggaccgagggatgcctgccggccttccctccgcaggtctttacgctgccgcagtacggttacgcgacgctgaaccgcgacaacacagaaaatcccaccgagaggagcagcttcttctgcctagagtactttcccagcaagatgctgagaacgggcaacaactttgagtttacctacaactttgaggaggtgcccttccactccagcttcgctcccagtcagaacctcttcaagctggccaacccgctggtggaccagtacttgtaccgcttcgtgagcacaaataacactggcggagtccagttcaacaagaacctggccgggagatacgccaacacctacaaaaactggttcccggggcccatgggccgaacccagggctggaacctgggctccggggtcaaccgcgccagtgtcagcgccttcgccacgaccaataggatggagctcgagggcgcgagttaccaggtgcccccgcagccgaacggcatgaccaacaacctccagggcagcaacacctatgccctggagaacactatgatcttcaacagccagccggcgaacccgggcaccaccgccacgtacctcgagggcaacatgctcatcaccagcgagagcgagacgcagccggtgaaccgcgtggcgtgcaacgtcggcgggcagatggccaccaacaaccagagctccaccactgcccccgcgaccggcacgtacaacctccaggaaatcgtgcccggcagcgtgtggatggagagggacgtgtacctccaaggacccatctgggccaagatcccagagacgggggcgcactttcacccctctccggccatgggcggattcggactcaaacacccaccgcccatgatgctcatcaagaacacgcctgtgcccggaaatatcaccagcttctcggacgtgcccgtcagcagcttcatcacccagtacagcaccgggcaggtcaccgtggagatggagtgggagctcaagaaggaaaactccaagaggtggaacccagagatccagtacacaaacaactacaacgacccccagtttgtggactttgccccggacagcaccggggaatacagaaccaccagacctattggaacccgataccttacccgacccctttaa

SEQ ID NO: 789 - DNA, 2175 bp, Artificial Sequence
  Description of Artificial Sequence: Synthetic polynucleotide
atgtcttttgttgatcaccctccagattggttggaagaagttggtgaaggtcttcgcgagtttttgggccttgaagcgggcccaccgaaaccaaaacccaatcagcagcatcaagatcaagcccgtggtcttgtgctgcctggttataactatctcggacccggaaacggtctcgatcgaggagagcctgtcaacagggcagacgaggtcgcgcgagagcacgacatctcgtacaacgagcagcttgaggcgggagacaacccctacctcaagtacaaccacgcggacgccgagtttcaggagaagctcgccgacgacacatccttcgggggaaacctcggaaaggcagtctttcaggccaagaaaagggttctcgaaccttttggcctggttgaagagggtgctaagacggcccctaccggaaagcggatagacgaccactttccaaaaagaaagaaggcccggaccgaagaggactccaagccttccacctcgtcagacgccgaagctggacccagcggatcccagcagctgcaaatcccagcccaaccagcctcaagtttgggagctgatacaatgtctgcgggaggtggcggcccattgggcgacaataaccaaggtgccgatggagtgggcaatgcctcgggagattggcattgcgattccacgtggatgggggacagagtcgtcaccaagtccacccgaacctgggtgctgcccagctacaacaaccaccagtaccgagagatcaaaagcggctccgtcgacggaagcaacgccaacgcctactttggatacagcaccccctgggggtactttgactttaaccgcttccacagccactggagcccccgagactggcaaagactcatcaacaactactggggcttcagaccccggtccctcagagtcaaaatcttcaacattcaagtcaaagaggtcacggtgcaggactccaccaccaccatcgccaacaacctcacctccaccgtccaagtgtttacggacgacgactaccagctgccctacgtcgtcggcaacgggaccgagggatgcctgccggccttccctccgcaggtctttacgctgccgcagtacggttacgcgacgctgaaccgcgacaacaccgaaaatcccaccgagaggagcagcttcttctgcctagagtactttcccagcaagatgctgagaacgggcaacaactttgagtttacctacaactttgaggaggtgcccttccactccagcttcgctcccagtcagaacctcttcaagctggccaacccgctggtggaccagtacttgtaccgcttcgtgagcacaaataacactggcggagtccagttcaacaagaacctggccgggagatacgccaacacctacaaaaactggttcccggggcccatgggccgaacccagggctggaacctgggctccggggtcaaccgcgccagtgtcagcgccttcgccacgaccaataggatggagctcgagggcgcgagttaccaggtgcccccgcagccgaacggcatgaccaacaacctccagggcagcaacacctatgccctggagaacactatgatcttcaacagccagccggcgaacccgggcaccaccgccacgtacctcgagggcaacatgctcatcaccagcgagagcgagacgcagccggtgaaccgcgtggcgtacaacgtcggcgggcagatggccaccaacaaccagagctccaccactgcccccgcgaccggcgcgtacaacctccaggaaatcgtgcccggcagcgtgtggatggagagggacgtgtacctccaaggacccatctgggccaagatcccagagacgggggcgcactttcacccctctccggccatgggcggattcggactcaaacacccaccgcccatgatgctcatcaagaacacgcctgtgcccggaaatatcaccagcttctcggacgtgcccgtcagcagcttcatcacccagtacagcaccgggcaggtcaccgtggagatggagtgggagctcaagaaggaaaactccaagaggtggaacccagagatccagtacacaaacaactacaacgacccccagtttgtggactttgccccggacagcaccggggaatacagaaccaccagacctatcggaacccgataccttacccgacccctttaa

SEQ ID NO: 790 - DNA, 2175 bp, Artificial Sequence
  Description of Artificial Sequence: Synthetic polynucleotide
atgtcttttgttgatcaccctccagattggttggaagaagttggtgaaggtcttcgcgagtttttgggccttgaagcgggcccaccgaaaccaaaacccaatcagcagcatcaagatcaagcccgtggtcttgtgctgcctggttataactatctcggacccggaaacggtctcgatcgaggagagcctgtcaacagggcagacggggtcgcgcgagagcacgacatctcgtacaacgagcagcttgaggcgggagacaacccctacctcaagtacaaccacgcggacgccgagtttcaggagaagctcgccgacgacacatccttcgggggaaacctcggaaaggcagtctttcaggccaagaaaagggttctcgaaccttttggcctggttgaagagggtgctaagacggcccctaccggaaagcggatagacgaccactttccaaaaagaaagaaggcccggaccgaagaggactccaagccttccacctcgtcagacgccgaagctggacccagcggatcccagcagctgcaaatcccagcccaaccagcctcaagtttgggagctgatacaatgtctgcgggaggtggcggcccattgggcgacaataaccaaggtgccgatggagtgggcaatgcctcgggagattggcattgcgattccacgtggatgggggacagagtcgtcaccaagtccacccgaacctgggtgctgcccagctacaacaaccaccagtaccgagagatcaaaagcggctccgtcgacggaagcaacgccaacgcctactttggatacagcaccccctgggggtactttgactttaaccgcttccacagccactggagcccccgagactggcaaagactcatcaacaactactggggcttcagaccccggtccctcagagtcaaaatcttcaacattcaagtcaaagaggtcacggtgcaggactccaccaccaccatcgccaacaacctcacctccaccgtccaagcgtttacggacgacgactaccagctgccctacgtcgtcggcaacgggaccgagggatgcctgccggccttccctccgcaggtctttacgctgccgcagtacggttacgcgacgctgaaccgcgacaacacagaaaatcccaccgagaggagcagcttcttctgcctagagtactttcccagcaagatgctgagaacgggcaacaactttgagtttacctacaactttgaggaggtgcccttccactccagcttcgctcccagtcagaacctcttcaagctggccaacccgctggtggaccagtacttgtaccgcttcgtgagcacaaataacactggcggagtccagttcaacaagaacctggccgggagatacgccaacacctacaaaaactggttcccggggcccatgggccgaacccagggctggaacctgggctccggggtcaaccgcgccagtgtcagcgccttcgccacgaccaataggatggagctcgagggcgcgagttaccaggtgcccccgcagccgaacggcatgaccaacaacctccagggcagcaacacctatgccctggagaacactatgatcttcaacagccagccggcgaacccgggcaccaccgccacgtacctcgagggcaacatgctcatcaccagcgagagcgagacgcagccggtgaaccgcgtggcgtacaacgtcggcgggcagatggccaccaacaaccagagctccaccactgcccccgcgaccggcacgtacaacctccaggaaatcgtgcccggcagcgtgtggatggagagggacgtgtacctccaaggacccatctgggccaagatcccagagacgggggcgcactttcacccctctccggccatgggcggattcggactcaaacacccaccgcccatgatgctcatcaagaacacgcctgtgcccggaaatatcaccagcttctcggacgtgcccgtcagcagcttcatcacccagtacagcaccgggcaggtcaccgtggagatggagtgggagctcaagaaggaaaactccaagaggtggaacccagagatccagtacacaaacaactacaacgacccccagtttgtggactttgccccggacagcaccggggaatacagaaccaccagacctatcggaacccgataccttacccgacccctttaa

SEQ ID NO: 791 - DNA, 2175 bp, Artificial Sequence
  Description of Artificial Sequence: Synthetic polynucleotide
atgtcttttgttgatcaccctccagattggttggaagaagttggtgaaggtcttcgcgagtttttgggccttgaagcgggcccaccgaaaccaaaacccaatcagcagcatcaagatcaagcccgtggtcttgtgctgcctggttataactatctcggacccggaaacggtctcgatcgaggagagcctgtcaacagggcagacgaggtcgcgcgagagcacgacatctcgtacaacgagcagcttgaggcgggagacaacccctacctcaagtacaaccacgcggacgccgagtttcaggagaagctcgccgacgacacatccttcgggggaaacctcggaaaggcagtctttcaggccaagaaaagggttctcgaaccttttggcctggttgaagagggtgctaagacggcccctaccggaaagcggatagacgaccactttccaaaaagaaagaaggcccggaccgaagaggactccaagccttccacctcgtcagacgccgaagctggacccagcggatcccagcagctgcaaatcccagcccaaccagcctcaagtttgggagctgatacaatgtctgcgggaggtggcggcccattgggcgacaataaccaaggtgccgatggagtgggcaatgcctcgggagattggcattgcgattccacgtggatgggggacagagtcgtcaccaagtccacccgaacctgggtgctgcccagctacaacaaccaccagtaccgagagatcaaaagcggctccgtcgacggaagcaacgccaacgcctactttggatacagcaccccctgggggtactttgactttaaccgcttccacagccactggagcccccgagactggcaaagactcatcaacaactactggggcttcagaccccggtccctcagagtcaaaatcttcaacattcaagtcaaagaggtcacggtgcaggactccaccaccaccatcgccaacaacctcacctccaccgtccaagtgtttacggacgacgactaccagctgccctacgtcgtcggcaacgggaccgagggatgcctgccggccttccctccgcaggtctttacgctgccgcagtacggttacgcgacgctgaaccgcgacaacacagaaaatcccaccgagaggagcagcttcttctgcctagagtactttcccagcaagatgctgagaacgggcaacaactttgagtttacctacaactttgaggaggtgcccttccactccagcttcgctcccagtcagaacctcttcaagctggccaacccgctggtggaccagtacttgtaccgcttcgtgagcacaaataacactggcggagtccagttcaacaagaacctggccgggagatacgccaacacctacaaaaactggttcccggggcccatgggccgaacccagggctggaacctgggctccggggtcaaccgcgccagtgtcagcgccttcgccacgaccaataggatggagctcgagggcgcgagttactaggtgcccccgcagccgaacggcatgaccaacaacctccagggcagcaacacctatgccctggagaacactatgatcttcaacagccagccggcgaacccgggcaccaccgccacgtacctcgagggcaacatgctcatcaccagcgagagcgagacgcagccggtgaaccgcgtggcgtacaacgtcggcgggcagatggccaccaacaaccagagctccaccactgcccccgcgaccggcacgtacaacctccaggaaatcgtgcccggcagcgtgtggatggagggggacgtgtacctccaaggacccatctgggccaagatcccagagacgggggcgcactttcacccctctccggccatgggcggattcggactcaagcacccaccgcccatgatgctcatcaagaacacgcctgtgcccggaaatatcaccagcttctcggacgtgcccgtcagcagcttcatcacccagtacagcaccgggcaggtcaccgtggagatggagtgggagctcaagaaggaaaactccaagaggtggaacccagagatccagtacacaaacaactacaacgacccccagtttgtggactttgccccggacagcaccggggaatacagaaccaccagacctatcggaacccgataccttacccgacccctttaa

SEQ ID NO: 792 - DNA, 2175 bp, Artificial Sequence
  Description of Artificial Sequence: Synthetic polynucleotide
atgtcttttgttgatcaccctccagattggttggaagaagttggtgaaggtcttcgcgagtttttgggccttgaagcgggcccaccgaaaccaaaacccaatcagcagcatcaagatcaagcccgtggtcttgtgctgcctggttataactatctcggacccggaaacggtctcgatcgaggagagcctgtcaacagggcagacgaggtcgcgcgagagcacgacatctcgtacaacgagcagcttgaggcgggagacaacccctacctcaagtacaaccacgcggacgccgagtttcaggagaagctcgccgacgacacatccttcgggggaaacctcggaaaggcagtctttcaggccaagaaaagggttctcgaaccttttggcctggttgaagagggtgctaagacggcccctaccggaaagcggatagacgaccactttccaaaaagaaagaaggtccggaccgaagaggactccaagccttccacctcgtcagacgccgaagctggacccagcggatcccagcagctgcaaatcccagcccaaccagcctcaagtttgggagctgatacaatgtctgcgggaggtggcggcccattgggcgacaataaccaaggtgccgatggagtgggcaatgcctcgggagattggcattgcgattccacgtggatgggggacagagtcgtcaccaagtccacccgaacctgggtgctgcccagctacaacaaccaccagtaccgagagatcaaaagcggctccgtcgacggaagcaacgccaacgcctactttggatacagcaccccctgggggtactttgactttaaccgcttccacagccactggagcccccgagactggcaaagactcatcaacaactactggggcttcagaccccggtccctcagagtcaaaatcttcaacattcaagtcaaagaggtcacggtgcaggactccaccaccaccatcgccaacaacctcacctccaccgtccaagtgtttacggacgacgactaccagctgccctacgtcgtcggcaacgggaccgagggatgcctgccggccttccctccgcaggtctttacgctgccgcagtacggttacgcgacgctgaaccgcgacaacacagaaaatcccaccgagaggagcagcttcttctgcctagagtactttcccagcaagatgctgagaacgggcaacaactttgagtttacctacaactttgaggaggtgcccttccactccagcttcgctcccagtcagaacctcttcaagctggccaacccgctggtggaccagtacttgtaccgcttcgtgagcacaaataacactggcggagtccagttcaacaagaacctggccgggagatacgccaacacctacaaaaactggttcccggggcccatgggccgaacccagggctggaacctgggctccggggtcaaccgcgccagtgtcagcgccttcgccacgaccaataggatggagctcgagggcgcgagttaccaggtgcccccgcagccgaacggcatgaccaacaacctccagggcagcaacacctatgccctggagaacactatgatcttcaacagccagccggcgaacccgggcaccaccgccacgtacctcgagggcaacatgctcatcaccagcgagagcgagacgcagccggtgaaccgcgtggcgtacaacgtcggcgggcagatggccaccaacaaccagagctccaccactgcccccgcgaccggcacgtacaacctccaggaaatcgtgcccggcagcgtgtggatggagagggacgtgtacctccaaggacccatctgggccaagatcccagagacgggggcgcactttcacccctctccggccatgggcggattcggactcaaacacccaccgcccatgatgctcatcaagaacacgcctgtgcccggaaatatcaccagcttctcggacgtgcccgtcagcagcttcatcacccagtacagcaccgggcaggtcaccgtggagatggagtgggagctcaagaaggaaaactccgagaggtggaacccagagatccagtacacaaacaactacaacgacccccagtttgtggactttgccccggacagcaccggggaatacagaaccaccagacctattggaacccgataccttacccgacccctttaa

SEQ ID NO: 793 - DNA, 2175 bp, Artificial Sequence
  Description of Artificial Sequence: Synthetic polynucleotide
atgtcttttgttgatcaccctccagattggttggaagaagttggtgaaggtcttcgcgagtttttgggccttgaagcgggcccaccgaaaccaaaacccaatcagcagcatcaagatcaagcccgtggtcttgtgctgcctggttataactatctcggacccggaaacggtctcgatcgaggagagcctgtcaacagggcagacgaggtcgcgcgagagcacgacatctcgtacagcgagcagcttgaggcgggagacaacccctacctcaagtacaaccacgcggacgccgagtttcaggagaagctcgccgacgacacatccttcgggggaaacctcggaaaggcagtctttcaggccaagaaaagggttctcgaaccttttggcctggttgaagagggtgctaagacggcccctaccggaaagcggatagacgaccactttccaaaaagaaagaaggcccggaccgaagaggactccaagccttccacctcgtcagacgccgaagctggacccagcggatcccagcagctgcaaatcccagcccaaccagcctcaagtttgggagctgatacaatgtctgcgggaggtggcggcccattgggcgacaataaccaaggtgccgatggagtgggcaatgcctcgggagattggcattgcgattccacgtggatgggggacagagtcgtcaccaagtccacccgaacctgggtgctgcccagctacaacaaccaccagtaccgagagatcaaaagcggctccgtcgacggaagcaacgccaacgcctactttggatacagcaccccctgggggtactttgactttaaccgcttccacagccactggagcccccgagactggcaaagactcatcaacaactactggggcttcagaccccggtccctcagagtcaaaatcttcaacattcaagtcaaagaggtcacggtgcaggactccaccaccaccatcgccaacaacctcacctccaccgtccaagtgtttacggacgacgactaccagctgccctacgtcgtcggcaacgggaccgagggatgcctgccggccttccctccgcaggtctttacgctgccgcagtacggttacgcgacgctgaaccgcgacaacacagaaaatcccaccgagaggagcagcttcttctgcctagagtactttcccagcaagatgctgagaacgggcaacaactttgagtttacctacaactttgaggaggtgcccttccactccagcttcgctcccagtcagaacctcttcaagctggccaacccgctggtggaccagtacttgtaccgcttcgtgagcacaaataacactggcggagtccagttcaacaagaacctggccgggagatacgccaacacctacaaaaactggttcccggggcccatgggccgaacccagggctggaacctgggctccggggtcaaccgcgccagtgtcagcgccttcgccacgaccaataggatggagctcgagggcgcgagttaccaggtgcccccgcagccgaacggcatgaccaacaacctccagggcagcaacacctatgccctggagaacactatgatcttcaacagccagccggcgaacccgggcaccaccgccacgtacctcgagggcaacatgctcatcaccagcgagagcgagacgcagccggtgaaccgcgtggcgtacaacgtcggcgggcagatggccaccaacaaccagagctccaccactgcccccgcgaccggcacgtacaacctccaggaaatcgtgcccggcagcgtgtggatggagagggacgtgtacctccaaggacccatctgggccaagatcccagagacgggggcgcactttcacccctctccggccatgggcggattcggactcaaacacccaccgcccatgatgctcatcaagaacacgcctgtgcccggaaatatcaccagcttctcggacgtgcccgtcagcagcttcatcacccagtacagcaccgggcaggtcaccgtggagatggagtgggagctcaagaaggaaaactccaagaggtggaacccagagatccagtacacaaacaactacaacgacccccagtttgtggactttgccccggacagcaccggggaatacagaaccgccagacctatcggaacccgataccttacccgacccctttaa

SEQ ID NO: 794 - DNA, 2175 bp, Artificial Sequence
  Description of Artificial Sequence: Synthetic polynucleotide
atgtcttttgttgatcaccctccagattggttggaagaagttggtgaaggtcttcgcgagtttttgggccctgaagcgggcccaccgaaaccaaaacccaatcagcagcatcaagatcaagcccgtggtcttgtgctgcctggttataactatctcggacccggaaacggtctcgatcgaggagagcctgtcaacagggcagacgaggtcgcgcgagagcacgacatctcgtacaacgagcagcttgaggcgggagacaacccctacctcaagtacaaccacgcggacgccgagtttcaggagaagctcgccgacgacacatccttcgggggaaacctcggaaaggcagtctttcaggccaagaaaagggttctcgaaccttttggcctggttgaagagggtgctaagacggcccctaccggaaagcggatagacgaccactttccaaaaagaaagaaggcccggaccgaagaggactccaagccttccacctcgtcagacgccgaagctggacccagcggatcccagcagctgcaaatcccagcccaaccagcctcaagtttgggagctgatacaatgtctgcgggaggtggcggcccattgggcgacaataaccaaggtgccgatggagtgggcaatgcctcgggagattggcattgcgattccacgtggatgggggacagagtcgtcaccaagtccacccgaacctgggtgctgcccagctacaacaaccaccagtaccgagagatcaaaagcggctccgtcgacggaagcaacgccaacgcctactttggatacagcaccccctgggggtactttgactttaaccgcttccacagccactggagcccccgagactggcaaagactcatcaacaactactggggcttcagaccccggtccctcagagtcaaaatcttcaacattcaagtcaaagaggtcacggtgcaggactccaccaccaccatcgccaacaacctcacctccaccgtccaagtgtttacggacgacgactaccagctgccctacgtcgtcggcaacgggaccgagggatgcctgccggccttccctccgcaggtctttacgctgccgcagtacggttacgcgacgctgaaccgcgacaacacagaaaatcccaccgagaggagcagcttcttctgcctagagtactttcccagcaagatgctgagaacgggcaacaactttgagtttacctacaactttgaggaggtgcccttccactccagcttcgctcccagtcagaacctcttcaagctggccaacccgctggtggaccagtacttgtaccgcttcgtgagcacaaataacactggcggagtccagttcaacaagaacctggccgggagatacgccaacacctacaaaaactggttcccggggcccatgggccgaacccagggctggaacctgggctccggggtcaaccgcgccagtgtcagcgccttcgccacgaccaataggatggagctcgagggcgcgagttaccaggtgcccccgcagccgaacggcatgaccaacaacctccagggcagcaacacctatgccctggagaacactatgatcttcaacagccagccggcgaacccgggcaccaccgccacgtacctcgagggcaacatgctcatcaccagcgagagcgagacgcagccggtgaaccgcgtggcgtacaacgtcggcgggcagatgaccaccaacaaccagagctccaccactgcccccgcgaccggcacgtacaacctccaggaaatcgtgcccggcagcgtgtggatggagagggacgtgtacccccaaggacccatctgggccaagatcccagagacgggggcgcactttcacccctctccggccatgggcggattcggactcaaacacccaccgcccatgatgctcatcaagaacacgcctgtgcccggaaatatcaccagcttctcggacgtgcccgtcagcagcttcatcacccagtacagcaccgggcaggtcaccgtggagatggagtgggagctcaagaaggaaaactccaagaggtggaacccagagatccagtacacaaacaactacaacgacccccagtttgtggactttgccccggacagcaccggggaatacaggaccaccagacctatcggaacccgataccttacccgacccctttaa

SEQ ID NO: 795 - DNA, 2175 bp, Artificial Sequence
  Description of Artificial Sequence: Synthetic polynucleotide
atgtcttttgttgatcaccctccagattggttggaagaagttggtgaaggtcttcgcgagtttttgggccttgaagcgggcccaccgaaaccaaaacccaatcagcagcatcaagatcaagcccgtggtcttgtgctgcctggttataactatctcggacccggaaacggtctcgatcgaggagagcctgtcaacagggcagacgaggtcgcgcgagagcacgacatctcgtacaacgagcagcttgaggcgggagacaacccctacctcaagtacaaccacgcggacgccgagtttcaggagaagctcgccgacgacacatccttcgggggaaacctcggaaaggcagtctttcaggccaagaaaagggttctcgaaccttttggcctggttgaagagggtgctaagacggcccctaccggaaagcggatagacgaccactttccaaaaagaaagaaggcccggaccgaagaggactccaagccttccacctcgtcagacgccgaagctggacccagcggatcccagcagctgcaaatcccagcccaaccagcctcaagtttgggagctgatacaatgtctgcgggaggtggcggcccattgggcgacaataaccaaggtgccgatggagtgggcaatgcctcgggagattggcattgcgattccacgtggatgggggacagagtcgtcaccaagtccacccgaacctgggtgctgcccagctacaacaaccaccagtaccgagagatcaaaagcggctccgtcgacggaagcaacgccaacgcctactttggatacagcaccccctgggggtactttgactttaaccgcttccacagccactggagcccccgagactggcaaagactcatcaacaactactggggcttcagaccccggtccctcagagtcaaaatcttcaacattcaagtcaaagaggtcacggtgcaggactccaccaccaccatcgccaacaacctcacctccaccgtccaagtgtttacggacgacgactaccagctgccctacgtcgtcggcaacgggaccgagggatgcctgccggccttccctccgcaggtctttacgctgccgcagtacggttacgcgacgctgaaccgcgacaacacagaaaatcccaccgagaggagcagcttcctctgcctagagtactttcccagcaagatgctgagaacgggcaacaactttgagtttacctacaactttgaggaggtgcccttccactccagcttcgctcccagtcagaacctcttcaagctggccaacccgctggtggaccagtacttgtaccgcttcgtgagcacaaataacactggcggagtccagttcaacaagaacctggccgggagatacgccaacacctacaaaaactggttcccggggcccatgggccgaacccagggctggaacctgggctccggggtcaaccgcgccagtgtcagcgccttcgccacgaccaataggatggagctcgagggcgcgagttaccaggtgcccccgcagccgaacggcatgaccaacaacctccagggcagcaacacctatgccctggagaacactatgatcttcaacagccagccggcgaacccgggcaccaccgccacgtacctcgagggcaacatgctcatcaccagcgagagcgagacgcagccggtgaaccgcgtggcgtacaacgtcggcgggcagatggccaccaacaaccagagctccaccactgcccccgcgaccggcacgtacaacctccaggaaatcgtgcccggcagcgtgtggatgaagagggacgtgtacctccaaggacccatctgggccaagatcccagagacgggggcgcactttcacccctctccggccatgggcggattcggactcaaacacccaccgcccatgatgctcatcaagaacacgcctgtgcccggaaatatcaccagcttctcggacgtgcccgtcagcagcttcatcacccagtacagcaccgggcaggtcaccgtggagatggagtgggagctcaagaaggaaaactccaagaggtggaacccagagatccagtacacaaacaactacaacgacccccagtttgtggactttgccccggacagcaccggggaatacagaaccaccagacctatcggaacccgataccttacccgacccctttaa

SEQ ID NO: 796 - DNA, 2175 bp, Artificial Sequence
  Description of Artificial Sequence: Synthetic polynucleotide
atgtcttttgttgatcaccctccagattggttggaagaagttggtgaaggtcttcgcgagtttttgggccttgaggcgggcccaccgaaaccaaaacccaatcagcagcatcaagatcaagcccgtggtcttgtgctgcctggttataactatctcggacccggaaacggtctcgatcgaggagagcctgtcaacagggcagacgaggtcgcgcgagagcacgacatctcgtacaacgagcagcttgaggcgggagacaacccctacctcaagtacaaccacgcggacgccgagtttcaggagaagctcgccgacgacacatccttcgggggaaacctcggaaaggcagtctttcaggccaagaaaagggttctcgaaccttttggcctggttgaagagggtgctaagacggcccctaccggaaagcggatagacgaccactttccaaaaagaaagaaggcccggaccgaagaggactccaagccttccaccccgtcagacgccgaagctggacccagcggatcccagcagctgcaaatcccagcccaaccagcctcaagtttgggagctgatacaatgtctgcgggaggtggcggcccattgggcgacaataaccaaggtgccgatggagtgggcaatgcctcgggagattggcattgcgattccacgtggatgggggacagagtcgtcaccaagtccacccgaacctgggtgctgcccagctacaacaaccaccagtaccgagagatcaaaagcggctccgtcgacggaagcaacgccaacgcctactttggatacagcaccccctgggggtactttgactttaaccgcttccacagccactggagcccccgagactggcaaagactcatcaacaactactggggcttcagaccccggtccctcagagtcaaaatcttcaacattcaagtcaaagaggtcacggtgcaggactccaccaccaccatcgccaacaacctcacctccaccgtccaagtgtttacggacgacgactaccagctgccctacgtcgtcggcaacgggaccgagggatgcctgccggccttccctccgcaggtctttacgctgccgcagtacggttacgcgacgctgaaccgcgacaacacagaaaatcccaccgagaggagcagcttcttctgcctagagtactttcccagcaagatgctgagaacgggcaacaactttgagtttacctacaactttgaggaggtgcccttccactccagcttcgctcccagtcagaacctcttcaagctggccaacccgctggtggaccagtacttgtaccgcttcgtgagcacaaataacactggcggagtccagttcaacaagaacctggccgggagatacgccaacacctacaaaaactggttcccggggcccatgggccgaacccagggctggaacctgggctccggggtcaaccgcgccagtgtcagcgccttcgccacgaccaataggatggagctcgagggcgcgagttaccaggtgcccccgcagccgaacggcatgaccaacaacctccagggcagcaacacctatgccctggagaacactatgatcttcaacagccagccggcgaacccgggcaccaccgccacgtacctcgagggcaacatgctcatcaccagcgagagcgagacgcagccggtgaaccgcgtggcgtacaacgtcggcgggcagatggccaccaacaaccagagctccaccactgcccccgcgaccggcacgtacaacctccaggaaatcgtgcccggcagcgtgtggatggagagggacgtgtacctccaaggacccatctgggccaagatcccagagacgggggcgcactttcacccctctccggccatgggcggattcggactcaaacacccaccgcccatgatgctcatcaagaacacgcctgtgcccggaaatatcaccagcttctcggacgtgcccgtcagcagcttcatcacccagtacagcaccgggcaggtcaccgtggagatggagtgggagctcaagaaggaaaactccaagaggtggaacccagagatccagtacacaaacaactacaacgacccccagtttgtggactttgccccggacagcaccggggaatacagaaccaccagacctatcggaacccgataccttacccgacccctttaa

SEQ ID NO: 797 - DNA, 2175 bp, Artificial Sequence
  Description of Artificial Sequence: Synthetic polynucleotide
atgtcttttgttgatcaccctccagattggttggaagaagttggtgaaggtcttcgcgagtttttgggccttgaagcgggcccaccgaaaccaaaacccaatcagcagcatcaagatcaagcccgtggtcttgtgctgcctggttataactatctcggacccggaaacggtctcgatcgaggagagcctgtcaacagggcagacgaggtcgcgcgagagcacgacatctcgtacaacgagcagcttgaggcgggagacaacccctacctcaagtacaaccacgcggacgccgagtttcaggagaagctcgccgacgacacatccttcgggggaaacctcggaaaggcagtctttcaggccaagaaaagggttctcgaaccttttggcctggttgaagagggtgctaagacggcccctaccggaaagcggatagacgaccactttccaaaaagaaagaaggcccggaccgaagaggactccaagccttccacctcgtcagacgccgaagctggacccagcggatcccagcagctgcaaatcccagcccaaccagcctcaagtttgggagctgatacaatgtctgcgggaggtggcggcccattgggcgacaataaccaaggtgccgatggagtgggcaatgcctcgggagattggcattgcgattccacgtggatgggggacagagtcgtcaccaagtccacccgaacctgggtgctgcccagctacaacaaccaccagtaccgagagatcaaaagcggctccgtcgacggaagcaacgccaacgcctactttggatacagcaccccctgggggtactttgactttaaccgcttccacagccactggagcccccgagactggcaaagactcatcaacaactactggggcttcagaccccggtccctcagagtcaaaatcttcaacattcaagtcaaagaggtcacggtgcaggactccaccaccaccatcgccaacaacctcacctccaccgtccaagtgtttacggacgacgactaccagctgccctacgtcgtcggcaacgggaccgagggatgcctgccggccttccctccgcaggtctttacgctgccgcagtacggttacgcgacgctgaaccgcgacaacacagaaaatcccaccgagaggagcagcttcttctgcctagagtactttcccagcaagatgctgagaacgggcaacaactttgagtttacctacaactttgaggaggtgcccttccactccagcttcgctcccagtcagaacctcttcaagctggccaacccgctggtggaccagtacttgtaccgcttcgtgagcacaaataacactggcggagtccagttcaacaagaacctggccgggagatacgccaacacccacaaaaactggttcccggggcccatgggccgaacccagggctggaacctgggctccggggtcaaccgcgccagtgtcagcgccttcgccacgaccaataggatggagctcgagggcgcgagttaccaggtgcccccgcagtcgaacggcatgaccaacaacctccggggcagcaacacctatgccctggagaacactatgatcttcaacagccagccggcgaacccgggcaccaccgccacgtacctcgagggcaacatgctcatcaccagcgagagcgagacgcagccggtgaaccgcgtggcgtacaacgtcggcgggcagatggccaccaacaaccagagctccaccactgcccccgcgaccggcacgtacaacctccaggaaatcgtgcccggcagcgtgtggatggagagggacgtgtacctccaaggacccatctgggccaagatcccagagacgggggcgcactttcacccctctccggccatgggcggattcggactcaaacacccaccgcccatgatgctcatcaagaacacgcctgtgcccggaaatatcaccagcttctcggacgtgcccgtcagcagcttcatcacccagtacagcaccgggcaggtcaccgtggagatggagtgggagctcaagaaggaaaactccaagaggtggaacccagagatccagtacacaaacaactacaacgacccccagtttgtggactttgccccggacagcaccggggaatacagaaccaccagacctatcggaacccgataccttacccgacccctttaa

SEQ ID NO: 798 - DNA, 2175 bp, Artificial Sequence
  Description of Artificial Sequence: Synthetic polynucleotide
atgtcttttgttgatcaccctccagattggttggaagaagttggtgaaggtcttcgcgagtttttgggccttgaagcgggcccaccgaaaccaaaacccaatcagcagcatcaagatcaagcccgtggtcttgtgctgcctggttataactatctcggacccggaaacggtctcgatcgaggagagcctgtcaacagggcagacgaggtcgcgcgagagcacgacatctcgtacaacgagcagcttgaggcgggagacaacccctacctcaagtacaaccacgcggacgccgagtttcaggagaagctcgccgacgacacatccttcgggggaaacctcggaaaggcagtctttcaggccaagaaaagggttctcgaaccttttggcctggttgaagagggtgctaagacggcccctaccggaaagcggatagacgaccactttccaaaaagaaagaaggcccggaccgaagaggactccaagccttccacctcgtcagacgccgaagctggacccagcggatcccagcagctgcaaatcccagcccaaccagcctcaagtttgggagctgatacaatgtctgcgggaggtggcggcccattgggcgacaataaccaaggtgccgatggagtgggcaatgcctcgggagattggcattgcgattccacgtggatgggggacagagtcgtcaccaagtccacccgaacctgggtgctgcccagctacaacaaccaccagtaccgagagatcaaaagcggctccgtcgacggaagcaacgccaacgcctactttggatacagcaccccctgggggtactttgactttaaccgcttccacagccactggagcccccgagactggcaaagactcatcaacaactactggggcttcagaccccggtccctcagagtcaaaatcttcaacattcaagtcaaagaggtcacggtgcaggactccaccaccaccatcgccaacaacctcacctccaccgtccaagtgtttacggacgacgactaccagctgccctacgtcgtcggcaacgggaccgagggatgcctgccggccttccctccgcaggtctttacgctgccgcagtacggttacgcgacgctgaaccgcgacaacacagaaaatcccaccgagaggagcagcttcttctgcctagagtactttcccagcaagatgctgagaacgggcaacaactttgagtttacctacaactttgaggaggtgcccttccactccagcttcgctcccagtcagaacctcttcaagctggccaacccgctggtggaccagtacttgtaccgcttcgtgagcacaaataacactggcggagtccagttcaacaagaacctggccgggagatacgccaacacctacaaaaactggttcccggggcccatgggccgaacccagggctggaacctgggctccggggtcaaccgcgccagtgtcagcgccttcgccacgaccaataggatggagctcgagggcgcgagttaccaggtgcccccgcagccgaacggcatgaccaacaacctccagggcagcaacacctatgccctggagaacactatgatcttcaacagccagccggcgaacccgggcaccaccgccacgtacctcgagggcaacatgctcatcaccagcgagagcgagacgcagccggtgaaccgcgtggcgtacagcgtcggcgggcagatggccaccaacaaccagagctccaccactgcccccacgaccggcacgtacaacctccaggaaatcgtgcccggcagcgtgtggatggagagggacgtgtacctccaaggacccatctgggccaagatcccagagacgggggcgcactttcacccctctccggccatgggcggattcagactcaaacacccaccgcccatgatgctcatcaagaacacgcctgtgcccggaaatatcaccagcttctcggacgtgcccgtcagcagcttcatcacccagtacagcaccgggcaggtcaccgtggagatggagtgggagctcaagaaggaaaactccaagaggtggaacccagagatccagtacacaaacaactacaacgacccccagtttgtggactttgccccggacagcaccggggaatacagaaccaccagacctatcggaacccgataccttacccgacccctttaa

SEQ ID NO: 799 - DNA, 2175 bp, Artificial Sequence
  Description of Artificial Sequence: Synthetic polynucleotide
atgtcttttgttgatcaccctccagattggttggaagaagttggtgaaggtcttcgcgagtttttgggccttgaagcgggcccaccgaaaccaaaacccaatcagcagcatcaagatcaagcccgtggtcttgtgctgcctggttataactatctcggacccggaaacggtctcgatcgaggagagcctgtcaacagggcagacgaggtcgcgcgagagcacgacatctcgtacaacgagcagcttgaggcgggagacaacccctacctcaagtacaaccacgcggacgccgagtttcaggagaagctcgccgacgacacatccttcgggggaaacctcggaaaggcagtctttcaggccaagaaaagggttctcgaaccttttggcctggttgaagagggtgctaagacggcccctaccggaaagcggatagacgaccactttccaaaaagaaagaaggcccggaccgaagaggactccaagccttccacctcgtcagacgccgaagctggacccagcggatcccagcagctgcaaatcccagcccaaccagcctcaagtttgggagctgatacaatgtctgcgggaggtggcggcccattgggcgacaataaccaaggtgccgatggagtgggcaatgcctcgggagattggcattgcgattccacgtggatgggggacagagtcgtcaccaagtccacccgaacctgggtgctgcccagctacaacaaccaccagtaccgagagatcaaaagcggctccgtcgacggaagcaacgccaacgcctactttggatacagcaccccctgggggtactttgactttaaccgcttccacagccactggagcccccgagactggcaaagactcatcaacaactactggggcttcagaccccggtccctcagagtcaaaatcttcaacattcaagtcaaagaggtcacggtgcaggactccaccaccaccatcgccaacaacctcacctccaccgtccaagtgtttacggacgacgactaccagctgccctacgtcgtcggcaacgggaccgagggatgcctgccggccttccctccgcaggtctttacgctgccgcagtacggttacgcgacgctgaaccgcgacaacacagaaaatcccaccgagaggagcagcttcttctgcctagagtactttcccagcaagatgctgagaacgggcaacaactttgagtttacctacaactttgaggaggtgcccttccactccagcttcgctcccagtcagaacctcttcaagctggccaacccgctggtggaccagtacttgtaccgcttcgtgagcacaaataacactggcggagtccagttcaacaagaacctggccgggagatacgccaacacctacaaaaactggttcccggggcccatgggccgaacccagggctggaacctgggctccggggtcaaccgcgccagtgtcagcgccttcgccgcgaccaataggatggagctcgagggcgcgagttaccaggtgcccccgcagccgaacggcatgaccaacaacctccagggcagcaacacctatgccctggagaacactatgatcttcaacagccagccggcgaacccgggcaccaccgccacgtacctcgagggcaacatgctcatcaccagcgagagcgagacgcagccggtgaaccgcgtggcgtacaacgtcggcgggcagatggccaccaacaaccagagctccaccactgcccccgcgaccggcacgtacaacctccaggaaatcgtgcccggcggcgtgtggatggagagggacgtgtacctccaaggacccatctgggccaagatcccagagacgggggcgcactttcacccctctccggccatgggcggattcggactcaaacacccaccgcccatgatgctcatcaagaacacgcctgtgcccggaaataccaccagcttctcggacgtgcccgtcagcagcttcatcacccagtacagcaccgggcaggtcaccgtggagatggagtgggagctcaagaaggaaaactccaagaggtggaacccagagatccagtacacaaacaactacaacgacccccagtttgtggactttgccccggacagcaccggggaatacagaaccaccagacctatcggaacccgataccttacccgacccctttaa

SEQ ID NO: 800 - DNA, 2175 bp, Artificial Sequence
  Description of Artificial Sequence: Synthetic polynucleotide
atgtcttttgttgatcaccctccagattggttggaagaagttggtgaaggtcttcgcgagtttttgggccttgaagcgggcccaccgaaaccaaaacccaatcagcagcatcaagatcaagcccgtggtcttgtgctgcctggttataactatctcggacccggaaacggtctcgatcgaggagagcctgtcaacagggcagacgaggtcgcgcgagagcacgacatctcgtacaacgagcagcttgaggcgggagacaacccctacctcaagtacaaccacgcggacgccgagtttcaggagaagctcgccgacgacacatccttcgggggaaacctcggaaaggtagtctttcaggccaagaaaagggttctcgaaccttttggcctggttgaagagggtgctaagacggcccctaccggaaagcggatagacgaccactttccaaaaagaaagaaggcccggaccgaagaggactccaagccttccacctcgtcagacgccgaagctggacccagcggatcccagcagctgcaaatcccagcccaaccagcctcaagtttgggagctgatacaatgtctgcgggaggtggcggcccattgggcggcaataaccaaggtgccgatggagtgggcaatgcctcgggagattggcattgcgattccacgtggatgggggacagagtcgtcaccaagtccacccgaacctgggtgctgcccagctacaacaaccaccagtaccgagagatcaaaagcggctccgtcgacggaagcaacgccaacgcctactttggatacagcaccccctgggggtactttgactttaaccgcttccacagccactggggcccccgagactggcaaagactcatcaacaactactggggcttcagaccccggtccctcagagtcaaaatcttcaacattcaagtcaaagaggtcacggtgcaggactccaccaccaccatcgccaacaacctcacctccaccgtccaagtgtttacggacgacgactaccagctgccctacgtcgtcggcaacgggaccgagggatgcctgccggccttccctccgcaggtctttacgctgccgcagtacggttacgcgacgctgaaccgcgacaacacagaaaatcccaccgagaggagcagcttcttctgcctagagtactttcccagcaagatgctgagaacgggcaacaactttgagtttacctacaactttgaggaggtgcccttccactccagcttcgctcccagtcagaacctcttcaagctggccaacccgctggtggaccagtacttgtaccgcttcgtgagcacaaataacactggcggagtccagttcaacaagaacctggccgggagatacgccaacacctacaaaaactggttcccggggcccatgggccgaacccagggctggaacctgggctccggggtcaaccgcgccagtgtcagcgccctcgccacgaccaataggatggagctcgagggcgcgagttaccaggtgcccccgcagccgaacggcatgaccaacaacctccagggcagcaacacctatgccctggagaacactatgatcttcaacagccagccggcgaacccgggcaccaccgccacgtacctcgagggcaacatgctcatcaccagcgagagcgagacgcagccggtgaaccgcgtggcgtacaacgtcggcgggcagatggccaccaacaaccagagctccaccactgcccccgcgaccggcacgtacaacctccaggaaatcgtgcccggcagcgtgtggatggagagggacgtgtacctccaaggacccatctgggccaagatcccagagacgggggcgcactttcacccctctccggccatgggcggattcggactcaaacacccaccgcccatgatgctcatcaagaacacgcctgtgcccggaaatatcaccagcttctcggacgtgcccgtcagcagcttcatcacccagtacagcaccgggcaggtcaccgtggagatggagtgggagctcaagaaggaaaactccaagaggtggaacccagagatccagtacacaaacaactacaacgacccccagtttgtggactttgccccggacagcaccggggaatacagaaccaccagacctatcggaacccgataccttacccgacccctttaa

SEQ ID NO: 801 - DNA, 2175 bp, Artificial Sequence
  Description of Artificial Sequence: Synthetic polynucleotide
atgtcttttgttgatcaccctccagattggttggaagaagttggtgaaggtcttcgcgagtttttgggccttgaagcgggcccaccgaaaccaaaacccaatcagcagcatcaagatcaagcccgtggtcttgtgctgcctggttataactatctcggacccggaaacggtctcgatcgaggagagcctgtcaacagggcagacgaggtcgcgcgagagcacgacatctcgtacaacgagcagcttgaggcgggagacaacccctacctcaagtacaaccacgcggacgccgagtttcaggagaagctcgccgacgacacatccttcgggggaaacctcggaaaggcagtctttcaggccaagaaaagggttctcgaaccttttggcctggttgaagagggtgctaagacggcccctaccggaaagcggatagacgaccactttccaaaaagaaagaaggcccggaccgaagaggactccaagccttccacctcgtcagacgccgaagctggacccagcggatcccagcagctgcaaatcccagcccaaccagcctcaagtttgggagctgatacaatgtctgcgggaggtggcggcccattgggcgacaataaccaaggtgccgatggagtgggcaatgcctcgggagattggcattgcgattccacgtggatgggggacagagtcgtcaccaagtccacccgaacctgggtgctgcccagctacaacaaccaccagtaccgagagatcaaaagcggctccgtcgacggaagcaacgccaacgcctactttggatacagcaccccctgggggtactttgactttaaccgcttccacagccactggagcccccgagactggcaaagactcatcaacaactactggggcttcagaccccggtccctcagagtcaaaatcttcaacattcaagtcaaagaggtcacggtgcaggactccaccaccaccatcgccaacaacctcacctccaccgtccaagtgtttacggacgacgactaccagctgccctacgtcgtcggcaacgggaccgagggatgcctgccggccttccctccgcaggtctttacgctgccgcagtacggttacgcgacgctgaaccgcgacaacacagaaaatcccaccgagaggagcagcttcttctgcctagagtactttcccagcaagatgctgagaacgggcaacaactttgagtttacctacaactttgaggaggtgcccttccactccagcttcgctcccagtcagaacctcttcaagctggccaacccgctggtggaccagtacttgtaccgcttcgtgagcacaaataacactggcggagtccagttcaacaagaacctggccgggagatacgccaacacctacaaaaactggttcccggggcccatgggccgaacccagggctggaacctgggctccggggtcaaccgcgccagtgtcagcgccttcgccacgaccaataggatggagctcgagggcgcgagttaccaggtgcccccgcagccgaacggcatgaccaacaacctccagggcagcaacacctatgccctggagaacactatgatcttcaacagccagccggcgaacccgggcaccaccgccacgtacctcgagggcaacatgctcatcaccagcgagagcgagacgcagccggtgaaccgcgtggcgtacaacgtcggcgggcagatggccaccaacaaccagagctccaccactgcccccgcgaccggcacgtacaacctccaggaaatcgtgcccggcagcgtgtggatggagagggacgtgtacctccaaggacccatctgagccaagatcccagagacgggggcgcactttcacccctctccggccatgggcggattcggactcaaacacccaccgcccatgatgctcatcaagaacacgcctgtgcccggaaatatcaccagcttctcggacgtgcccgtcagcagcttcatcacccagtacagcaccgggcaggtcaccgtggagatggagtgggagctcaagaaggaaaactccaagaggtggaacccagagatccagtacacaaacaactacaacgacccccagtttgtggactttgccccggacagcaccggggaatgcagaaccaccagacctatcggaacccgataccttacccgacccctttaa

SEQ ID NO: 802 - DNA, 2175 bp, Artificial Sequence
  Description of Artificial Sequence: Synthetic polynucleotide
atgtcttttgttgatcaccctccagattggttggaagaagttggtgaaggtcttcgcgagtttttgggccttgaagcgggcccaccgaaaccaaaacccaatcagcagcatcaagatcaagcccgtggtcttgtgctgcctggttataactatctcggacccggaaacggtctcgatcgaggagagcctgtcaacagggcagacgaggtcgcgcgagagcacgacatctcgtacaacgagcagcttgaggcgggagacaacccctacctcaagtacaaccacgcggacgccgagtttcaggagaagctcgccgacgacacatccttcgggggaaacctcggaaaggcagtctttcaggccaagaaaagggttctcgaaccttttggcctggttgaagagggtgctaagacggcccctaccggaaagcggatagacgaccactttccaaaaagaaagaaggcccggaccgaagaggactccaagccttccacctcgtcagacgccgaagctggacccagcggatcccagcagctgcaaatcccagcccaaccagcctcaagtttgggagctgatacaatgtctgcgggaggtggcggcccattgggcgacaataaccaaggtgccgatggagtgggcaatgcctcgggagattggcattgcgattccacgtggatgggggacagagtcgtcaccaagtccacccgaacctgggtgctgcccagctacaacaaccaccagtaccgagagatcaaaagcggctccgtcgacggaagcaacgccaacgcctactttggatacagcaccccctgggggtactttgactttaaccgcttccacagccactggagcccccgagactggcaaagactcatcaacaactactggggcttcagaccccggtccctcagagtcaaaatcctcaacattcaagtcaaagaggtcacggtgcaggactccaccaccaccatcgccaacaacctcacctccaccgtccaagtgtttacggacgacgactaccagctgccctacgtcgtcggcaacgggaccgagggatgcctgccggccttccctccgcaggtctttacgctgccgcagtacggttacgcgacgctgaaccgcgacaacacagaaaatcccaccgagaggagcagcttcttctgcctagagtactttcccagcaagatgctgagaacgggcaacaactttgagtttacctacaactttgaggaggtgcccttccactccagcttcgctcccagtcagaacctcttcaagctggccaacccgctggtgggccagtacttgtaccgcttcgtgagcacaaataacactggcggagtccagttcaacgagaacctggccgggagatacgccaacacctacaaaaactggttcccggggcccatgggccgaacccagggctggaacctgggctccggggtcaaccgcgccagtgtcagcgccttcgccacgaccaataggatggagctcgagggcgcgagttaccaggtgcccccgcagccgaacggcatgaccaacaacctccagggcagcaacacctatgccctggagaacactatgatcttcaacagccagccggcgaacccgggcaccaccgccacgtacctcgagggcaacatgctcatcaccagcgagagcgagacgcagccggtgaaccgcgtggcgtacaacgtcggcgggcagatggccaccaacaaccagagctccaccactgcccccgcgaccggcacgtacaacctccaggaaatcgtgcccggcagcgtgtggatggagagggacgtgtacctccaaggacccatctgggccaagatcccagagacgggggcgcactttcacccctctccggccatgggcggattcggactcaaacacccaccgcccatgatgctcatcaagaacacgcctgtgcccggaaatatcaccagcttctcggacgtgcccgtcagcagcttcatcacccagtacagcaccgggcaggccaccgtggagatggagtgggagctcaagaaggaaaactccaagaggtggaacccagagatccagtacacaaacaactacaacgacccccagtttgtggactttgccccggacagcaccggggaatacagaaccaccagacctatcggaacccgataccttacccgacccctttaa

SEQ ID NO: 803 - DNA, 2175 bp, Artificial Sequence
  Description of Artificial Sequence: Synthetic polynucleotide
atgtcttttgttgatcaccctccagattggttggaagaagttggtgaaggtcttcgcgagtttttgggccttgaagcgggcccaccgaaaccaaaacccaatcagcagcatcaagatcaagcccgtggtcttgtgctgcctggttataactatctcggacccggaaacggcctcgatcgaggagagcctgtcaacagggcagacgaggtcgcgcgagagcacgacatctcgtacaacgagcagcttgaggcgggagacaacccctacctcaagtacaaccacgcggacgccgagtttcaggagaagctcgccgacgacacatccttcgggggaaacctcggaaaggcagtctttcaggccaagaaaagggttctcgaaccttttggcctggttgaagagggtgctaagacggcccctaccggaaagcggatagacgaccactttccaaaaagaaagaaggcccggaccgaagaggactccaagccttccacctcgtcagacgccgaagctggacccagcggatcccagcagctgcaaatcccagcccaaccagcctcaagtttgggagctgatacaatgtctgcgggaggtggcggcccattgggcgacaataaccaaggtgccgatggagtgggcaatgcctcgggagattggcattgcgattccacgtggatgggggacagagtcgtcaccaagtccacccgaacctgggtgctgcccagctacaacaaccaccagtaccgagagatcaaaagcggctccgtcgacggaagcaacgccaacgcctactttggatacagcaccccctgggggtactttgactttaaccgcttccacagccactggagcccccgagactggcaaagactcatcaacaactactggggcttcagaccccggtccctcagagtcaaaatcttcaacattcaagtcaaagaggtcacggtgcaggactccaccaccatcatcgccaacaacctcacctccaccgtccaagtgtttacggacgacgactaccagctgccctacgtcgtcggcaacgggaccgagggatgcctgccggccttccctccgcaggtctttacgctgccgcagtacggttacgcgacgctgaaccgcgacaacacagaaaatcccaccgagaggagcagcttcttctgcctagagtactttcccagcaagatgctgagaacgggcaacaactttgagtttacctacaactttgaggaggtgcccttccactccagcttcgcccccagtcagaacctcttcaagctggccaacccgctggtggaccagtacttgtaccgcttcgtgagcacaaataacactggcggagtccagttcaacaagaacctggccgggagatacgccaacacctacaaaaactggttcccggggcccatgggccgaacccagggctggaacctgggctccggggtcaaccgcgccagtgtcagcgccttcgccacgaccaataggatggagctcgagggcgcgagttaccaggtgcccccgcagccgaacggcatgaccaacaacctccagggcagcaacacctatgccctggagaacactatgatcttcaacagccagccggcgaacccgggcaccaccgccacgtacctcgagggcaacatgctcatcaccagcgagagcgagacgcagccggtgaaccgcgtggcgtacaacgtcggcgggcagatggccaccaacaaccagagctccaccactgcccccgcgaccggcacgtacaacctccaggaaatcgtgcccggcagcgtgtggatggagagggacgtgtacctccaaggacccatctgggccaagatcccagagacgggggcgcactttcacccctctccggccatgggcggattcggactcaaacacccaccgcccatgatgctcatcaagaacacgcctgtgcccggaaatatcaccagcttctcggacgtgcccgtcagcagcttcatcacccagtacagcaccgggcaggtcaccgtggagatggagtgggagctcaagaaggaaaactccaagaggtggaacccagagatccagtacacaaacaactacaacgacccccagtttgtggactttgccccggacagcaccggggaatacagaaccaccagacctatcggaacccgataccttacccgacccctttaa

SEQ ID NO: 804 - DNA, 2175 bp, Artificial Sequence
  Description of Artificial Sequence: Synthetic polynucleotide
atgtcttttgttgatcaccctccagattggttggaagaagttggtgaaggtcttcgcgagtttttgggccttgaagcgggcccaccgaaaccaaaacccaatcagcagcatcaagatcaagcccgtggtcttgtgctgcctggttataactatctcggacccggaaacggtctcgatcgaggagagcctgtcaacagggcagacgaggtcgcgcgagagcacgacatctcgtacaacgagcagcttgaggcgggagacaacccctacctcaagtacaaccacgcggacgccgagtttcaggagaagctcgccgacgacacatccttcgggggaaacctcggaaaggcagtctttcaggccaagaaaagggttctcgaaccttttggcctggttgaagagggtgctaagacggcccctaccggaaagcggatagacgaccactttccaaaaagaaagaaggcccggaccgaagaggactccaagccttccacctcgtcagacgccgaagctggacccagcggatcccagcagctgcaaatcccagcccaaccagcctcaagtttgggagctgatacaatgtctgcgggaggtggcggcccattgggcgacaataaccaaggtgccgatggagtgggcaatgcctcgggagattggcattgcgattccacgtggatgggggacagagtcgtcaccaagtccacccgaacctgggtgctgcccagctacaacaaccaccagtaccgagagatcaaaagcggctccgtcgacggaagcaacgccaacgcctactttggatacagcaccccctgggggtactttgactttaaccgcttccacagccactggagcccccgagactggcaaagactcatcaacaactactggggcttcagaccccggtccctcagagtcaaaatcttcaacattcaagtcaaagaggtcacggtgcaggactccaccaccaccatcgccaacaacctcacctccaccgtccaagtgtttacggacgacgactaccagctgccctacgtcgtcggcaacgggaccgagggatgcctgccggccttccctccgcaggtctttacgctgccgcagtacggttacgcgacgctgaaccgcgacaacacagaaaatcccaccgagaggagcagcttcttctgcctagagtactttcccagcaagatgctgagaacgggcaacaactttgagtttacctacaactttgaggaggtgcccttccactccagcttcgctcccagtcagaacctcttcaagctggccaacccgctggtggaccagtacttgtaccgcttcgtgagcacaaataacactggcggagtccagttcaacaagaacctggccgggagatacgccaacacctacaaaaactggttcccggggcccatgggccgaacccagggctggaacctgggctccggggtcaaccgcgccagtgtcagcgccttcgccacgaccaataggatggagctcgagggcgcgagttaccaggtgcccccgcagccgaacggcatgaccaacaacctccagggcagcaacacctatgccctggagaacactatgatcttcaacagccagccggcgaacccgggcaccaccgccacgtacctcgagggcaacatgctcatcaccagcgagagcgagacgcagccggtgaaccgcgtggcgtacaacgtcggcgggcagatggccaccaacaaccagagctccaccactgcccccgcgaccggcacgtacaacctccaggaaatcgtgcccggcagcgtgtggatggagagggacgtgtacctccaaggacccatctgggccaagatcccagagacgggggcgcactttcacccctctccggccatgggcggattcggactcaaacacccaccgcccatgatgctcatcaagaacacgcctgtgcccggaaatatcaccagcctctcggacgtgcccgtcagcagcttcatcacccagtacagcaccgggcaggtcaccgtggagatggagtgggagctcaagaaggaaaactccaagaggtggaacccagagatccagtacacaaacaactacaacgacccccagtttgtggactttgccccggacagcaccggggaatacagaaccaccagacctatcggaacccgataccttacccgacccctttaa

SEQ ID NO: 805 - DNA, 2175 bp, Artificial Sequence
  Description of Artificial Sequence: Synthetic polynucleotide
atgtcttttgttgatcaccctccagattggttggaagaagttggtgaaggtcttcgcgagtttttgggccttgaagcgggcccaccgaaaccaaaacccaatcagcagcatcaagatcaagcccgtggtcttgtgctgcctggttataactatctcggacccggaaacggtctcgatcgaggagagcctgccaacagggcagacgaggtcgcgcgagagcacgacatctcgtacaacgagcagcttgaggcgggagacaacccctacctcaagtacaaccacgcgggcgccgagtttcaggagaagctcgccgacgacacatccttcgggggaaacctcggaaaggcagtctttcaggccaagaaaagggttctcgaaccttttggcctggttgaagagggtgctaagacggcccctaccggaaagcggatagacgaccactttccaaaaagaaagaaggcccggaccgaagaggactccaagccttccacctcgtcagacgccgaagctggacccagcggatcccagcagctgcaaatcccagcccaaccagcctcaagtttgggagctgatacaatgtctgcgggaggtggcggcccattgggcgacaataaccaaggtgccgatggagtgggcaatgcctcgggagattggcattgcgattccacgtggatgggggacagagtcgtcaccaagtccacccgaacctgggtgctgcccggctacaacaaccaccagtaccgagagatcaaaagcggctccgtcgacggaagcaacgccaacgcctactttggatacagcaccccctgggggtactttgactttaaccgcttccacagccactggagcccccgagactggcaaagactcatcaacaactactggggcttcagaccccggtccctcagagtcaaaatcttcaacattcaagtcaaagaggtcacggtgcaggactccaccaccaccatcgccaacaacctcacctccaccgtccaagtgtttacggacgacgactaccagctgccctacgtcgtcggcaacgggaccgagggatgcctgccggccttccctccgcaggtctttacgctgccgcagtacggttacgcgacgctgaaccgcgacaacacagaaaatcccaccgagaggagcagcttcttctgcctagagtactttcccagcaagatgctgagaacgggcaacaactttgagtttacctacaactttgaggaggtgcccttccactccagcttcgctcccagtcagaacctcttcaagctggccaacccgctggtggaccagtacttgtaccgcttcgtgagcacaaataatactggcggagtccagttcaacaagaacctggccgggagatacgccaacacctacaaaaactggttcccggggcccatgggccgaacccagggctggaacctgggctccggggtcaaccgcgccagtgtcagcgccttcgccacgaccaataggatggagctcgagggcgcgagttaccaggtgcccccgcagccgaacggcatgaccaacaacctccagggcagcaacacctatgccctggagaacactatgatcttcaacagccagccggcgaacccgggcaccaccgccacgtacctcgagggcaacatgctcatcaccagcgagagcgagacgcagccggtgaaccgcgtggcgtacaacgtcggcgggcagatggccaccaacaaccagagctccaccactgcccccgcgaccggcacgtacaacctccaggaaatcgtgcccggcagcgtgtggatggagagggacgtgtacctccaaggacccatctgggccaagatcccagagacgggggcgcactttcacccctctccggccatgggcggattcggactcaaacacccaccgcccatgatgctcatcaagaacacgcctgtgcccggaaatatcaccagcttctcggacgtgcccgtcagcagcttcatcacccagtacagcaccgggcaggtcaccgtggagatggagtgggagctcaagaaggaaaactccaagaggtggaacccagagatccagtacacaaacaactacaacgacccccagtttgtggactttgccccggacagcaccggggaatacagaaccaccagacctatcggaacccgataccttacccgacccctttaa

SEQ ID NO: 806 - DNA, 2175 bp, Artificial Sequence
  Description of Artificial Sequence: Synthetic polynucleotide
atgtcttttgttgatcaccctccagattggttggaagaagttggtgaaggtcttcgcgagtttttgggccttgaagcgggcccaccgaaaccaaaacccaatcagcagcatcaagatcaagcccgtggtcttgtgctgcctggttataactatctcggacccggaaacggtctcgatcgaggagagcctgtcaacagggcagacgaggtcgcgcgagagcacgacatctcgtacaacgagcagcttgaggcgggagacaacccctacctcaagtacaaccacgcggacgccgagtttcaggagaagctcgccgacgacacatccttcgggggaaacctcggaaaggcagtctttcaggccaagaaaagggttctcgaaccttttggcctggttgaagagggtgctaagacggcccctaccggaaagcggatagacgaccactttccaaaaagaaagaaggcccggaccgaagaggactccaagcctcccacctcgtcagacgccgaagctggacccagcggatcccagcagctgcaaatcccagcccaaccagcctcaagtttgggagctgatacaatgtctgcgggaggtggcggcccattgggcgacaataaccaaggtgccgatggagtgggcaatgcctcgggagattggcattgcgattccacgtggatgggggacagagtcgtcaccaagtccacccgaacctgggtgctgcccagctacaacaaccaccagtaccgagagatcaaaagcggctccgtcgacggaagcaacgccaacgcctactttggatacagcaccccctgggggtactttgactttaaccgcttccacagccactggagcccccgagactggcaaagactcatcaacaactactggggcttcagaccccggtccctcagagtcaaaatcttcaacattcaagtcaaagaggtcacggtgcaggactccgccaccaccatcgccaacaacctcacctccaccgtccaagtgtttacggacgacgactaccagctgccctacgtcgtcggcaacgggaccgagggatgcctgccggccttccctccgcaggtctttacgctgccgcagtacggttacgcgacgctgaaccgcgacaacacagaaaatcccaccgagaggagcagcttcttctgcctagagtactttcccagcaagatgctgagaacgggcaacaactttgagtttacctacaactttgaggaggtgcccttccactccagcttcgctcccagtcagaacctcttcaagctggccaacccgctggtggaccagtacttgtaccgcttcgtgagcacaaataacactggcggagtccagttcaacaagaacctggccgggagatacgccaacacctacaaaaactggttcccggggcccatgggccgaacccagggctggaacctgggctccggggtcaaccgcgccagtgtcagcgccttcgccacgaccaataggatggagctcgagggcgcgagttaccaggtgcccccgcagccgaacggcatgaccaacaacctccagggcagcaacacctatgccctggagaacactatgatcttcaacagccagccggcgaacccgggcaccaccgccacgtacctcgagggcaacatgctcatcaccagcgagagcgagacgcagccggtgaaccgcgtggcgtacaacgtcggcgggcagatggccaccaacaaccagagctccaccactgcccccgcgaccggcacgtacaacctccaggaaatcgtgcccggcagcgtgtggatggagagggacgtgtacctccaaggacccatctgggccaagatcccagagacgggggcgcactttcacccctctccggccatgggcggattcggactcaaacacccaccgcccatgatgctcatcaagaacacgcctgtgcccggaaatatcaccagcttctcggacgtgcccgtcagcagcttcatcacccagtacagcaccgggcaggtcaccgtggagatggagtgggagctcaagaaggaaaactccaagaggtggaacccagagatccagtacacaaacaactacaacgacccccagtttgtggactttgccccggacagcaccggggaatacagaaccaccagacctatcggaacccgataccttacccgacccctttaa

SEQ ID NO: 807 - DNA, 2175 bp, Artificial Sequence
  Description of Artificial Sequence: Synthetic polynucleotide
atgtcttttgttgatcaccctccagattggttggaagaagttggtgaaggtcttcgcgagtttttgggccttgaagcgggcccaccgaaaccaaaacccaatcagcagcatcaagatcaagcccgtggtcttgtgctgcctggttataactatctcggacccggaaacggtctcgatcgaggagagcctgtcaacagggcagacgaggtcgcgcgagagcacgacatctcgtacaacgagcagcttgaggcgggagacaacccctacctcaagtacaaccacgcggacgccgagtttcaggagaagctcgccgacgacacatccttcgggggaaacctcggaaaggcagtctttcaggccaagaaaagggttctcgaaccttttggcctggttgaagagggtgctaagacggcccctaccggaaagcggatagacgaccactttccaaaaagaaagaaggcccggaccgaagaggactccaagccttccacctcgtcagacgccgaagctggacccagcggatcccagcagccgcaaatcccagcccaaccagcctcaagtttgggagctgatacaatgtctgcgggaggtggcggcccattgggcgacaataaccaaggtgccgatggagtgggcaatgcctcgggagattggcattgcgattccacgtggatgggggacagagtcgtcaccaagtccacccgaacctgggtgctgcccagctacaacaaccaccagtaccgagagatcaaaagcggctccgtcgacggaagcaacgccaacgcctactttggatacagcaccccctgggggtactttgactttaaccgcttccacagccactggagcccccgagactggcaaagactcatcaacaactactggggcttcagaccccggtccctcagagtcaaaatcttcaacattcaagtcaaagaggtcacggtgcaggactccaccaccaccatcgccaacaacctcacctccaccgtccaagtgtttacggacgacgactaccagctgccctacgtcgtcggcaacgggaccgagggatgcctgccggccttccctccgcaggtctttacgctgccgcagtacggttacgcgacgctgaaccgcgacaacacagaaaatcccaccgagaggagcagcttcttctgcctagagtactttcccagcaagatgctgagaacgggcaacaactttgagtttacctacaactttgaggaggtgcccttccactccagcttcgctcccagtcagaacctcttcaagctggccaacccgctggtggaccagtacttgtaccgcttcgtgagcacaaataacactggcggagtccagttcaacaagaacctggccgggagatacgccaacacctacaaaaactggttcccggggcccatgggccgaacccagggctggaacctgggctccggggtcaaccgcgccagtgtcagcgccttcgccacgaccaataggatggagctcgagggcgcgagttaccaggtgcccccgcagccgaacggcatgaccaacaacctccagggcagcaacacctatgccctggagaacactatgatcttcaacagccagccggcgaacccgggcaccaccgccacgtacctcgagggcaacatgctcatcaccagcgagagcgagacgcagccggtgaaccgcgtggcgtacaacgtcggcgggcagatggccaccaacaaccagagctccaccactgcccccgcgaccggcacgtacaacctccaggaaatcgtgcccggcagcgtgtggatggagagggacgtgtacctccaaggacccatctgggccaagatcccagagacgggggcgcactttcacccctctccggccatgggcggattcggactcaaacacccaccgcccatgatgctcatcaagaacacgcctgcgcccggaaatatcaccagcttctcggacgtgcccgtcagcagcttcatcacccagtacagcaccgggcaggtcaccgtggagatggagtgggagctcaagaaggaaaactccaagaggtggaacccagagatccagtacacaaacaactacaacgacccccagtttgtggactttgccccggacagcaccggggaatacagaaccaccagacctatcggaacccgataccttacccgacccctttaa

SEQ ID NO: 808 - DNA, 2175 bp, Artificial Sequence
  Description of Artificial Sequence: Synthetic polynucleotide
atgtcttttgttgatcaccctccagattggttggaagaagttggtgaaggtcttcgcgagtttttgggccttgaagcgggcccaccgaaaccaaaacccaatcagcagcatcaagatcaagcccgtggtcttgtgctgcctggttataactatctcggacccggaaacggtctcgatcgaggagagcctgtcaacagggcagacgaggtcgcgcgagagcacgacatctcgtacaacgagcagcttgaggcgggagacaacccctacctcaagtacaaccacgcggacgccgagtttcaggagaagctcgccgacgacacatccttcgggggaaacctcggaaaggcagtctttcaggccaagaaaagggttctcgaaccttttggcctggttgaagagggtgctaagacggcccctaccggaaagcggatagacgaccactttccaaaaagaaagaaggcccggaccgaagaggactccaagcctcccacctcgtcagacgccgaagctggacccagcggatcccagcagctgcaaatcccagcccaaccagcctcaagtttgggagctgatacaatgtctgcgggaggtggcggcccattgggcgacaataaccaaggtgccgatggagtgggcaatgcctcgggagattggcattgcgattccacgtggatgggggacagagtcgtcaccaagtccacccgaacctgggtgctgcccagctacaacaaccaccagtaccgagagatcaaaagcggctccgtcgacggaagcaacgccaacgcctactttggatacagcaccccctgggggtactttgactttaaccgcttccacagccactggagcccccgagactggcaaagactcatcaacaactactggggcttcagaccccggtccctcagagtcaaaatcttcaacattcaagtcaaagaggtcacggtgcaggactccaccaccaccatcgccaacaacctcacctccaccgtccaagtgtttacggacgacgactaccagctgccctacgtcgtcggcaacgggaccgagggatgcctgccggccttccctccgcaggtctttacgctgccgcagtacggttacgcgacgctgaaccgcgacaacacagaaaatcccaccgagaggagcagcttcttctgcctagagtactttcccagcaagatgctgagaacgggcaacaactttgagtttacctacaactttgaggaggtgcccttccactccagcttcgctcccagtcagaacctcttcaagctggccaacccgctggtggaccagtacttgtaccgcttcgtgagcacaaataacactggcggagtccagttcaacaagaacctggccgggagatacgccaacacctacaaaaactggttcccggggcccatgggccgaacccagggctggaacctgggctccggggtcaaccgcgccagtgtcagcgccttcgccacgaccaataggatggagctcgagggcgcgagttaccaggtgcccccgcagccgaacggcatgaccaacaacctccagggcagcaacacctatgccctggagaacactatgatcttcaacagccagccggcgaacccgggcaccaccgccacgtacctcgagggcaacatgctcatcaccagcgagagcgagacgcagccggtgaaccgcgtggcgtacaacgtcggcgggcagatggccaccaacaaccagagctccaccactgcccccgcgaccggcacgtacaacctccaggaaatcgtgcccggcagcgtgtggatggagagggacgtgtacctccaaggacccatctgggccaagatcccagagacgggggcgcactttcacccctctccggccatgggcggattcggactcaaacacccaccgcccatgatgctcatcaagaacacgcctgtgcccggaaatatcaccagcttctcggacgtgcccgtcagcagcttcatcacccagtacagcaccgggcaggtcaccgtggagatggagtgggagctcaagaaggaaaactccaagaggtggaacccagagatccagtacacaaacaactacaacgacccccagtttgtggactttgccccggacagcaccggggaatacagaaccaccagacctatcggaacccgataccttacccgacccctttaa

SEQ ID NO: 809 - DNA, 2175 bp, Artificial Sequence
  Description of Artificial Sequence: Synthetic polynucleotide
atgtcttttgttgatcaccctccagattggttggaagaagttggtgaaggtcttcgcgagtttttgggccttgaagcgggcccaccgaaaccaaaacccaatcagcagcatcaagatcaagcccgtggtcttgtgctgcctggttataactatctcggacccggaaacggtctcgatcgaggagagcctgtcaacagggcagacgaggtcgcgcgagagcacgacatctcgtacaacgagcagcttgaggcgggagacaacccctacctcaagtacaaccacgcggacgccgagtttcaggagaagctcgccgacgacacatccttcgggggaaacctcggaaaggcagtctttcaggccaagaaaagggttctcgaaccttttggcctggttgaagagggtgctaagacggcccctaccggaaagcggatagacgaccactttccaaaaagaaagaaggcccggaccgaagaggactccaagcctcccacctcgtcagacgccgaagctggacccagcggatcccagcagctgcaaatcccagcccaaccagcctcaagtttgggagctgatacaatgtctgcgggaggtggcggcccattgggcgacaataaccaaggtgccgatggagtgggcaatgcctcgggagattggcattgcgattccacgtggatgggggacagagtcgtcaccaagtccacccgaacctgggtgccgcccagctacaacaaccaccagtaccgagagatcaaaagcggctccgtcgacggaagcaacgccaacgcctactttggatacagcaccccctgggggtactttgactttaaccgcttccacagccactggagcccccgagactggcaaagactcatcaacaactactggggcttcagaccccggtccctcagagtcaaaatcttcaacattcaagtcaaagaggtcacggtgcaggactccaccaccaccatcgccaacaacctcacctccaccgtccaagtgtttacggacgacgactaccagctgccctacgtcgtcggcaacgggaccgagggatgcctgccggccttccctccgcaggtctttacgctgccgcagtacggttacgcgacgctgaaccgcgacaacacagaaaatcccaccgagaggagcagcttcttctgcctagagtactttcccagcaagatgctgagaacgggcaacaactttgagtttacctacaactttgaggaggtgcccttccactccagcttcgctcccagtcagaacctcttcaagctggccaacccgctggtggaccagtacttgtaccgcttcgtgagcacaaataacactggcggagtccagttcaacaagaacctggccgggagatacgccaacacctacaaaaactggttcccggggcccatgggccgaacccagggctggaacctgggctccggggtcaaccgcgccagtgtcagcgccttcgccacgaccaataggatggagctcgagggcgcgagttaccaggtgcccccgcagccgaacggcatgaccaacaacctccagggcagcaacacctatgccctggagaacactatgatcttcaacagccagccggcgaacccgggcaccaccgccacgtacctcgagggcaacatgctcatcaccagcgagagcgagacgcagccggtgaaccgcgtggcgtacaacgtcggcgggcagatggccaccaacaaccagagctccaccactgcccccgcgaccggcacgtacaacctccaggaaatcgtgcccggcagcgtgtggatggagagggacgtgtacctccaaggacccatctgggccaagatcccagagacgggggcgcactttcacccctctccggccatgggcggattcggactcaaacacccaccgcccatgatgctcatcaagaacacgcctgtgcccggaaatatcaccagcttctcggacgtgcccgtcagcagcttcatcacccagtacagcaccgggcaggtcgccgtggagatggagtgggagctcaagaaggaaaactccaagaggtggaacccagagatccagtacacaaacaactacaacgacccccagtttgtggactttgccccggacagcaccggggaatacagaaccaccagacctatcggaacccgataccttacccgacccctttaa

SEQ ID NO: 810 - DNA, 2175 bp, Artificial Sequence
  Description of Artificial Sequence: Synthetic polynucleotide
atgtcttttgttgatcaccctccagattggttggaagaagttggtgaaggtcttcgcgagtttttgggccttgaagcgggcccaccgaaaccaaaacccaatcagcagcatcaagatcaagcccgtggtcttgtgctgcctggttataactatctcggacccggaaacggtctcgatcgaggagagcctgtcaacagggcagacgaggtcgcgcgagagcacgacatctcgtacaacgagcagcttgaggcgggagacaacccctacctcaagtacaaccacgcggacgccgagtttcaggagaagctcgccgacgacacatccttcgggggaaacctcggaaaggcagtctttcaggccaagaaaagggttctcgaaccttttggcctggttgaagagggtgctaagacggcccctaccggaaagcggatagacgaccactttccaaaaagaaagaaggcccggaccgaagaggactccaagccttccacctcgtcagacgccgaagctggacccagcggatcccagcagctgcaaatcccagcccaaccagcctcaagtttgggagctgatacaatgtctgcgggaggtggcggcccattgggcgacaataaccaaggtgccgatggagtgggcaatgcctcgggagattggcattgcgattccacgtggatgggggacagagtcgtcaccaagtccacccgaacctgggtgctgcccagctacaacaaccaccagtaccgagagatcaaaagcggctccgtcgacggaagcaacgccaacgcctactttggatacagcaccccctgggggtactttgactttaaccgcttccacagccactggagcccccgagactggcaaagactcatcaacaactactggggcttcagaccccggtccctcagagtcaaaatcttcaacattcaagtcaaagaggtcacggtgcaggactccaccaccaccatcgccaacaacctcacctccaccgtccaagtgtttacggacgacgactaccagctgccctacgtcgtcggcaacgggaccgagggatgcctgccggccttccctccgcaggtctttacgctgccgcagtacggttacgcgacgctgaaccgcgacaacacagaaaatcccaccgagaggagcagcttcttctgcctagagtactttcccagcaagatgctgagaacgggcaacaactttgagtttacctacaactttgaggaggtgcccttccactccagcttcgctcccagtcagaacctcttcaagctggccaacccgctggtggaccagtacttgtaccgcttcgtgagcacaaataacactggcggagtccagttcaacaagaacctggccgggagatacgccaacacctacaaaaactggttcccggggcccatgggccgaacccagggctggaacctgggctccggggtcaaccgcgccagtgtcagcgccttcgccacgaccaataggatggagctcgagggcgcgagttaccaggtgcccccgcagccgaacggcatgaccaacaacctccagggcagcaacacctatgccctggagaacactatgatcttcaacagccagccggcgaacccgggcaccaccgccacgtacctcgagggcaacatgctcatcaccagcgagagcgagacgcagccggtgaaccgcgtggcgtacaacgtcggcgggcagatggccaccaacaaccagagctccaccactgcccccgcgaccggcacgtacaacctccaggaaatcgtgcccggcagcgtgtggatggagagggacgtgtacctccaaggacccatctgggccaagatcccagagacgggggcgcactttcacccctctccggccatgggcggattcggactcaaacacccaccgcccatgatgctcatcaagaacacgcctgcgcccggaaatatcaccagcttctcggacgtgcccgtcagcagcttcatcacccagtacagcaccgggcaggtcaccgtggagatggagtgggagctcaagaaggaaaactccaagaggtggaacccagagatccagtacacaaacaactacaacgacccccagtttgtggactttgccccggacagcaccggggaatacagaaccaccagacctatcggaacccgataccttacccgacccctttaa

SEQ ID NO: 811 - DNA, 2175 bp, Artificial Sequence
  Description of Artificial Sequence: Synthetic polynucleotide
atgtcttttgttgatcaccctccagattggttggaagaagttggtgaaggtcttcgcgagtttttgggccttgaagcgggcccaccgaaaccaaaacccaatcagcagcatcaagatcaagcccgtggtcttgtgctgcctggttataactatctcggacccggaaacggtctcgatcgaggagagcctgtcaacagggcagacgaggtcgcgcgagagcacgacatctcgtacaacgagcagcttgaggcgggagacaacccctacctcaagtacaaccacgcggacgccgagtttcaggagaagctcgccgacgacacatccttcgggggaaacctcggaaaggcagtctttcaggccaagaaaagggttctcgaaccttttggcctggctgaagagggtgctaagacggcccctaccggaaagcggatagacgaccactttccaaaaagaaagaaggcccggaccgaagaggactccaagccttccacctcgtcagacgccgaagctggacccagcggatcccagcagctgcaaatcccagcccaaccagcctcaagtttgggagctgatacaatgtctgcgggaggtggcggcccattgggcgacaataaccaaggtgccgatggagtgggcaatgcctcgggagattggcattgcgattccacgtggatgggggacagagtcgtcaccaagtccacccgaacctgggtgctgcccagctacaacaaccaccagtaccgagagatcaaaagcggctccgtcgacggaagcaacgccaacgcctactttggatacagcaccccctgggggtactttgactttaaccgcttccacagccactggagcccccgagactggcaaagactcatcaacaactactggggcttcagaccccggtccctcagagccaaaatcttcaacattcaagtcaaagaggtcacggtgcaggactccaccaccaccatcgccaacaacctcacctccaccgtccaagtgtttacggacgacgactaccagctgccctacgtcgtcggcaacgggaccgagggatgcctgccggccttccctccgcaggtctttacgctgccgcagtacggttacgcgacgctgaaccgcgacaacacagaaaatcccaccgagaggagcagcttcttctgcctagagtactttcccagcaagatgctgagaacgggcaacaaccttgagtttacctacaactttgaggaggtgcccttccactccagcttcgctcccagtcagaacctcttcaagctggccaacccgctggtggaccagtacttgtaccgcttcgtgagcacaaataacactggcggagtccagttcaacaagaacctggccgggagatacgccaacacctacaaaaactggttcccggggcccatgggccgaacccagggctggaacctgggctccggggtcaaccgcgccagtgtcagcgccttcgccacgaccaataggatggagctcgagggcgcgagttaccaggtgcccccgcagccgaacggcatgaccaacaacctccagggcagcaacacctatgccctggagaacactatgatcttcaacagccagccggcgaacccgggcaccaccgccacgtacctcgagggcaacatgctcatcaccagcgagagcgagacgcagccggtgaaccgcgtggtgcacaacgtcggcgggcagatggccaccaacaaccagagctccaccactgcccccgcgaccggcacgtacaacctccaggaaatcgtgcccggcagcgtgtggatggagagggacgtgtacctccaaggacccatctgggccaagatcccagagacgggggcgcactttcacccctctccggccatgggcggattcggactcaaacacccaccgcccatgatgctcatcaagaacacgcctgtgcccggaaatatcaccagcttctcggacgtgcccgtcagcagcttcatcacccagtacagcaccgggcaggtcaccgtggagatggagtgggagctcaagaaggaaaactccaagaggtggaacccggagatccagtacacaaacaactacaacgacccccagtttgtggactttgccccggacagcaccggggaatacagaaccaccagacctatcggaacccgataccttacccgacccctttaa

SEQ ID NO: 812 - DNA, 2175 bp, Artificial Sequence
  Description of Artificial Sequence: Synthetic polynucleotide
atgtcttttgttgatcaccctccagattggttggaagaagttggtgaaggtcttcgcgagtttttgggccttgaagcgggcccaccgaaaccaaaacccaatcagcagcatcaagatcaagcccgtggtcttgtgctgcctggttataactatctcggacccggaaacggtctcgatcgaggagagcctgtcaacagggcagacgaggtcgcgcgagagcacgacatctcgtacaacgagcagcttgaggcgggagacaacccctacctcaagtacaaccacgcggacgccgagtttcaggagaagctcgccgacgacacatccttcgggggaaacctcggaaaggcagtctttcaggccaagaaaagggttctcgaaccttttggcctggttgaagagggtgctaagacggcccctaccggaaagcggatagacgaccactttccaaaaagaaagaaggcccggaccgaagaggactccaagccttccacctcgtcagacgccgaagctggacccagcggatcccagcagctgcaaatcccagcccaaccagcctcaagtttgggagctgatacaatgtctgcgggaggtggcggcccattgggcgacaataaccaaggtgccgatggagtgggcaatgcctcgggagattggcattgcgattccacgtggatgggggacagagtcgtcaccaagtccacccgaacctgggtgctgcccagctacaacaaccaccagtaccgagagatcaaaagcggctccgtcgacggaggcaacgccaacgcctactttggatacagcaccccctgggggtactttgactttaaccgcttccacagccactggagcccccgggactggcaaagactcatcaacaactactggggcttcagaccccggtccctcagagtcaaaatcttcaacattcaagtcaaagaggtcacggtgcaggactccaccaccaccatcgccaacaacctcacctccaccgtccaagtgtttacggacgacgactaccagctgccctacgtcgtcggcaacgggaccgagggatgcctgccggccttccctccgcaggtctttacgctgccgcagtacggttacgcgacgctgaaccgcgacaacacagaaaatcccaccgagaggagcagcttcttctgcctagagtactttcccagcaagatgctgagaacgggcaacaactttgagtttacctacaactttgaggaggtgcccttccactccagcttcgctcccagtcagaacctcttcaagctggccaacccgctggtggaccagtacttgtaccgcttcgtgagcacaaataacactggcggagtccagttcaacaagaacctggccgggagatacgccaacacctacaaaaactggttcccggggcccatgggccgaacccagggctggaacctgggctccggggtcaaccgcgccagtgtcagcgccttcgccacgaccaataggatggagctcgagggcgcgagttaccaggtgcccccgcagccgaacggcatgaccaacaacctccagggcagcaacacctatgccctggagaacactatgatcttcaacagccagccggcgaacccgggcaccaccgccacgtacctcgagggcaacatgctcatcaccagcgagagcgagacgcagccggtgaaccgcgtggcgtacaacgtcggcgggcagatggccaccaacaaccagagctccaccactgcccccgcgaccggcacgtacaacctccaggaaatcgtgcccggcagcgtgtggatggagagggacgtgtacctccaaggacccatctgggccaagatcccagagacgggggcgcactttcacccctctccggccatgggcggattcggactcaaacacccaccgcccatgatgctcatcaagaacacgcctgcgcccggaaatatcaccagcttctcggacgtgcccgtcagcagcttcatcacccagtacagcaccgggcaggtcaccgtggagatggagtgggagctcaagaagggaaactccaagaggtggaacccagagatccagtacacaaacaactacaacgacccccagtttgtggactttgccccggacagcaccggggaatacagaaccaccagacctatcggaacccgataccttacccgacccctttaa

SEQ ID NO: 813 - DNA, 2175 bp, Artificial Sequence
  Description of Artificial Sequence: Synthetic polynucleotide
atgtcttttgttgatcaccctccagattggttggaagaagttggtgaaggtcttcgcgagtttttgggccttgaagcgggcccaccgaaaccaaaacccaatcagcagcatcaagatcaagcccgtggtcttgtgctgcctggttataactatctcggacccggaaacggtctcgatcgaggagagcctgtcaacagggcagacgaggtcgcgcgagagcacgacatctcgtacaacgagcagcttgaggcgggagacaacccctacctcaagtacaaccacgcggacgccgagtttcaggagaagctcgccgacgacacgtccttcgggggaaacctcggaaaggcagtctttcaggccaagaaaagggttctcgaaccttttggcctggttgaagagggtgctaagacggcccctaccggaaagcggatagacgaccactttccaaaaagaaagaaggcccggaccgaagaggactccaagccttccacctcgtcagacgccgaagctggacccagcggatcccagcagctgcaaatcccagcccaaccagcctcaagtttgggagctgatacaatgtctgcgggaggtggcggcccattgggcgacaataaccaaggtgccgatggagtgggcaatgcctcgggagattggcattgcgattccacgtggatgggggacagagtcgtcaccaagtccacccgaacctgggtgctgcccagctacaacaaccaccagtaccgagagatcaaaagcggctccgtcgacggaagcaacgccaacgcctactttggatacagcaccccctgggggtactttgactttaaccgcttccacagccactggagcccccgagactggcaaagactcatcaacaactactggggcttcagaccccggtccctcagagtcaaaatcttcaacattcaagtcaaagaggtcacggtgcaggactccaccaccaccatcgccaacaacctcacctccaccgtccaagtgtttacggacgacgactaccagctgccctacgtcgtcggcaacgggaccgagggatgcctgccggccttccctccgcaggtctttacgctgccgcagtacggttacgcgacgctgaaccgcgacaacacagaaaatcccaccgagaggagcagcttcttctgcctagagtactttcccagcaagatgctgagaacgggcaacaactttgagtttacctacaactttgaggaggtgcccttccactccagcttcgctcccagtcagaacctcttcaagctggccaacccgctggtggaccagtacttgtaccgcttcgtgagcacaaataacactggcggagtccagttcaacaagaacctggccgggagatacgccaacacctacaaaaactggttcccggggcccatgggccgaacccagggctggaacctgggctccggggtcaaccgcgccagtgtcagcgccttcgccacgaccaataggatggagctcgagggcgcgagttaccaggtgcccccgcagccgaacggcatgaccaacaacctccagggcagcaacacctatgccctggagaacactatgatcttcaacagccagccggcgaacccgggcaccaccgccacgtacctcgagggcaacatgctcatcaccagcgagagcgagacgcagccggtgaaccgcgtggcgtacaacgtcggcgggcagatggccaccaacaaccagagctccaccactgcccccgcgaccggcacgtacaacctccaggaaatcgtgcccggcagcgtgtggatggagagggacgtgtacctccaaggacccatctgggccaagatcccagagacgggggtgcactttcacccctctccggccatgggcggattcggactcaaacacccaccgcccatgatgctcatcaagaacacgcctgtgcccggaaatatcaccagcttctcggacgtgcccgtcagcagcttcatcacccagtacagcaccgggcaggtcaccgtggagatggagtgggagctcaagaaggaaaactccaagaggtggaacccagagatccagtacacaaacaactacaacgacccccagtttgtggactttgccccggacagcaccggggaatacagaaccaccagacctatcggaacccgataccttacccgacccctttaa

SEQ ID NO: 814 - DNA, 2175 bp, Artificial Sequence
  Description of Artificial Sequence: Synthetic polynucleotide
  misc_feature (1652)..(1652): n is a, c, t, or g
atgtcttttgttgatcaccctccagattggttggaagaagttggtgaaggtcttcgcgagtttttgggccttgaagcgggcccaccgaaaccaaaacccaatcagcagcatcaagatcaagcccgtggtcttgtgctgcctggttataactatctcggacccggaaacggtctcgatcgaggagagcctgtcaacagggcagacgaggtcgcgcgagagcacgacatctcgtacaacgagcagcttgaggcgggagacaacccctacctcaagtacaaccacgcggacgccgagtttcaggagaagctcgccgacgacacatccttcgggggaaacctcggaaaggcagtctttcaggccaagaaaagggttctcgaaccttttggcctggttgaagagggtgctaagacggcccctaccggaaagcggatagacgaccactttccaaaaagaaagaaggcccggaccgaggaggactccaagccttccacctcgtcagacgccgaagctggacccagcggatcccagcagctgcaaatcccagcccaaccagcctcaagtttgggagctgatacaatgtctgcgggaggtggcggcccattgggcgacaataaccaaggtgccgatggagtgggcaatgcctcgggagattggcattgcgattccacgtggatgggggacagagtcgtcaccaagtccacccgaacctgggtgctgcccagctacaacaaccaccagtaccgagagatcaaaagcggctccgtcgacggaagcaacgccaacgcctactttggatacagcaccccctgggggtactttgactttaaccgcttccacagccactggagcccccgagactggcaaagactcatcaacaactactggggcttcagaccccggtccctcagagtcaaaatcttcaacattcaagtcaaagaggtcacggtgcaggactccaccaccaccatcgccaacaacctcacctccaccgtccaagtgtttacggacgacgactaccagctgccctacgtcgtcggcaacgggaccgagggatgcctgccggccttccctccgcaggtctttacgctgccgcagtacggttacgcgacgctgaaccgcgacaacacagaaaatcccaccgagaggagcagcttcttctgcctagagtactttcccagcaagatgctgagaacgggcaacaactttgagtttacctacaactttgaggaggtgcccttccactccagcttcgctcccagtcagaacctcttcaagctggccaacccgctggtggaccagtacttgtaccgcttcgtgagcacaaataacactggcggagtccagttcaacaagaacctggccgggagatacgccaacacctacaaaaactggttcccggggcccatgggccgaacccagggctggaacctgggctccggggtcaaccgcgccagtgtcagcgccttcgccacgaccaataggatggagctcgagggcgcgagttaccaggtgcccccgcagccgaacggcatgaccaacaacctccagggcagcaacacctatgccctggagaacactatgatcttcaacagccagccggcgaacccgggcaccaccgccacgtacctcgagggcagcatgctcatcaccancgagagcgagacgcagccggtgaaccgcgtggcgtacaacgtcggcgggcagatggccaccaacaaccagagctccaccactgcccccgcgaccggcacgtacaacctccaggaaatcgtgcccggcagcgtgtggatggagagggacgtgtacctccaaggacccatctgggccaagatcccagagacgggggcgcactttcacccctctccggccatgggcggattcggactcaaacacccaccgcccatgatgctcatcaagaacacgcctgtgcccggaaatatcaccagcttctcggacgtgcccgtcagcagcttcatcacccagtacagcaccgggcaggtcaccgtggagatggagtgggagctcaagaaggaaaactccaagaggtggaacccagagatccagtacacaaacaactacaacgacccccagtttgtggactttgccccggacagcaccggggaatacagaaccaccagacctatcggaacccgataccttacccgacccctttaa

SEQ ID NO: 815 - DNA, 2211 bp, Artificial Sequence
  Description of Artificial Sequence: Synthetic polynucleotide
atggctgctgacggttatcttccagattggctcgaggacaacctttctgaaggcattcgtgagtggtgggctctgaaacctggagtccctcaacccaaagcgaaccaacaacaccaggacaaccgtcggggtcttgtgcttccgggttacaaatacctcggacccggtaacggactcgacaaaggagagccggtcaacgaggcggacgcggcagccctcgaacacgacaaagcttacgaccagcagctcaaggccggtgacaacccgtacctcaagtacaaccacgccgacgccgagtttcaggagcgtcttcaagaagatacgtcttttgggggcaaccttggcagagcagtcttccaggccaaaaagaggatccttgagcctcttggtctggttgaggaagcagctaaaacggctcctggaaagaagaggcctgtagatcagtctcctcaggaaccggactcatcatctggtgttggcaaatcgggcaaacagcctgccagaaaaagactaaatttcggtcagactggcgactcagagtcagtcccagaccctcaacctctcggagaaccaccagcagcccccacaagtttgggatctaatacaatggcttcaggcggtggcgcaccaatggcagacaataacgagggtgccgatggagtgggtaattcctcaggaaattggcattgcgattcccaatggctgggcgacagagtcatcaccaccagcaccagaacctgggccctgcccacttacaacaaccatctctacaagcaaatctccagccaatcaggagcttcaaacgacaaccactactttggctacagcaccccttgggggtattttgactttaacagattccactgccacttctcaccacgtgactggcagcgactcattaacaacaactggggattccggcccaagaaactcagcttcaagctcttcaacatccaagttaaagaggtcacgcagaacgatggcacgacgactattgccaataaccttaccagcacggttcaagtgtttacggactcggagtatcagctcccgtacgtgctcgggtcggcgcaccaaggctgtctcccgccgtttccagcggacgtcttcatggtccctcagtatggatacctcaccctgaacaacggaagtcaagcggtgggacgctcatccttttactgcctggagtacttcccttcgcagatgctaaggactggaaataacttccaattcagctataccttcgaggatgtaccttttcacagcagctacgctcacagccagagtttggatcgcttgatgaatcctcttattgatcagtatctgtactacctgaacagaacgcaaggaacaacctctggaacaaccaaccaatcacggctgctttttagccaggctgggcctcagtctatgtctttgcaggccagaaattggctacctgggccctgctaccggcaacagagactttcaaagactgctaacgacaacaacaacagtaactttccttggacagcggccagcaaatatcatctcaatggccgcgactcgctggtgaatccaggaccagctatggccagtcacaaggacgatgaagaaaaatttttccctatgcacggcaatctaatatttggcaaagaagggacaacggcaagtaacgcagaattagataatgtaatgattacggatgaagaagagattcgtaccaccaatcctgtggcaacagagcagtatggaactgtggcaaataacttgcagagctcaaatacagctcccacgactagaactgtcaatgatcagggggccttacctggcatggtgtggcaagatcgtgacgtgtaccttcaaggacctatctgggcaaagattcctcacacggatggacactttcatccttctcctctgatgggaggctttggactgaaacatccgcctcctcaaatcatgatcaaaaatactccggtaccggcaaatcctccgacgactttcagcccggccaagtttgcttcatttatcactcagtactccactggacaggtcagcgtggaaattgagtgggagctacagaaagaaaacagcaaacgttggaatccagagattcagtacacttccaactacaacaagtctgttaatgtggactttactgtagacactaatggtgtttatagtgaacctcgccctattggaacccggtatctcacacgaaacttgtaa

SEQ ID NO: 816 - DNA, 2205 bp, Artificial Sequence; identical to SEQ ID NO: 84
  Description of Artificial Sequence: Synthetic polynucleotide

SEQ ID NO: 817 - DNA, 2234 bp, Artificial Sequence
  Description of Artificial Sequence: Synthetic polynucleotide
atgtcttttgttgatcaccctccagattggttggaagaagttggtgaaggtcttcgcgagtttttgggccttgaagcgggcccaccgaaaccaaaacccaatcagcagcatcaagatcaagcccgtggtcttgtgctgcctggttataactatctcggacccggaaacggtctcgatcgaggagagcctgtcaacagggcagacgaggtcgcgcgagagcacgacatctcgtacaacgagcagcttgaggcgggagacaacccctacctcaagtacaaccacgcggacgccgagtttcaggagaagctcgccgacgacacatccttcgggggaaacctcggaaaggcagtctttcaggccaagaaaagggttctcgaaccttttggcctggttgaagagggtgctaagacggcccctaccggaaagcggatagacgaccactttccaaaaagaaagaaggctcggaccgaagaggactccaagccttccacctcgtcagacgccgaagctggacccagcggatcccagcagctgcaaatcccagcccaaccagcctcaagtttgggagctgatacaatgtctgcgggaggtggcggcccattgggcgacaataaccaaggtgccgatggagtgggcaatgcctcgggagattggcattgcgattccacgtggatgggggacagagtcgtcaccaagtccacccgaacctgggtgctgcccagctacaacaaccaccagtaccgagagatcaaaagcggctccgtcgacggaagcaacgccaacgcctactttggatacagcaccccctgggggtactttgactttaaccgcttccacagccactggagcccccgagactggcaaagactcatcaacaactactggggcttcagaccccggtccctcagagtcaaaatcttcaacattcaagtcaaagaggtcacggtgcaggactccaccaccaccatcgccaacaacctcacctccaccgtccaagtgtttacggacgacgactaccagctgccctacgtcgtcggcaacgggaccgagggatgcctgccggccttccctccgcaggtctttacgctgccgcagtacggttacgcgacgctgaaccgcgacaacacagaaaatcccaccgagaggagcagcttcttctgcctagagtactttcccagcaagatgctgagaacgggcaacaactttgagtttacctacaactttgaggaggtgcccttccactccagcttcgctcccagtcagaacctgttcaagctggccaacccgctggtggaccagtacttgtaccgcttcgtgagcacaaataacactggcggagtccagttcaacaagaacctggccgggagatacgccaacacctacaaaaactggttcccggggcccatgggccgaacccagggctggaacctgggctccggggtcaaccgcgccagtgtcagcgccttcgccacgaccaataggatggagctcgagggcgcgagttaccaggtgcccccgcagccgaacggcatgaccaacaacctccagggcagcaacacctatgccctggagaacactatgatcttcaacagccagccggcgaacccgggcaccaccgccacgtacctcgagggcaacatgctcatcaccagcgagagcgagacgcagccggtgaaccgcgtggcgtacaacgtcggcgggcagatggccaccaacaaccagagctccaccactgcccccgcgaccggcacgtacaacctccaggaaatcgtgcccggcagcgtgtggatggagagggacgtgtacctccaaggacccatctgggccaagatcccagagacgggggcgcactttcacccctctccggccatgggcggattcggactcaaacacccaccgcccatgatgctcatcaagaacacgcctgtgcccggaaatatcaccagcttctcggacgtgcccgtcagcagcttcatcacccagtacagcaccgggcaggtcaccgtggagatggagtgggagctcaagaaggaaaactccaagaggtggaacccagagatccagtacacaaacaactacaacgacccccagtttgtggactttgccccggacagcaccggggaatacagaaccaccagacctatcggaacccgataccttacccgacccctttaacccattcatgtcgcataccctcaataaaccgtgtattcgtgtcagtaaaatactgcctc

SEQ ID NO: 818 - protein, 736 aa, Artificial Sequence
  Description of Artificial Sequence: Synthetic polypeptide
MAADGYLPDWLEDNLSEGIREWWALKPGVPQPKANQQHQDNRRGLVLPGYKYLGPGNGLDKGEPVNEADAAALEHDKAYDQQLKAGDNPYLKYNHADAEFQERLQEDTSFGGNLGRAVFQAKKRILEPLGLVEEAAKTAPGKKRPVDQSPQEPDSSSGVGKSGKQPARKRLNFGQTGDSESVPDPQPLGEPPAAPTSLGSNTMASGGGAPMADNNEGADGVGNSSGNWHCDSQWLGDRVITTSTRTWALPTYNNHLYKQISSQSGASNDNHYFGYSTPWGYFDFNRFHCHFSPRDWQRLINNNWGFRPKKLSFKLFNIQVKEVTQNDGTTTIANNLTSTVQVFTDSEYQLPYVLGSAHQGCLPPFPADVFMVPQYGYLTLNNGSQAVGRSSFYCPEYFPSQMLRTGNNFQFSYTFEDVPFHSSYAHSQSLDRLMNPLIDQYLYYLNRTQGTTSGTTNQSRLLFSQAGPQSMSLQARNWLPGPCYRQQRLSKTANDNNNSNFPWTAASKYHLNGRDSLVNPGPAMASHKDDEEKFFPMHGNLIFGKEGTTASNAELDNVMITDEEEIRTTNPVATEQYGTVANNLQSSNTAPTTRTVNDQGALPGMVWQDRDVYLQGPIWAKIPHTDGHFHPSPLMGGFGLKHPPPQIMIKNTPVPANPPTTFSPAKFASFITQYSTGQVSVEIEWELQKENSKRWNPEIQYTSNYNKSVNVDFTVDTNGVYSEPHPIGTRYLTRNL

SEQ ID NO: 819 - protein, 736 aa, Artificial Sequence
  Description of Artificial Sequence: Synthetic polypeptide
MAADGYLPDWLEDNLSEGIREWWALKPGVPQPKANQQHQDNRRGLVLPGYKYLGPGNGLDKGEPVNEADAAALEHDKAYDQQLKAGDNPYLKYNHADAEFQERLQEDTSFGGNLGRAVFQAKKRILEPLGLVEEAAKTAPGKKRPVDQSPQEPDSSSGVGKSGKQPARKRLNFGQTGDSESVPDPQPLGEPPAAPTSLGSNTMASGGGAPMADNNEGADGVGNSSGNWHCDSQWLGDRVITTSTRTWALPTYNNHLYKQISSQSGASNDNHYFGYSTPWGYFDFNRFHCHFSPRDWQRLINNNWGFRPKKLSFKLFNIQVKEVTQNDGTTTVANNLTSTVQVFTDSEYQLPYVLGSAHQGCLPPFPADVFMVPQYGYLTLNNGSQAVGRSSFYCLEYFPSQMLRTGNNFQFSYTFEDVPFHSSYAHSQSLDRLMNPLIDQYLYYLNRTQGTTSGTTNQSRLLFSQAGPQSMSLQARNWLPGPCYRQQRLSKTANDNNNSNFPWTAASKYHLNGRDSLVNPGPAMASHKDDEEKFFPMHGNLIFGKEGTTASNAELDNVMITDEEEIRTTNPVATEQYGTVANNLQSSNTAPTTRTVNDQGALPGMVWQDRDVYLQGPIWAKIPHTDGHFHPSPLMGGFGLKHPPPQIMIKNTPVPANPPTTFSPAKFASFITQYSTGQVSVEIEWELQKENSKRWNPEIQYTSNYNKSVNVDFTVDTNGVYSEPRPIGTRYLTRNL

SEQ ID NO: 820 - protein, 736 aa, Artificial Sequence
  Description of Artificial Sequence: Synthetic polypeptide
MAADGYLPDWLEDNLSEGIREWWALKPGVPQPKANQQHQDNRRGLVLPGYKYLGPGNGLDKGEPVNEADAAALEHDKAYDQQLKAGDNPYLKYNHADAEFQERLQEDTSFGGNLGRAVFQAKKRILEPLGLVEEAAKTAPGKKRPVDQSPQEPDSSSGVGKSGKQPARKRLNFGQTGDSESVPDPQPLGEPPAAPTSLGSNTMASGGGAPMADNNEGADGVGNSSGNWHCDSQWLGDRVITTSTRTWALPTYNNHLYKQISGQSGASNDNHYFGYSTPWGYFDFNRFHCHFSPRDWQRLINNNWGFRPKKLSFKLFNIQVKEVTQNDGTTTIANNLTSTVQVFTDSEYQLPYVLGSAHQGCLPPFPADVFMVPQYGYLTLNNGSQAVGRSSFYCLEYFPSQMLRTGNNFQFSYTFEDVPFHSSYAHSQSLDRLMNPLIDQYLYYLNRTQGTTSGTTNQSRLLFSQAGPQSMSLQARNWLPGPCYRQQRLSKTANGNNNSNFPWTAASKYHLNGRDSLVNPGPAMASHKDDEEKFFPMHGNLIFGKEGTTASNAELDNVMITDEEEIRTTNPVATEQCGTVANNLQSSNTAPTTRTVNDQGALPGMVWQDRDVYLQGPIWAKIPHTDGHFHPSPLMGGFGLKHPPPQIMIKNTPVPANPPTTFSPAKFASFITQYSTGQVSVEIEWELQKENSKRWNPEIQYTSNYNKSVNVDFTVDTNGVYSEPRPIGTRYLTRNL

SEQ ID NO: 821 - protein, 736 aa, Artificial Sequence
  Description of Artificial Sequence: Synthetic polypeptide
MAADGYLPDWLEDNLSEGIREWWALKPGVPQPKANQQHQDNRRGLVLPGYKYLGPGNGLDKGEPVNEADAAALEHDKAYDQQLKAGDNPYLKYNHADAEFQERLQEDTSFGGNLGRAVFQAKKRILEPLGLVEGAAKTAPGKKRPVDQSPQEPDSSSGVGKSGKQPARKRLNFGQTGDSESVPDPQPLGEPPAAPTSLGSNTMASGGGAPMADNNEGADGVGNSSGNWHCDSQWLGDRVITTSTRTWALPTYNSHLYKQISSQSGASNDNHYFGYSTPWGYFDFNRFHCHFSPRDWQRLINNNWGFRPKKLSFKLFNIQVKEVTQNDGTTTIANNLTSTVQVFTDSEYQLPYVLGSAHQGCLPPFPADAFMVPQYGYLTLNNGSQAVGRSSFYCLEYFPSQMLRTGNNFQFSYTFEDVPFHGSYAHSQSLDRLMNPLIDQYLYYLNRTQGTTSGTTNQSRLLFSQAGPQSMSLQARNWLPGPCYRQQRLSKTANDNNNSNFPWTAASKYHLNGRDSLVNPGPAMASHKDDEEKFFPMHGNLIFGKEGTTASNAELDNVMITDEEEIRTTNPVATEQYGTVANNLQSSNTAPTTRTVNDQGALPGMVWQDRDVYLQGPIWAKIPHTDGHFHPSPLMGGFGLKHPPPQIMIKNTPVPANPPTTFSPAKFASFITQYSTGQVSVEIEWELQKENSKRWNPEIQYTSNYNKSVNVDFTVDTNGVYSEPRPIGTRYLTRNS

SEQ ID NO: 822 - protein, 736 aa, Artificial Sequence
  Description of Artificial Sequence: Synthetic polypeptide
MAADGYLPDWLEDNLSEGIREWWALKPGVPQPKANQQHQDNRRGLVLPGYKYLGPGNGLDKGEPVNEADAAALEHDKAYDQQLKAGDNPYLKYNHADAEFQERLQEDTSFGGNLGRAVFQAKKRILEPLGLVEGAAKTAPGKKRPVDQSPQEPDSSSGVGKSGKQLARKRLNFGQTGDSESVPDPQPLGEPPAAPTSLGSNTMASGGGAPMADNNEGADGVGNSSGNWHCDSQWLGDRVITTSTRTWALPTYNSHLYKQISGQSGASNDNHYFGYSTPWGYFDFNRFHCHFSPRDWQRLINNNWGFRPKKLSFKLFNIQVKEVTQNDGTTTIANNLTSTVQVFTDSEYQLPYVLGSAHQGCLPPFPADVFMVPQYGYLTLNNGSQAVGRSSFYCLEYFPSQMLRTGNNFQFSYTFEDVPFHSSYAHSQSLDRLMNPLIDQYLYYLNRTQGTTSGTTNQSRLLFSQAGPQSMSLQARNWLPGPCYRQQRLSKTANDNNNSNFPWTAASKYHLNGRDSLVNPGPAMASHKDDEEKFFPMHGNLIFGKEGTTASNAELDNVMITDEEEIRTTNPVATEQYGTVANNLQSSNTAPTTRTVNDQGALPGMVWQDRDVYLQGPIWAKIPHTDGHFHPSPLMGGFGLKHPPPQIMIKNTPVPANPPTTFSPAKFASFITQYSTGQVSVEIEWELQKENSKRWNPEIQYTSNYNKSVNVDFTVDTNGVYSEPRPIGTRYLTRNL

SEQ ID NO: 823 - protein, 736 aa, Artificial Sequence
  Description of Artificial Sequence: Synthetic polypeptide
MAADGYLPDWLEDNLSEGIREWWALKPGVPQPKANQQHQDDRRGLVLPGYKYLGPGNGLDKGEPVNEADAAALEHDKAYDQQLKAGDNPCLKYNHADAEFQERLQEDTSFGGNLGRAVFQAKKRILEPLGLVEEAAKTAPGKKRPVDQSPQEPDSSSGVGKSGKQPARKRLNFGQTGDSESVPDPQPLGEPPAAPTSLGSNTMASGGSAPMADNNEGADGVGNSSGNWHCDSQWLGDRVITTSTRTWALPTYNNHLYKQISSQSGASNDNHYFGYSTPWGYFDFNRFHCHFSPRDWQRLINNNWGFRPKKLSFKLFNIQVKEVTQNDGTTTIANNLTSTVQVFTDSEYQLPYVLGSAHQGCLPPFPADVFMVPQYGYLTLNNGSQAVGRSSFYCLEYFPSQMLRTGNNFQFSYTFEDVPFHSSYAHSQSLDRLMDPLIDQYLYYLNRTQGTTSGTTNQSRLLFSQAGPQSMSLQARNWLPGPCYRQQRLSKTANDNNNSNFPWTAASKYHLNGRDSLVNPGPAMASHKDDEEKFFPMHGNLIFGKEGTTASNAELDNVMITDEEEIRTTNPVATEQYGTVANNLQSSNTAPTTRTVNDQGALPGMVWQDRDVYLQGPIWAKIPHTDGHFHPSPLMGGFGLKHPPPQIMIKNTPVPANPPTTFSPAKFASFITQYSTGQVSVEIEWELQKENSKRWNPEIQYTSNYNKSVNVDFTVDTNGVYSEPRPIGTRYLTRNL

SEQ ID NO: 824 - protein, 736 aa, Artificial Sequence
  Description of Artificial Sequence: Synthetic polypeptide
MAADGYLPDWLEDNLSEGIREWWALKPGVPQPKANQQHQDDRRGLVLPGYKYLGPGNGLDKGEPVNEADAAALEHDKAYDQQLKAGDNPYLKYNHADAEFQERLQEDTSFGGNLGRAVFQAKKRILEPLGLVEEAAKTAPGKKRPVDQSPQEPDSSSGVGKSGKQPARKRLNFGQTGDSESVPDPQPLGEPPAAPTSLGSNTMASGGGAPMADNNEGADGVGNSSGNWHCDSQWLGNRVITTSTRTWALPTYNNHLYKQISSQSGASNDNHYFGYSTPWGYFDFNRFHCHFSPRDWQRLINNNWGFRPKKLSFKLFNIQVKEVTQNDGTTTIANNLTSTVQVFTDSEYQLPYVLGSAHQGCLPPFPADVFMVPQYGYLTLNNGSQAVGRSSFYCLEYFPSQMLRTGNNFQFSYTFEDVPFHSSYAHSQSLDRLMNPLIDQYLYYLNRTQGTTSGTTNQSRLLFSQAGPQSMSLQARNWLPGPCYRQQRLSKTANDNNNSNFPWTAASKYHLNGRDSLVNPGPAMASHKDDEEKFFPMHGNLIFGKEGTTASNAELDNVMITDEEEIRTTNPVATEQYGTVANNLQSSNTAPTTRTVNDQGALPGMVWQDRDVYLQGPIWAKIPHTDGHFHPSPLMGGFGLKHPPPQIMIKNTPVPANPPTTFSPAKFASFITQYSTGQVSVEIEWELQKENSKRWNPEIQYTSNYNKSVNVDFTVDTNGVYSEPRPIGTRYLTRNL

SEQ ID NO: 825 - protein, 736 aa, Artificial Sequence
  Description of Artificial Sequence: Synthetic polypeptide
MAADGYLPDWLEDNLSEGIREWWALKPGVPQPKANQQHQDDRRGLVLPGYKYLGPGNGLDKGEPVNEADAAALEHDKAYDQQLKAGDNPYLKYNHADAEFQERLQEDTSFGGNLGRAVFQAKKRILEPLGLVEEAAKTAPGKKRPVDQSPQEPDSSSGVGKSGKQPARKRLNFGQTGDSESVPDPQPLGEPPAAPTSLGSNTMASGGGAPMADNNEGADGVGNSSGNWHCDSQWLGDRVITTSTRTWALPTYNNHLYKQISSQSGASNDNHYFGYSTPWGYFDFNRFHCHFSPRDWQRLINNNWGFRPKKLSFKLFNIQVKEVTQNDGTTTIANNLTSTVQVFTDSEYQLPYVLGSAHQGCLPPFPADVFMVPQYGYLTLNNGSQAVGRSSFYCLEYFPSQMLRTGNNFQFSYTFEDVPFHSSYAHSQSLDRLMNPLIDQYLYYLNRTQGTTSGTTNQSRLLFSQAGPQSMSLQARNWLPGPCYRQQRLSKTANDNNNSNFPWTAASKYHLNGRDSLVNPGPAMASHKDDEEKFFPMHGNLIFGKEGTTASNAELDNVMITDEEEIRTTNPVATVQYGTVANNLQSSNTAPTTRTVNDQGALPGMVWQDRDVYLQGPIWAKIPHTDGHFHPSPLMGGFGLKHPPPQIMIKNTPVPANPPTTFSPAKFASFITQYSTGQVSVEIEWELQKENSKRWNPEIQYTSNYNKSVNVDFTVDTNGVYSEPRPIGTRYLTRNL

SEQ ID NO: 826 - protein, 735 aa, Artificial Sequence
  Description of Artificial Sequence: Synthetic polypeptide
MAADGYLPDWLEDNLSEGIREWWALKPGVPQPKANQQHQDNRRGLVLPGYKYLGPGNGLDKGEPVNEADAAALEHDKAYDQQLKAGDNPYLKYNHADAEFQERLQEDTSFGGNLGRAVFQAKKGILEPLGLVEEAAKTAPGKKRPVDQSPQEPDSSSGVGKSGKQPARKRLNFGQTGDSESVPDPQPLGEPPAAPTSLGSNTMASGGGAPMADNNEGADGVGNSSGNWHCDSQWLGDRVITTSTRTWALPTYNNHLYKQISSQSGASNDNHYFGYSTPWGYFDFNRFHCHFSPRDWQRLINNNWGFRPKKLSFKLFNIQVKEVTQNDGTTTIANNLTSTVQVFTDSEYQLPYVFGSAHQGCLPPFPADVFMVPQYGYLTLNNGSQAVGRSSFYCLEYFPSQMLRTGNNFQFSYTFEDVPFHSSYAHSQSSDRLMNPLIDQYLYYLNRTQGTTSGTTNQSRLLFSQAGPQSMSLQARNWLPGPCYRQQRLSKTANDNNNSNFPTAASKYHLNGRDSLVNPGPAMASHKDDEEKFFPMHGNLIFGKEGTTASNAELDNVMITDEEEIRTTNPVATEQYGTVANNLQSSNTAPTTRTVNDQGALPGMVWQDRDVYLQGPIWAKIPHTDGHFHPSPLMGGFGLKHPPPQIMIKNTPVPANPPTTFSPAKFASFITQYSTGQVSVEIEWELQKENSKRWNPEIQYTSNYNKSVNVDFTVDTNGVYSEPRPIGTRYLTRNL

SEQ ID NO: 827 - protein, 736 aa, Artificial Sequence
  Description of Artificial Sequence: Synthetic polypeptide
MAADGYLPDWLEDNLSEGIREWWALKPGVPQPKANQQHQDNRRGLVLPGYKYLGPGNGLDEGEPVNEADAAALEHDKAYDQQLKAGDNPYLKYNHADAEFQERLQEDTSFGGNLGRAVFQAKKRILEPLGLVEGAAKTAPGKKRPVDQSPQEPDSSSGVGKSGKQPARKRLNFGQTGDSESVPDPQPLGEPPAAPTSLGSNTMASGGGAPMADNNEGADGVGNSSGNWHCDSQWLGDRVITTSTRTWALPTYNSHLYKQISSQSGASNDNHYFGYSTPWGYFDFNRFHCHFSPRDWQRLINNNWGFRPKKLSFKLFNIQVKEVTQNDGTTTIANNLTSTVQVFTDSEYQLPYVLGSAHQGCLPPFPADVFMVPQYGYLTLNNGSQAVGRSSFYCLEYFPSQMLRTGNNFQFSYTFEDVPFHSSYAHSQSLDRLMNPLIDQYLYYLNRTQGTTSGTTNQSRLLFSQAGPQSMSLQARNWLPGPCYRQQRLSKTANDNNNSNFPWTAASKYHLNGRDSLVNPGPAMASHKDDEEKFFPMHGNLIFGKEGTTASNAELDNVMITDEEEIRTTNPVATEQYGTVANNLQSSNTAPTTRTVNDQGALPGMVWQDRDVYLQGPIWAKIPHTDGHFHPSPLMGGFGLKHPPPQIMIKNTPVPANPPTTFSPAKFASFITQYSTGQVSVEIEWELQKENSKRWNPEIQYTSNYNKSVNVDFTVDTNGVYSEPRPIGTRYLTRNL

SEQ ID NO: 828 - protein, 668 aa, Artificial Sequence
  Description of Artificial Sequence: Synthetic polypeptide
MAADGYLPDWLEDNLSEGIREWWALKPGVPQPKANQQHQDNRRGLVLPGYKYLGPGNGLDKGEPVNEADAAALEHDKAYDQQLKAGDNPYLKYNHADAEFQERLQEDTSFGGNLGRAVFQAKKRILEPLGLVEGAAKTAPGKKRPVDQSPQEPDSSSGVGKSGKQPARKRLNFGQTGDSESVPDPQPLGEPPAAPTSLGSNTMASGGGAPMADNNEGADGVGNSSGNWHCDSQWLGDRVITTSTRTWALPTYNSHLYKQISSQSGASNDNHYFGYSTPWGILTLTDSTATSHHVTGSDSLTTTGDSGPRNSASSSSTSKLKRSRRTMARRLLPITLPARFKCLRTRSISSRTCSGRRTKAVSRRFQRTPSWSLSMDTSPTTEVKRWDAHPFTAWSTSLRRCGLEITSNSAIPSRMYLFTAATLTARVWIAILLLISICTTTERKEQPLEQPTNHGCFLARLGLSLCLCRPEIGYLGPATGNRDFQRLLTTTTTVTFLGQRPANIISMAATRWIQDQLWPVTRTMKKNFSLCTAIRGPYLAWCGKIVTCTFKDLSGQRFLTRMDTFILLLWEALDNIRLLKSSKILRYRQILRRLSARPSLLHLSLSTPLDRSAWKLSGSYRKKTANVGIQRFSTLPTTTSLLMWTLLTLMVFIVNLALLEPGISHETC

SEQ ID NO: 829 - protein, 734 aa, Artificial Sequence
  Description of Artificial Sequence: Synthetic polypeptide
MTDGYLPDWLEDNLSEGVREWWALQPGAPKPKANQQHQDNARGLVLPGYKYLGPGNGLDKGEPVNAADAAALEHDKAYDQQLKAGDNPYLKYNHADAEFQQRLQGDTSFGGNLGRAVFQAKKRVLEPLGLVEQAGETAPGKKRPLIESPQQPDSSTGIGKKGKQPAKKKLVFEDETGAGDGPPEGSTSGAMSDDSEMRAATGGAAVEGGQGADGVGNASGDWHCDSTWSEGHVTTTSTRTWVLPTYNNHLYKRLGESLQSNTYNGFSTPWGYFDFNRFHCHFSPRDWQRLINNNWGMRPKAMRVKIFNIQVKEVTTSNGETTVANNLTSTVQIFADSSYELPYVMDAGQEGSLPPFPNDVFMVPQYGYCGLVTGNTSQQQTDRNAFYCLEYFPSQMLRTGNNFEITYSFEKVPFHSMYAHSQSLDRLMNPLIDQYLWGLQSTTTGTTLNAGTATTNFTKLRPTNLSNFKKNWLPGPSIKQQGFSKTANQNYKIPATGSDSLIKYETHSTLDGRWSALTPGPPMATAGPADSKFSNSQLIFAGPKQNGNTATVPGTLIFTSEEELAATNATDTDMWGNLPGGDQSNSNLPTVDRLTALGAVPGMVWQNRDIYYQGPIWAKIPHTDGHFHPSPLIGGFGLKHPPPQIFIKNTPVPANPATTFSSTPVNSFITQYSTGQVSVQIDWEIQKERSKRWNPEVQFTSNYGQQNSLLWAPDAAGKYTEPRAIGTRYLTHHL

SEQ ID NO: 830 - protein, 734 aa, Artificial Sequence
  Description of Artificial Sequence: Synthetic polypeptide
MTDGYLPDWLEDNLSEGVREWWALQPGAPKPKANQQHQDNARGLVLPGYKYLGPGNGLDKGEPVNAADAAALEHDKAYDQQLKAGDNPYLKYNHADAEFQQRLQGDTSFGGNLGRAVFQAKKRVLEPLGLVEQAGETAPGKKRPLIESPQQPDSSTGIGKKGKQPAKKKLVFEDETGAGDGPPEGSTSGAMSDDSEMRAAAGGAAVEGGQGADGVGNASGDWHCDSTWSEGHVTTTSTRTWVLPTYNNHLYKRLGESLQSNTYNGFSTPWGYFDFNRFHCHFLPRDWQRLINNNWGVRPKAMRVKIFNIQVKEVTTSNGETTVANNLTSTVQIFADSSYELPYVMDAGQEGSLPPFPNDVFMVPQYGYCGLVTGDTSQQQTDRNAFYCLEYFPSQMLRTGNNFEITYSFEKVPFHSMYAHSQSLDRLMNPLIDQYLWGLQSTTTGTTLNAGTATTNFTKLRPTNFSNFKKNWLPGPSIKQQGFSKTANQNYKIPATGSDSLIKYETHSTLDGRWSALTPGPPMATAGPADSKFSNSQLIFAGPKQNGNTATVPGTLIFTSEEELAATNATDTDMWGNLPGGDQSNSNLPTVDRLTALGAVPGMVWQNRDIYYQGPIWAKIPHTDGHFHPSPLIGGFGLKHPPPQIFIKNTPVPANPATTFSSTPVNSFITQYSTGQVSVQIDWEIQKERSKRWNPEVQFTSNYGQQNSLLWAPDAAGKYTEPRAIGTRYLTHHL

SEQ ID NO: 831 - protein, 734 aa, Artificial Sequence
  Description of Artificial Sequence: Synthetic polypeptide
MTDGYLPDWLEDNLSEGVREWWALQPGAPKPKANQQHQDNARGLVLPGYKYLGPGNGLDEGEPVNAADAAALEHDKAYDQQLKAGDNPYLKYNHADAEFQQRLQGDTSFGGNLGRAVFQAKKRVLEPLGLVEQAGETAPGKKRPLIESPQQPDSSTGIGKKGKQPAKKKLVFEDETGAGDGPPEGSTSGAMSDDSEMRAAAGGAAVEGGQGADGVGNASGDWHCDSTWSEGHVTTTSTRTWVLPTYNNHLYKRLGESLQSNTYNGFSTPWGYFDFNRFHCHFSPRDWQRLINNNWGMRPKAMRVKIFNIQVKEVTTSNGETTVANNLTSTVQIFADSSYELPYVMDAGQEGSLPPFPNDVFMVPQYGYCGLVTGNTSQQQTDRNAFYCLEYFPSQMLRTGNNFEITYSFEKVPFHSMYAHSQSLDRLMNPLIDQYLWGLQSTTTGTTLNAGTATTNFTKLRPTNFSNFKKNWLPGPSIKQQGFSKTANQNYKIPATGSDSLIKYETHSTLDGRWSALTPGPPMATAGPADSKFSNSQLIFAGPKQNGNTATVPGTLIFTSEEELAATNATDTDMWGNLPGGDQSNSNLPTVDRLTALGAVPGMVWQNRDIYYQGPIWAKIPHTDGHFHPSPLIGGFGLKHPPPQIFIKNTPVPANPATTFSSTPVNSFITQYSTGQVSVQIDWEIQKERSKRWNPEVQFTSNYGQQNSLLWAPDAAGKYTEPRAIGTRYLTHHL

SEQ ID NO: 832 - protein, 734 aa, Artificial Sequence
  Description of Artificial Sequence: Synthetic polypeptide
MTDGYLPDWLEDNLSEGVREWWALQPGAPKPKANQQHQDNARGLVLPGYKYLGPGNGLDKGEPVNAADAAALEHDKAYDQQLKAGDNPYLKYNHADAEFQQRLQGDTSFGGNLGRAVFQAKKRVLEPLGLVEQAGETAPGKKRPLIESPQQPDSSTGIGKKGKQPAKKKLVFEDGTGAGDGPPEGSTSGAMSDDSEMRAAAGGAAVEGGQGADGVGNASGDWHCDSTWSEGHVTTTSTRTWVLPTYNNHLYKRLGESLQSNTYNGFPTPWGYFDFNRFHCHFSPRDWQRLINNNWGMRPKAMRVKIFNIQVKEVTTSNGETTAANNLTSTVQIFADSSYELPYVMDAGQEGSLPPFPNDVFMVPQYGYCGLVTGNTSQQQTDRNAFYCLEYFPSQMLRTGNNFEITYSFEKVPFHSMYAHSQSLDRLMNPLIDQYLWGLQSTTTGTTLNAGTATTNFTKLRPTNFSNFKKNWLPGPSIKQQGFSKTANQNYKIPATGSDSLIKYETHSTLDGRWSALTPGPPMATAGPADSKFSNSQLIFAGPKQNGNTATVPGTLIFTSEEELAATNATDTDMWGNLPGGDQSNSNLPTVDRLTALGAVPGMVWQNRDIYYQGPIWAKIPHTDGHFHPSPLIGGFGLKHPPPQIFIKNTPVPANPATTFSSTPVNSFITQYSTGQVSVQIDWEIQKERSKRWNPEVQFTSNYGQQNSLLWAPDAAGKYTEPRAIGTRYLTHHL

SEQ ID NO: 833 - protein, 734 aa, Artificial Sequence
  Description of Artificial Sequence: Synthetic polypeptide
MTDGYLPDWLEDNLSEGVREWWALQPGAPKPKANQQHQDNARGLVLPGYKYLGPGNGLDKGEPVNAADAAALEHDKAYDQQLKAGDNPYLKYNHADAEFQQRLQGDTSFGGNLGRAVFQAKKRVLEPLGLVEQAGETAPGKKRPLIESPQQPDSSTGIGKKGKQPAKKKLVFEDETGAGDGPPEGSTSGAMSDDSEMRAAAGGAAVEGGQGADGVGNASGDWHCDSTWSEGHVTTTSTRTWVLPTYNNHLYKRLGESLQSNTYNGFSTPWGYFDFNRFHCHFSPRDWQRLINNNWGMRPKAMRVKIFNIQVKEVTTSNGETTVANNLTSTVQIFADSSYELPYVMDAGQEGSLPPFPNDVFMVPQYGYRGLVTGNTSQQQTDRNAFYCLEYFPSQMLRTGNNFEITYSFEKVPFHSMYAHSQSLDRLMNPLIDQYLWGLQSTTTGTTLNAGTATTNFTKLRPTNFSNFKKNWLPGPSIKQQGFSKTANQNYKIPATGSDSLIKYETHSTLDGRWSALTPGPPMATAGPADSKFSNSQLIFAGPKQNGNTATVPGTLIFTSEEELAATNATDTDMWGNLPGGDQSNSNLPTVDRLTALGAVPGMVWQNRDIYYQGPIWAKIPHTDGHFHPSPLIGGFGLKHPPPQIFIKNTPVPANPATTFSSTPVNSFITQYSTGQVSVQIDWEIQKERSKRWNPEVQFTSNYGQQNSLLWAPDAAGKYTEPRAIGTRYLTHHL

SEQ ID NO: 834 - protein, 734 aa, Artificial Sequence
  Description of Artificial Sequence: Synthetic polypeptide
MTDGYLPDWLEDNLSEGVREWWALQPGAPKPKANQQHQDNARGLVLQGYKYLGPGNGLDKGEPVNAADAAALEHDKAYDQQLKAGDNPYLKYNHADAEFQQRLQGDTSFGGNLGRAVFQAKKRVLEPLGLVEQAGETAPGKKRPLIESPQQPDSSTGIGKKGKQPAKKKLVFEDETGAGDGPPEGSTSGAMSDDSEMRAAAGGAAVEGGQGADGVGNASGDWHCDSTRSEGHVTTTSTRTWVLPTYNNHLYKRLGESLQSNTYNGFSTPWGYFDFNRFHCHFSPRDWQRLINNNWGMRPKAMRVKIFNIQVKEVTTSNGETTVANNLTSTVQIFADSSYELPYVMDAGQEGSLPPFPNDVFMVPQYGYCGLVTGNTSQQQTDRNAFYCLEYFPSQMLRTGNNFEITYSFEKVPFHSMYAHSQSLDRLMNPLIDQYLWGLQSTTTGTTLNAGTATTNFTKLRPTNFSNFKKNWLPGPSIKQQGFSKTANQNYKIPATGSDSLIKYETHSTLDGRWSARTPGPPMATAGPADSKFSNSQLIFAGPKQNGNTATVPGTLIFTSEEELAATNATDTDMWGNLPGGDQSNSNLPTVDRLTALGAVPGMVWQNRDIYYQGPIWAKIPHTDGHFHPSPLIGGFGLKHPPPQIFIKNTPVPANPATTFSSTPVNSFITQYSTGQVSVQIDWEIQKERSKRWNPEVQFTSNYGQQNSLLWAPDAAGKYTEPRAIGTRYLTHHL

SEQ ID NO: 835 - protein, 724 aa, Artificial Sequence
  Description of Artificial Sequence: Synthetic polypeptide
MSFVDHPPDWLEEVGEGLREFLGLEAGPPKPKPNQQHQDQARGLVLPGYNYLGPGNGLDRGEPVNRADEVAREHDISYNEQLEAGDNPYLKYNHADAEFQERLADDTSFGGNLGKAVFQAKKRVLEPFGLVEEGAKTAPTGKRIDDHFPKRKKARTEEDSKPSTSSDAEAGPSGSQQLQIPAQPASSLGADTMSAGGGGPLGDNNQGADGVGNASGDWHCDSTWMGDRVVTKSTRTWVLPSYNNHQYREIKSGSVDGSNANAYFGYSTPWGYFDFNRFHSHWSPRDWQRLINNYWGFRPRSLRVKIFNIQVKEVTVQDSTTTIANNLTSTVQVFTDDDYQLPYVVGNGTEGCLPAFPPQVFTLPQYGYATLNRDNTENPTERSSFFCLEYFPSKMLRTGNNFEFTYNFEEVPFHSSFAPSQNLFKLANPLVDQYLYRFVSTNNTGGVQFNKNLAGRYANTYKNWFPGPMGRTQGWNLGSGVNRASVSAFATTNRMELEGASYQVPPQPNGMTNNLQGSNTYALENTMIFNSQPANPGTTATYLEGNMLITSESETQPVNRVAYNVGGQMATNNQSSTTAPATGTYNLQEIVPGSVWMERDVYLQGPIWAKIPETEAHFHPSPAMGGFGLKHPPPMMLIKNTPVPGNITSFSDVPVSSFITQYSTGQVTVEMEWELKKENSKRWNPEIQYTNNYNDPQFVDFAPDSTGEYRTTRPIGTRYLTRPL

SEQ ID NO: 836 - protein, 724 aa, Artificial Sequence
  Description of Artificial Sequence: Synthetic polypeptide
MSFVDHPPDWLEEVGEGLREFLGLEAGPPKPKPNQQHQDQARGLVLPGYNYLGPGNGLDRGEPVNRADEVAREHDISYNEQLEAGDNPYLKYNHADAEFQEKLADDTSSGGNLGKAVFQAKKRVLEPFGLVEEGAKTAPTGKRIDDHFPKRKKARTEEDSKPSTSSDAEAGPSGSQQLQIPAQPASSLGADTMSAGGGGPLGDNNQGADGVGNASGDWHCDSTWMGDRVVTKSTRTWVLPSYNNHQYREIKSGSVDGSNANAYFGYSTPWGYFDFNRFHSHWSPRDWQRLINNYWGFRPRSLRVKIFNIQVKEVTVQDSTTTIANNLTSTVQVFTDDDYQLPYVVGNGTEGCLPAFPPQVFTLPQYGYATLNRDNTENPTERSSFFCLEYFPSKMLRTGNNFEFTYNFEEVPFHSSFAPSQNLFKLANPLVDQYLYRFVSTNNTGGVQFNKNLAGRYANTYKNWFPGPMGRTQGWNLGSGVNRASVSAFATTNRMELEGASYQVPPQPNGMTNNLQGSNTYALENTMIFNSQPANPGTTATYLEGNMLITSESETQPVNRVAYNVGGQMATNNQSSTTAPATGTYNLQEIVPGSVWMERDVYLQGPIWAKIPETGAHFHPSPAMGGFGLKHPPPMMLIKNTPVPGNITSFSDVPVSSFITQYSTGQVTVEMEWELKKENSKRWNPEIQYTNNYNDPQFVDFAPDSTGEYRTTRPIGTRYLTRPL

SEQ ID NO: 837 - protein, 724 aa, Artificial Sequence
  Description of Artificial Sequence: Synthetic polypeptide
MSFVDHPPDWLEEVGEGLREFLGLEAGPPKPKPNQQHQDQARGLVLPGYNYLGPGNGLDRGEPVNRADEVAREHDISYNEQLEAGDNPYLKYNHADAEFQEKLADDTSFGGNLGKAVFQAKKRVLEPFGLVEEGAKTAPTGKRIDDHFPKRKKARTEEDSKPSTSSDAEAGPSGSQQLQIPAQPASSLGADTMSAGGGGPLGDNNQGADGVGNASGDWHCDSTWMGDRVVTKSTRTWVLPSYNNHQYREIKSGSVDGSNANAYFGYSTPWGYFDFNRFHSHWSPRDWQRLINNYWGFRPRSLRVKIFNIQVKEVTVQDSTTTIANNLTSTVQVFTDDDYQLPYVVGNGTEGCLPAFPPQVFTLPQYGYATLNRDNTENPTERSSFFCLEYFPSKMLRTGNNFEFTYNFEEVPFHSSFAPSQNLFKLANPLVDQYLYRFVSTNNTGGVQFNKNLAGRYANTYKNWFPGPMGRTQGWNLGSGVNRASVSAFATTNRMELEGASYQVPPQPNGMTNNLQGSNTYALENTMIFNSQPANPGTTATYLEGNMLITSESETQPVNRVAYNVGGQMATNNQSSTTAPATGTYNLQEIVPGSVWMERDVYLQGPIWAKIPETGAHFHPSPAMGGFGLKHPPPMMLIKSTPVPGNITSFSDVPVSSFITQYSTGQVTVEMEWELKKENSKRWNPEIQYTNNYNDPQFVDFAPDSTGEYRTTRPIGTRYLTRPL

SEQ ID NO: 838 - protein, 724 aa, Artificial Sequence
  Description of Artificial Sequence: Synthetic polypeptide
MSFVDHPPDWLEEVGEGLREFLGPEAGPPKPKPNQQHQDQARGLVLPGYNYLGPGNGLDRGEPVNRADEVAREHDISYNEQLEAGDNPYLKYNHADAEFQEKLADDTSFGGNLGKAVFQAKKRVLEPFGLVEEGAKTAPTGKRIDDHFPKRKKVRTEEDSKPSTSSDAEAGPSGSQQLQIPAQPASSLGADTMSAGGGGPLGDNNQGADGVGNASGDWHCDSTWMGDRVVTKSTRTWVPPSYNNHQYREIKSGSVDGSNANAYFGYSTPWGYFDFNRFHSHWSPRDWQRLINNYWGFRPRSLRVKIFNIQVKEVTVQDSTTTIANNLTSTVQVFTDDDYQLPYVVGNGTEGCLPAFPPQVFTLPQYGYATLNRDNTENPTERSSFFCLEYFPSKMLRTGNNFEFTYNFEEVPFHSSFAPSQNLFKLANPLVDQYLYRFVSTNNTGGVQFNKNLAGRYANTYKNWFPGPMGRTQGWNLGSGVNRASVSAFATTNRMELEGASYQVPPQPNGMTNNLQGSNTYALENTMIFNSQPANPGTTATYLEGNMLITSESETQPVNRVACNVGGQMATNNQSSTTAPATGTYNLQEIVPGSVWMERDVYLQGPIWAKIPETGAHFHPSPAMGGFGLKHPPPMMLIKNTPVPGNITSFSDVPVSSFITQYSTGQVTVEMEWELKKENSKRWNPEIQYTNNYNDPQFVDFAPDSTGEYRTTRPIGTRYLTRPL

SEQ ID NO: 839 - protein, 724 aa, Artificial Sequence
  Description of Artificial Sequence: Synthetic polypeptide
MSFVDHPPDWLEEVGEGLREFLGLEAGPPKPKPNQQHQDQARGLVLPGYNYLGPGNGLDRGEPVNRADEVAREHDISYNEQLEAGDNPYLKYNHADAEFQEKLADDTSFGGNLGKAVFQAKKRVLEPFGLVEEGAKTAPTGKRIDDHFPKRKKARTEEDSKPSTSSDAEAGPSGSQQLQIPAQPASSLGADTMSAGGGGPLGDNNQGADGVGNASGDWHCDSTWMGDRVVTKSTRTWVLPSYNNHQYREIKSGSVDGSNANAYFGYSTPWGYFDFNRFHSHWSPRDWQRLINNYWGFRPRSLRVKIFNIQVKEVTVQDSTTTIANNLTSTVQVFTDDDYQLPYVVGNGTEGCLPAFPPQVFTLPQYGYATLNRDNTENPTERSSFFCLEYFPSKMLRTGNNFEFTYNFEEVPFHSSFAPSQNLFKLANPLVDQYLYRFVSTNNTGGVQFNKNLAGRYANTYKNWFPGPMGRTQGWNLGSGVNRASVSAFATTNRMELEGASYQVPPQPNGMTNNLQGSNTYALENTMIFNSQPANPGTTATYLEGNMLITSESETQPVNRVAYNVGGQMATNNQSSTTAPATGAYNLQEIVPGSVWMERDVYLQGPIWAKIPETGAHFHPSPAMGGFGLKHPPPMMLIKNTPVPGNITSFSDVPVSSFITQYSTGQVTVEMEWELKKENSKRWNPEIQYTNNYNDPQFVDFAPDSTGEYRTTRPIGTRYLTRPL

SEQ ID NO: 840 - protein, 724 aa, Artificial Sequence
  Description of Artificial Sequence: Synthetic polypeptide
MSFVDHPPDWLEEVGEGLREFLGLEAGPPKPKPNQQHQDQARGLVLPGYNYLGPGNGLDRGEPVNRADGVAREHDISYNEQLEAGDNPYLKYNHADAEFQEKLADDTSFGGNLGKAVFQAKKRVLEPFGLVEEGAKTAPTGKRIDDHFPKRKKARTEEDSKPSTSSDAEAGPSGSQQLQIPAQPASSLGADTMSAGGGGPLGDNNQGADGVGNASGDWHCDSTWMGDRVVTKSTRTWVLPSYNNHQYREIKSGSVDGSNANAYFGYSTPWGYFDFNRFHSHWSPRDWQRLINNYWGFRPRSLRVKIFNIQVKEVTVQDSTTTIANNLTSTVQAFTDDDYQLPYVVGNGTEGCLPAFPPQVFTLPQYGYATLNRDNTENPTERSSFFCLEYFPSKMLRTGNNFEFTYNFEEVPFHSSFAPSQNLFKLANPLVDQYLYRFVSTNNTGGVQFNKNLAGRYANTYKNWFPGPMGRTQGWNLGSGVNRASVSAFATTNRMELEGASYQVPPQPNGMTNNLQGSNTYALENTMIFNSQPANPGTTATYLEGNMLITSESETQPVNRVAYNVGGQMATNNQSSTTAPATGTYNLQEIVPGSVWMERDVYLQGPIWAKIPETGAHFHPSPAMGGFGLKHPPPMMLIKNTPVPGNITSFSDVPVSSFITQYSTGQVTVEMEWELKKENSKRWNPEIQYTNNYNDPQFVDFAPDSTGEYRTTRPIGTRYLTRPL

SEQ ID NO: 841 - protein, 723 aa, Artificial Sequence
  Description of Artificial Sequence: Synthetic polypeptide
MSFVDHPPDWLEEVGEGLREFLGLEAGPPKPKPNQQHQDQARGLVLPGYNYLGPGNGLDRGEPVNRADEVAREHDISYNEQLEAGDNPYLKYNHADAEFQEKLADDTSFGGNLGKAVFQAKKRVLEPFGLVEEGAKTAPTGKRIDDHFPKRKKARTEEDSKPSTSSDAEAGPSGSQQLQIPAQPASSLGADTMSAGGGGPLGDNNQGADGVGNASGDWHCDSTWMGDRVVTKSTRTWVLPSYNNHQYREIKSGSVDGSNANAYFGYSTPWGYFDFNRFHSHWSPRDWQRLINNYWGFRPRSLRVKIFNIQVKEVTVQDSTTTIANNLTSTVQVFTDDDYQLPYVVGNGTEGCLPAFPPQVFTLPQYGYATLNRDNTENPTERSSFFCLEYFPSKMLRTGNNFEFTYNFEEVPFHSSFAPSQNLFKLANPLVDQYLYRFVSTNNTGGVQFNKNLAGRYANTYKNWFPGPMGRTQGWNLGSGVNRASVSAFATTNRMELEGASYVPPQPNGMTNNLQGSNTYALENTMIFNSQPANPGTTATYLEGNMLITSESETQPVNRVAYNVGGQMATNNQSSTTAPATGTYNLQEIVPGSVWMEGDVYLQGPIWAKIPETGAHFHPSPAMGGFGLKHPPPMMLIKNTPVPGNITSFSDVPVSSFITQYSTGQVTVEMEWELKKENSKRWNPEIQYTNNYNDPQFVDFAPDSTGEYRTTRPIGTRYLTRPL

SEQ ID NO: 842 - protein, 724 aa, Artificial Sequence
  Description of Artificial Sequence: Synthetic polypeptide
MSFVDHPPDWLEEVGEGLREFLGLEAGPPKPKPNQQHQDQARGLVLPGYNYLGPGNGLDRGEPVNRADEVAREHDISYNEQLEAGDNPYLKYNHADAEFQEKLADDTSFGGNLGKAVFQAKKRVLEPFGLVEEGAKTAPTGKRIDDHFPKRKKVRTEEDSKPSTSSDAEAGPSGSQQLQIPAQPASSLGADTMSAGGGGPLGDNNQGADGVGNASGDWHCDSTWMGDRVVTKSTRTWVLPSYNNHQYREIKSGSVDGSNANAYFGYSTPWGYFDFNRFHSHWSPRDWQRLINNYWGFRPRSLRVKIFNIQVKEVTVQDSTTTIANNLTSTVQVFTDDDYQLPYVVGNGTEGCLPAFPPQVFTLPQYGYATLNRDNTENPTERSSFFCLEYFPSKMLRTGNNFEFTYNFEEVPFHSSFAPSQNLFKLANPLVDQYLYRFVSTNNTGGVQFNKNLAGRYANTYKNWFPGPMGRTQGWNLGSGVNRASVSAFATTNRMELEGASYQVPPQPNGMTNNLQGSNTYALENTMIFNSQPANPGTTATYLEGNMLITSESETQPVNRVAYNVGGQMATNNQSSTTAPATGTYNLQEIVPGSVWMERDVYLQGPIWAKIPETGAHFHPSPAMGGFGLKHPPPMMLIKNTPVPGNITSFSDVPVSSFITQYSTGQVTVEMEWELKKENSERWNPEIQYTNNYNDPQFVDFAPDSTGEYRTTRPIGTRYLTRPL

SEQ ID NO: 843 - protein, 724 aa, Artificial Sequence
  Description of Artificial Sequence: Synthetic polypeptide
MSFVDHPPDWLEEVGEGLREFLGLEAGPPKPKPNQQHQDQARGLVLPGYNYLGPGNGLDRGEPVNRADEVAREHDISYSEQLEAGDNPYLKYNHADAEFQEKLADDTSFGGNLGKAVFQAKKRVLEPFGLVEEGAKTAPTGKRIDDHFPKRKKARTEEDSKPSTSSDAEAGPSGSQQLQIPAQPASSLGADTMSAGGGGPLGDNNQGADGVGNASGDWHCDSTWMGDRVVTKSTRTWVLPSYNNHQYREIKSGSVDGSNANAYFGYSTPWGYFDFNRFHSHWSPRDWQRLINNYWGFRPRSLRVKIFNIQVKEVTVQDSTTTIANNLTSTVQVFTDDDYQLPYVVGNGTEGCLPAFPPQVFTLPQYGYATLNRDNTENPTERSSFFCLEYFPSKMLRTGNNFEFTYNFEEVPFHSSFAPSQNLFKLANPLVDQYLYRFVSTNNTGGVQFNKNLAGRYANTYKNWFPGPMGRTQGWNLGSGVNRASVSAFATTNRMELEGASYQVPPQPNGMTNNLQGSNTYALENTMIFNSQPANPGTTATYLEGNMLITSESETQPVNRVAYNVGGQMATNNQSSTTAPATGTYNLQEIVPGSVWMERDVYLQGPIWAKIPETGAHFHPSPAMGGFGLKHPPPMMLIKNTPVPGNITSFSDVPVSSFITQYSTGQVTVEMEWELKKENSKRWNPEIQYTNNYNDPQFVDFAPDSTGEYRTARPIGTRYLTRPL

SEQ ID NO: 844 - protein, 724 aa, Artificial Sequence
  Description of Artificial Sequence: Synthetic polypeptide
MSFVDHPPDWLEEVGEGLREFLGPEAGPPKPKPNQQHQDQARGLVLPGYNYLGPGNGLDRGEPVNRADEVAREHDISYNEQLEAGDNPYLKYNHADAEFQEKLADDTSFGGNLGKAVFQAKKRVLEPFGLVEEGAKTAPTGKRIDDHFPKRKKARTEEDSKPSTSSDAEAGPSGSQQLQIPAQPASSLGADTMSAGGGGPLGDNNQGADGVGNASGDWHCDSTWMGDRVVTKSTRTWVLPSYNNHQYREIKSGSVDGSNANAYFGYSTPWGYFDFNRFHSHWSPRDWQRLINNYWGFRPRSLRVKIFNIQVKEVTVQDSTTTIANNLTSTVQVFTDDDYQLPYVVGNGTEGCLPAFPPQVFTLPQYGYATLNRDNTENPTERSSFFCLEYFPSKMLRTGNNFEFTYNFEEVPFHSSFAPSQNLFKLANPLVDQYLYRFVSTNNTGGVQFNKNLAGRYANTYKNWFPGPMGRTQGWNLGSGVNRASVSAFATTNRMELEGASYQVPPQPNGMTNNLQGSNTYALENTMIFNSQPANPGTTATYLEGNMLITSESETQPVNRVAYNVGGQMTTNNQSSTTAPATGTYNLQEIVPGSVWMERDVYPQGPIWAKIPETGAHFHPSPAMGGFGLKHPPPMMLIKNTPVPGNITSFSDVPVSSFITQYSTGQVTVEMEWELKKENSKRWNPEIQYTNNYNDPQFVDFAPDSTGEYRTTRPIGTRYLTRPL

SEQ ID NO: 845 - protein, 724 aa, Artificial Sequence
  Description of Artificial Sequence: Synthetic polypeptide
MSFVDHPPDWLEEVGEGLREFLGLEAGPPKPKPNQQHQDQARGLVLPGYNYLGPGNGLDRGEPVNRADEVAREHDISYNEQLEAGDNPYLKYNHADAEFQEKLADDTSFGGNLGKAVFQAKKRVLEPFGLVEEGAKTAPTGKRIDDHFPKRKKARTEEDSKPSTSSDAEAGPSGSQQLQIPAQPASSLGADTMSAGGGGPLGDNNQGADGVGNASGDWHCDSTWMGDRVVTKSTRTWVLPSYNNHQYREIKSGSVDGSNANAYFGYSTPWGYFDFNRFHSHWSPRDWQRLINNYWGFRPRSLRVKIFNIQVKEVTVQDSTTTIANNLTSTVQVFTDDDYQLPYVVGNGTEGCLPAFPPQVFTLPQYGYATLNRDNTENPTERSSFLCLEYFPSKMLRTGNNFEFTYNFEEVPFHSSFAPSQNLFKLANPLVDQYLYRFVSTNNTGGVQFNKNLAGRYANTYKNWFPGPMGRTQGWNLGSGVNRASVSAFATTNRMELEGASYQVPPQPNGMTNNLQGSNTYALENTMIFNSQPANPGTTATYLEGNMLITSESETQPVNRVAYNVGGQMATNNQSSTTAPATGTYNLQEIVPGSVWMKRDVYLQGPIWAKIPETGAHFHPSPAMGGFGLKHPPPMMLIKNTPVPGNITSFSDVPVSSFITQYSTGQVTVEMEWELKKENSKRWNPEIQYTNNYNDPQFVDFAPDSTGEYRTTRPIGTRYLTRPL

SEQ ID NO: 846 - protein, 724 aa, Artificial Sequence
  Description of Artificial Sequence: Synthetic polypeptide
MSFVDHPPDWLEEVGEGLREFLGLEAGPPKPKPNQQHQDQARGLVLPGYNYLGPGNGLDRGEPVNRADEVAREHDISYNEQLEAGDNPYLKYNHADAEFQEKLADDTSFGGNLGKAVFQAKKRVLEPFGLVEEGAKTAPTGKRIDDHFPKRKKARTEEDSKPSTPSDAEAGPSGSQQLQIPAQPASSLGADTMSAGGGGPLGDNNQGADGVGNASGDWHCDSTWMGDRVVTKSTRTWVLPSYNNHQYREIKSGSVDGSNANAYFGYSTPWGYFDFNRFHSHWSPRDWQRLINNYWGFRPRSLRVKIFNIQVKEVTVQDSTTTIANNLTSTVQVFTDDDYQLPYVVGNGTEGCLPAFPPQVFTLPQYGYATLNRDNTENPTERSSFFCLEYFPSKMLRTGNNFEFTYNFEEVPFHSSFAPSQNLFKLANPLVDQYLYRFVSTNNTGGVQFNKNLAGRYANTYKNWFPGPMGRTQGWNLGSGVNRASVSAFATTNRMELEGASYQVPPQPNGMTNNLQGSNTYALENTMIFNSQPANPGTTATYLEGNMLITSESETQPVNRVAYNVGGQMATNNQSSTTAPATGTYNLQEIVPGSVWMERDVYLQGPIWAKIPETGAHFHPSPAMGGFGLKHPPPMMLIKNTPVPGNITSFSDVPVSSFITQYSTGQVTVEMEWELKKENSKRWNPEIQYTNNYNDPQFVDFAPDSTGEYRTTRPIGTRYLTRPL

SEQ ID NO: 847 - protein, 724 aa, Artificial Sequence
  Description of Artificial Sequence: Synthetic polypeptide
MSFVDHPPDWLEEVGEGLREFLGLEAGPPKPKPNQQHQDQARGLVLPGYNYLGPGNGLDRGEPVNRADEVAREHDISYNEQLEAGDNPYLKYNHADAEFQEKLADDTSFGGNLGKAVFQAKKRVLEPFGLVEEGAKTAPTGKRIDDHFPKRKKARTEEDSKPSTSSDAEAGPSGSQQLQIPAQPASSLGADTMSAGGGGPLGDNNQGADGVGNASGDWHCDSTWMGDRVVTKSTRTWVLPSYNNHQYREIKSGSVDGSNANAYFGYSTPWGYFDFNRFHSHWSPRDWQRLINNYWGFRPRSLRVKIFNIQVKEVTVQDSTTTIANNLTSTVQVFTDDDYQLPYVVGNGTEGCLPAFPPQVFTLPQYGYATLNRDNTENPTERSSFFCLEYFPSKMLRTGNNFEFTYNFEEVPFHSSFAPSQNLFKLANPLVDQYLYRFVSTNNTGGVQFNKNLAGRYANTHKNWFPGPMGRTQGWNLGSGVNRASVSAFATTNRMELEGASYQVPPQSNGMTNNLRGSNTYALENTMIFNSQPANPGTTATYLEGNMLITSESETQPVNRVAYNVGGQMATNNQSSTTAPATGTYNLQEIVPGSVWMERDVYLQGPIWAKIPETGAHFHPSPAMGGFGLKHPPPMMLIKNTPVPGNITSFSDVPVSSFITQYSTGQVTVEMEWELKKENSKRWNPEIQYTNNYNDPQFVDFAPDSTGEYRTTRPIGTRYLTRPL

SEQ ID NO: 848 - protein, 724 aa, Artificial Sequence
  Description of Artificial Sequence: Synthetic polypeptide
MSFVDHPPDWLEEVGEGLREFLGLEAGPPKPKPNQQHQDQARGLVLPGYNYLGPGNGLDRGEPVNRADEVAREHDISYNEQLEAGDNPYLKYNHADAEFQEKLADDTSFGGNLGKAVFQAKKRVLEPFGLVEEGAKTAPTGKRIDDHFPKRKKARTEEDSKPSTSSDAEAGPSGSQQLQIPAQPASSLGADTMSAGGGGPLGDNNQGADGVGNASGDWHCDSTWMGDRVVTKSTRTWVLPSYNNHQYREIKSGSVDGSNANAYFGYSTPWGYFDFNRFHSHWSPRDWQRLINNYWGFRPRSLRVKIFNIQVKEVTVQDSTTTIANNLTSTVQVFTDDDYQLPYVVGNGTEGCLPAFPPQVFTLPQYGYATLNRDNTENPTERSSFFCLEYFPSKMLRTGNNFEFTYNFEEVPFHSSFAPSQNLFKLANPLVDQYLYRFVSTNNTGGVQFNKNLAGRYANTYKNWFPGPMGRTQGWNLGSGVNRASVSAFATTNRMELEGASYQVPPQPNGMTNNLQGSNTYALENTMIFNSQPANPGTTATYLEGNMLITSESETQPVNRVAYSVGGQMATNNQSSTTAPTTGTYNLQEIVPGSVWMERDVYLQGPIWAKIPETGAHFHPSPAMGGFRLKHPPPMMLIKNTPVPGNITSFSDVPVSSFITQYSTGQVTVEMEWELKKENSKRWNPEIQYTNNYNDPQFVDFAPDSTGEYRTTRPIGTRYLTRPL

SEQ ID NO: 849 - protein, 724 aa, Artificial Sequence
  Description of Artificial Sequence: Synthetic polypeptide
MSFVDHPPDWLEEVGEGLREFLGLEAGPPKPKPNQQHQDQARGLVLPGYNYLGPGNGLDRGEPVNRADEVAREHDISYNEQLEAGDNPYLKYNHADAEFQEKLADDTSFGGNLGKAVFQAKKRVLEPFGLVEEGAKTAPTGKRIDDHFPKRKKARTEEDSKPSTSSDAEAGPSGSQQLQIPAQPASSLGADTMSAGGGGPLGDNNQGADGVGNASGDWHCDSTWMGDRVVTKSTRTWVLPSYNNHQYREIKSGSVDGSNANAYFGYSTPWGYFDFNRFHSHWSPRDWQRLINNYWGFRPRSLRVKIFNIQVKEVTVQDSTTTIANNLTSTVQVFTDDDYQLPYVVGNGTEGCLPAFPPQVFTLPQYGYATLNRDNTENPTERSSFFCLEYFPSKMLRTGNNFEFTYNFEEVPFHSSFAPSQNLFKLANPLVDQYLYRFVSTNNTGGVQFNKNLAGRYANTYKNWFPGPMGRTQGWNLGSGVNRASVSAFAATNRMELEGASYQVPPQPNGMTNNLQGSNTYALENTMIFNSQPANPGTTATYLEGNMLITSESETQPVNRVAYNVGGQMATNNQSSTTAPATGTYNLQEIVPGGVWMERDVYLQGPIWAKIPETGAHFHPSPAMGGFGLKHPPPMMLIKNTPVPGNTTSFSDVPVSSFITQYSTGQVTVEMEWELKKENSKRWNPEIQYTNNYNDPQFVDFAPDSTGEYRTTRPIGTRYLTRPL

SEQ ID NO: 850 - protein, 724 aa, Artificial Sequence
  Description of Artificial Sequence: Synthetic polypeptide
MSFVDHPPDWLEEVGEGLREFLGLEAGPPKPKPNQQHQDQARGLVLPGYNYLGPGNGLDRGEPVNRADEVAREHDISYNEQLEAGDNPYLKYNHADAEFQEKLADDTSFGGNLGKVVFQAKKRVLEPFGLVEEGAKTAPTGKRIDDHFPKRKKARTEEDSKPSTSSDAEAGPSGSQQLQIPAQPASSLGADTMSAGGGGPLGGNNQGADGVGNASGDWHCDSTWMGDRVVTKSTRTWVLPSYNNHQYREIKSGSVDGSNANAYFGYSTPWGYFDFNRFHSHWGPRDWQRLINNYWGFRPRSLRVKIFNIQVKEVTVQDSTTTIANNLTSTVQVFTDDDYQLPYVVGNGTEGCLPAFPPQVFTLPQYGYATLNRDNTENPTERSSFFCLEYFPSKMLRTGNNFEFTYNFEEVPFHSSFAPSQNLFKLANPLVDQYLYRFVSTNNTGGVQFNKNLAGRYANTYKNWFPGPMGRTQGWNLGSGVNRASVSALATTNRMELEGASYQVPPQPNGMTNNLQGSNTYALENTMIFNSQPANPGTTATYLEGNMLITSESETQPVNRVAYNVGGQMATNNQSSTTAPATGTYNLQEIVPGSVWMERDVYLQGPIWAKIPETGAHFHPSPAMGGFGLKHPPPMMLIKNTPVPGNITSFSDVPVSSFITQYSTGQVTVEMEWELKKENSKRWNPEIQYTNNYNDPQFVDFAPDSTGEYRTTRPIGTRYLTRPL

SEQ ID NO: 851 - protein, 723 aa, Artificial Sequence
  Description of Artificial Sequence: Synthetic polypeptide
MSFVDHPPDWLEEVGEGLREFLGLEAGPPKPKPNQQHQDQARGLVLPGYNYLGPGNGLDRGEPVNRADEVAREHDISYNEQLEAGDNPYLKYNHADAEFQEKLADDTSFGGNLGKAVFQAKKRVLEPFGLVEEGAKTAPTGKRIDDHFPKRKKARTEEDSKPSTSSDAEAGPSGSQQLQIPAQPASSLGADTMSAGGGGPLGDNNQGADGVGNASGDWHCDSTWMGDRVVTKSTRTWVLPSYNNHQYREIKSGSVDGSNANAYFGYSTPWGYFDFNRFHSHWSPRDWQRLINNYWGFRPRSLRVKIFNIQVKEVTVQDSTTTIANNLTSTVQVFTDDDYQLPYVVGNGTEGCLPAFPPQVFTLPQYGYATLNRDNTENPTERSSFFCLEYFPSKMLRTGNNFEFTYNFEEVPFHSSFAPSQNLFKLANPLVDQYLYRFVSTNNTGGVQFNKNLAGRYANTYKNWFPGPMGRTQGWNLGSGVNRASVSAFATTNRMELEGASYQVPPQPNGMTNNLQGSNTYALENTMIFNSQPANPGTTATYLEGNMLITSESETQPVNRVAYNVGGQMATNNQSSTTAPATGTYNLQEIVPGSVWMERDVYLQGPIAKIPETGAHFHPSPAMGGFGLKHPPPMMLIKNTPVPGNITSFSDVPVSSFITQYSTGQVTVEMEWELKKENSKRWNPEIQYTNNYNDPQFVDFAPDSTGECRTTRPIGTRYLTRPL

SEQ ID NO: 852 - protein, 724 aa, Artificial Sequence
  Description of Artificial Sequence: Synthetic polypeptide
MSFVDHPPDWLEEVGEGLREFLGLEAGPPKPKPNQQHQDQARGLVLPGYNYLGPGNGLDRGEPVNRADEVAREHDISYNEQLEAGDNPYLKYNHADAEFQEKLADDTSFGGNLGKAVFQAKKRVLEPFGLVEEGAKTAPTGKRIDDHFPKRKKARTEEDSKPSTSSDAEAGPSGSQQLQIPAQPASSLGADTMSAGGGGPLGDNNQGADGVGNASGDWHCDSTWMGDRVVTKSTRTWVLPSYNNHQYREIKSGSVDGSNANAYFGYSTPWGYFDFNRFHSHWSPRDWQRLINNYWGFRPRSLRVKILNIQVKEVTVQDSTTTIANNLTSTVQVFTDDDYQLPYVVGNGTEGCLPAFPPQVFTLPQYGYATLNRDNTENPTERSSFFCLEYFPSKMLRTGNNFEFTYNFEEVPFHSSFAPSQNLFKLANPLVGQYLYRFVSTNNTGGVQFNENLAGRYANTYKNWFPGPMGRTQGWNLGSGVNRASVSAFATTNRMELEGASYQVPPQPNGMTNNLQGSNTYALENTMIFNSQPANPGTTATYLEGNMLITSESETQPVNRVAYNVGGQMATNNQSSTTAPATGTYNLQEIVPGSVWMERDVYLQGPIWAKIPETGAHFHPSPAMGGFGLKHPPPMMLIKNTPVPGNITSFSDVPVSSFITQYSTGQATVEMEWELKKENSKRWNPEIQYTNNYNDPQFVDFAPDSTGEYRTTRPIGTRYLTRPL

SEQ ID NO: 853 - protein, 724 aa, Artificial Sequence
  Description of Artificial Sequence: Synthetic polypeptide
MSFVDHPPDWLEEVGEGLREFLGLEAGPPKPKPNQQHQDQARGLVLPGYNYLGPGNGLDRGEPVNRADEVAREHDISYNEQLEAGDNPYLKYNHADAEFQEKLADDTSFGGNLGKAVFQAKKRVLEPFGLVEEGAKTAPTGKRIDDHFPKRKKARTEEDSKPSTSSDAEAGPSGSQQLQIPAQPASSLGADTMSAGGGGPLGDNNQGADGVGNASGDWHCDSTWMGDRVVTKSTRTWVLPSYNNHQYREIKSGSVDGSNANAYFGYSTPWGYFDFNRFHSHWSPRDWQRLINNYWGFRPRSLRVKIFNIQVKEVTVQDSTTIIANNLTSTVQVFTDDDYQLPYVVGNGTEGCLPAFPPQVFTLPQYGYATLNRDNTENPTERSSFFCLEYFPSKMLRTGNNFEFTYNFEEVPFHSSFAPSQNLFKLANPLVDQYLYRFVSTNNTGGVQFNKNLAGRYANTYKNWFPGPMGRTQGWNLGSGVNRASVSAFATTNRMELEGASYQVPPQPNGMTNNLQGSNTYALENTMIFNSQPANPGTTATYLEGNMLITSESETQPVNRVAYNVGGQMATNNQSSTTAPATGTYNLQEIVPGSVWMERDVYLQGPIWAKIPETGAHFHPSPAMGGFGLKHPPPMMLIKNTPVPGNITSFSDVPVSSFITQYSTGQVTVEMEWELKKENSKRWNPEIQYTNNYNDPQFVDFAPDSTGEYRTTRPIGTRYLTRPL

SEQ ID NO: 854 - protein, 724 aa, Artificial Sequence
  Description of Artificial Sequence: Synthetic polypeptide
MSFVDHPPDWLEEVGEGLREFLGLEAGPPKPKPNQQHQDQARGLVLPGYNYLGPGNGLDRGEPVNRADEVAREHDISYNEQLEAGDNPYLKYNHADAEFQEKLADDTSFGGNLGKAVFQAKKRVLEPFGLVEEGAKTAPTGKRIDDHFPKRKKARTEEDSKPSTSSDAEAGPSGSQQLQIPAQPASSLGADTMSAGGGGPLGDNNQGADGVGNASGDWHCDSTWMGDRVVTKSTRTWVLPSYNNHQYREIKSGSVDGSNANAYFGYSTPWGYFDFNRFHSHWSPRDWQRLINNYWGFRPRSLRVKIFNIQVKEVTVQDSTTTIANNLTSTVQVFTDDDYQLPYVVGNGTEGCLPAFPPQVFTLPQYGYATLNRDNTENPTERSSFFCLEYFPSKMLRTGNNFEFTYNFEEVPFHSSFAPSQNLFKLANPLVDQYLYRFVSTNNTGGVQFNKNLAGRYANTYKNWFPGPMGRTQGWNLGSGVNRASVSAFATTNRMELEGASYQVPPQPNGMTNNLQGSNTYALENTMIFNSQPANPGTTATYLEGNMLITSESETQPVNRVAYNVGGQMATNNQSSTTAPATGTYNLQEIVPGSVWMERDVYLQGPIWAKIPETGAHFHPSPAMGGFGLKHPPPMMLIKNTPVPGNITSLSDVPVSSFITQYSTGQVTVEMEWELKKENSKRWNPEIQYTNNYNDPQFVDFAPDSTGEYRTTRPIGTRYLTRPL

SEQ ID NO: 855 - protein, 724 aa, Artificial Sequence
  Description of Artificial Sequence: Synthetic polypeptide
MSFVDHPPDWLEEVGEGLREFLGLEAGPPKPKPNQQHQDQARGLVLPGYNYLGPGNGLDRGEPANRADEVAREHDISYNEQLEAGDNPYLKYNHAGAEFQEKLADDTSFGGNLGKAVFQAKKRVLEPFGLVEEGAKTAPTGKRIDDHFPKRKKARTEEDSKPSTSSDAEAGPSGSQQLQIPAQPASSLGADTMSAGGGGPLGDNNQGADGVGNASGDWHCDSTWMGDRVVTKSTRTWVLPGYNNHQYREIKSGSVDGSNANAYFGYSTPWGYFDFNRFHSHWSPRDWQRLINNYWGFRPRSLRVKIFNIQVKEVTVQDSTTTIANNLTSTVQVFTDDDYQLPYVVGNGTEGCLPAFPPQVFTLPQYGYATLNRDNTENPTERSSFFCLEYFPSKMLRTGNNFEFTYNFEEVPFHSSFAPSQNLFKLANPLVDQYLYRFVSTNNTGGVQFNKNLAGRYANTYKNWFPGPMGRTQGWNLGSGVNRASVSAFATTNRMELEGASYQVPPQPNGMTNNLQGSNTYALENTMIFNSQPANPGTTATYLEGNMLITSESETQPVNRVAYNVGGQMATNNQSSTTAPATGTYNLQEIVPGSVWMERDVYLQGPIWAKIPETGAHFHPSPAMGGFGLKHPPPMMLIKNTPVPGNITSFSDVPVSSFITQYSTGQVTVEMEWELKKENSKRWNPEIQYTNNYNDPQFVDFAPDSTGEYRTTRPIGTRYLTRPL

SEQ ID NO: 856 - protein, 724 aa, Artificial Sequence
  Description of Artificial Sequence: Synthetic polypeptide
MSFVDHPPDWLEEVGEGLREFLGLEAGPPKPKPNQQHQDQARGLVLPGYNYLGPGNGLDRGEPVNRADEVAREHDISYNEQLEAGDNPYLKYNHADAEFQEKLADDTSFGGNLGKAVFQAKKRVLEPFGLVEEGAKTAPTGKRIDDHFPKRKKARTEEDSKPPTSSDAEAGPSGSQQLQIPAQPASSLGADTMSAGGGGPLGDNNQGADGVGNASGDWHCDSTWMGDRVVTKSTRTWVLPSYNNHQYREIKSGSVDGSNANAYFGYSTPWGYFDFNRFHSHWSPRDWQRLINNYWGFRPRSLRVKIFNIQVKEVTVQDSATTIANNLTSTVQVFTDDDYQLPYVVGNGTEGCLPAFPPQVFTLPQYGYATLNRDNTENPTERSSFFCLEYFPSKMLRTGNNFEFTYNFEEVPFHSSFAPSQNLFKLANPLVDQYLYRFVSTNNTGGVQFNKNLAGRYANTYKNWFPGPMGRTQGWNLGSGVNRASVSAFATTNRMELEGASYQVPPQPNGMTNNLQGSNTYALENTMIFNSQPANPGTTATYLEGNMLITSESETQPVNRVAYNVGGQMATNNQSSTTAPATGTYNLQEIVPGSVWMERDVYLQGPIWAKIPETGAHFHPSPAMGGFGLKHPPPMMLIKNTPVPGNITSFSDVPVSSFITQYSTGQVTVEMEWELKKENSKRWNPEIQYTNNYNDPQFVDFAPDSTGEYRTTRPIGTRYLTRPL

SEQ ID NO: 857 - protein, 724 aa, Artificial Sequence
  Description of Artificial Sequence: Synthetic polypeptide
MSFVDHPPDWLEEVGEGLREFLGLEAGPPKPKPNQQHQDQARGLVLPGYNYLGPGNGLDRGEPVNRADEVAREHDISYNEQLEAGDNPYLKYNHADAEFQEKLADDTSFGGNLGKAVFQAKKRVLEPFGLVEEGAKTAPTGKRIDDHFPKRKKARTEEDSKPSTSSDAEAGPSGSQQPQIPAQPASSLGADTMSAGGGGPLGDNNQGADGVGNASGDWHCDSTWMGDRVVTKSTRTWVLPSYNNHQYREIKSGSVDGSNANAYFGYSTPWGYFDFNRFHSHWSPRDWQRLINNYWGFRPRSLRVKIFNIQVKEVTVQDSTTTIANNLTSTVQVFTDDDYQLPYVVGNGTEGCLPAFPPQVFTLPQYGYATLNRDNTENPTERSSFFCLEYFPSKMLRTGNNFEFTYNFEEVPFHSSFAPSQNLFKLANPLVDQYLYRFVSTNNTGGVQFNKNLAGRYANTYKNWFPGPMGRTQGWNLGSGVNRASVSAFATTNRMELEGASYQVPPQPNGMTNNLQGSNTYALENTMIFNSQPANPGTTATYLEGNMLITSESETQPVNRVAYNVGGQMATNNQSSTTAPATGTYNLQEIVPGSVWMERDVYLQGPIWAKIPETGAHFHPSPAMGGFGLKHPPPMMLIKNTPAPGNITSFSDVPVSSFITQYSTGQVTVEMEWELKKENSKRWNPEIQYTNNYNDPQFVDFAPDSTGEYRTTRPIGTRYLTRPL

SEQ ID NO: 858 - protein, 724 aa, Artificial Sequence
  Description of Artificial Sequence: Synthetic polypeptide
MSFVDHPPDWLEEVGEGLREFLGLEAGPPKPKPNQQHQDQARGLVLPGYNYLGPGNGLDRGEPVNRADEVAREHDISYNEQLEAGDNPYLKYNHADAEFQEKLADDTSFGGNLGKAVFQAKKRVLEPFGLVEEGAKTAPTGKRIDDHFPKRKKARTEEDSKPPTSSDAEAGPSGSQQLQIPAQPASSLGADTMSAGGGGPLGDNNQGADGVGNASGDWHCDSTWMGDRVVTKSTRTWVLPSYNNHQYREIKSGSVDGSNANAYFGYSTPWGYFDFNRFHSHWSPRDWQRLINNYWGFRPRSLRVKIFNIQVKEVTVQDSTTTIANNLTSTVQVFTDDDYQLPYVVGNGTEGCLPAFPPQVFTLPQYGYATLNRDNTENPTERSSFFCLEYFPSKMLRTGNNFEFTYNFEEVPFHSSFAPSQNLFKLANPLVDQYLYRFVSTNNTGGVQFNKNLAGRYANTYKNWFPGPMGRTQGWNLGSGVNRASVSAFATTNRMELEGASYQVPPQPNGMTNNLQGSNTYALENTMIFNSQPANPGTTATYLEGNMLITSESETQPVNRVAYNVGGQMATNNQSSTTAPATGTYNLQEIVPGSVWMERDVYLQGPIWAKIPETGAHFHPSPAMGGFGLKHPPPMMLIKNTPVPGNITSFSDVPVSSFITQYSTGQVTVEMEWELKKENSKRWNPEIQYTNNYNDPQFVDFAPDSTGEYRTTRPIGTRYLTRPL

SEQ ID NO: 859 - protein, 724 aa, Artificial Sequence
  Description of Artificial Sequence: Synthetic polypeptide
MSFVDHPPDWLEEVGEGLREFLGLEAGPPKPKPNQQHQDQARGLVLPGYNYLGPGNGLDRGEPVNRADEVAREHDISYNEQLEAGDNPYLKYNHADAEFQEKLADDTSFGGNLGKAVFQAKKRVLEPFGLVEEGAKTAPTGKRIDDHFPKRKKARTEEDSKPPTSSDAEAGPSGSQQLQIPAQPASSLGADTMSAGGGGPLGDNNQGADGVGNASGDWHCDSTWMGDRVVTKSTRTWVPPSYNNHQYREIKSGSVDGSNANAYFGYSTPWGYFDFNRFHSHWSPRDWQRLINNYWGFRPRSLRVKIFNIQVKEVTVQDSTTTIANNLTSTVQVFTDDDYQLPYVVGNGTEGCLPAFPPQVFTLPQYGYATLNRDNTENPTERSSFFCLEYFPSKMLRTGNNFEFTYNFEEVPFHSSFAPSQNLFKLANPLVDQYLYRFVSTNNTGGVQFNKNLAGRYANTYKNWFPGPMGRTQGWNLGSGVNRASVSAFATTNRMELEGASYQVPPQPNGMTNNLQGSNTYALENTMIFNSQPANPGTTATYLEGNMLITSESETQPVNRVAYNVGGQMATNNQSSTTAPATGTYNLQEIVPGSVWMERDVYLQGPIWAKIPETGAHFHPSPAMGGFGLKHPPPMMLIKNTPVPGNITSFSDVPVSSFITQYSTGQVAVEMEWELKKENSKRWNPEIQYTNNYNDPQFVDFAPDSTGEYRTTRPIGTRYLTRPL

SEQ ID NO: 860 - protein, 724 aa, Artificial Sequence
  Description of Artificial Sequence: Synthetic polypeptide
MSFVDHPPDWLEEVGEGLREFLGLEAGPPKPKPNQQHQDQARGLVLPGYNYLGPGNGLDRGEPVNRADEVAREHDISYNEQLEAGDNPYLKYNHADAEFQEKLADDTSFGGNLGKAVFQAKKRVLEPFGLVEEGAKTAPTGKRIDDHFPKRKKARTEEDSKPSTSSDAEAGPSGSQQLQIPAQPASSLGADTMSAGGGGPLGDNNQGADGVGNASGDWHCDSTWMGDRVVTKSTRTWVLPSYNNHQYREIKSGSVDGSNANAYFGYSTPWGYFDFNRFHSHWSPRDWQRLINNYWGFRPRSLRVKIFNIQVKEVTVQDSTTTIANNLTSTVQVFTDDDYQLPYVVGNGTEGCLPAFPPQVFTLPQYGYATLNRDNTENPTERSSFFCLEYFPSKMLRTGNNFEFTYNFEEVPFHSSFAPSQNLFKLANPLVDQYLYRFVSTNNTGGVQFNKNLAGRYANTYKNWFPGPMGRTQGWNLGSGVNRASVSAFATTNRMELEGASYQVPPQPNGMTNNLQGSNTYALENTMIFNSQPANPGTTATYLEGNMLITSESETQPVNRVAYNVGGQMATNNQSSTTAPATGTYNLQEIVPGSVWMERDVYLQGPIWAKIPETGAHFHPSPAMGGFGLKHPPPMMLIKNTPAPGNITSFSDVPVSSFITQYSTGQVTVEMEWELKKENSKRWNPEIQYTNNYNDPQFVDFAPDSTGEYRTTRPIGTRYLTRPL

SEQ ID NO: 861 - protein, 724 aa, Artificial Sequence
  Description of Artificial Sequence: Synthetic polypeptide
MSFVDHPPDWLEEVGEGLREFLGLEAGPPKPKPNQQHQDQARGLVLPGYNYLGPGNGLDRGEPVNRADEVAREHDISYNEQLEAGDNPYLKYNHADAEFQEKLADDTSFGGNLGKAVFQAKKRVLEPFGLAEEGAKTAPTGKRIDDHFPKRKKARTEEDSKPSTSSDAEAGPSGSQQLQIPAQPASSLGADTMSAGGGGPLGDNNQGADGVGNASGDWHCDSTWMGDRVVTKSTRTWVLPSYNNHQYREIKSGSVDGSNANAYFGYSTPWGYFDFNRFHSHWSPRDWQRLINNYWGFRPRSLRAKIFNIQVKEVTVQDSTTTIANNLTSTVQVFTDDDYQLPYVVGNGTEGCLPAFPPQVFTLPQYGYATLNRDNTENPTERSSFFCLEYFPSKMLRTGNNLEFTYNFEEVPFHSSFAPSQNLFKLANPLVDQYLYRFVSTNNTGGVQFNKNLAGRYANTYKNWFPGPMGRTQGWNLGSGVNRASVSAFATTNRMELEGASYQVPPQPNGMTNNLQGSNTYALENTMIFNSQPANPGTTATYLEGNMLITSESETQPVNRVVHNVGGQMATNNQSSTTAPATGTYNLQEIVPGSVWMERDVYLQGPIWAKIPETGAHFHPSPAMGGFGLKHPPPMMLIKNTPVPGNITSFSDVPVSSFITQYSTGQVTVEMEWELKKENSKRWNPEIQYTNNYNDPQFVDFAPDSTGEYRTTRPIGTRYLTRPL

SEQ ID NO: 862 - protein, 724 aa, Artificial Sequence
  Description of Artificial Sequence: Synthetic polypeptide
MSFVDHPPDWLEEVGEGLREFLGLEAGPPKPKPNQQHQDQARGLVLPGYNYLGPGNGLDRGEPVNRADEVAREHDISYNEQLEAGDNPYLKYNHADAEFQEKLADDTSFGGNLGKAVFQAKKRVLEPFGLVEEGAKTAPTGKRIDDHFPKRKKARTEEDSKPSTSSDAEAGPSGSQQLQIPAQPASSLGADTMSAGGGGPLGDNNQGADGVGNASGDWHCDSTWMGDRVVTKSTRTWVLPSYNNHQYREIKSGSVDGGNANAYFGYSTPWGYFDFNRFHSHWSPRDWQRLINNYWGFRPRSLRVKIFNIQVKEVTVQDSTTTIANNLTSTVQVFTDDDYQLPYVVGNGTEGCLPAFPPQVFTLPQYGYATLNRDNTENPTERSSFFCLEYFPSKMLRTGNNFEFTYNFEEVPFHSSFAPSQNLFKLANPLVDQYLYRFVSTNNTGGVQFNKNLAGRYANTYKNWFPGPMGRTQGWNLGSGVNRASVSAFATTNRMELEGASYQVPPQPNGMTNNLQGSNTYALENTMIFNSQPANPGTTATYLEGNMLITSESETQPVNRVAYNVGGQMATNNQSSTTAPATGTYNLQEIVPGSVWMERDVYLQGPIWAKIPETGAHFHPSPAMGGFGLKHPPPMMLIKNTPAPGNITSFSDVPVSSFITQYSTGQVTVEMEWELKKGNSKRWNPEIQYTNNYNDPQFVDFAPDSTGEYRTTRPIGTRYLTRPL

SEQ ID NO: 863 - protein, 724 aa, Artificial Sequence
  Description of Artificial Sequence: Synthetic polypeptide
MSFVDHPPDWLEEVGEGLREFLGLEAGPPKPKPNQQHQDQARGLVLPGYNYLGPGNGLDRGEPVNRADEVAREHDISYNEQLEAGDNPYLKYNHADAEFQEKLADDTSFGGNLGKAVFQAKKRVLEPFGLVEEGAKTAPTGKRIDDHFPKRKKARTEEDSKPSTSSDAEAGPSGSQQLQIPAQPASSLGADTMSAGGGGPLGDNNQGADGVGNASGDWHCDSTWMGDRVVTKSTRTWVLPSYNNHQYREIKSGSVDGSNANAYFGYSTPWGYFDFNRFHSHWSPRDWQRLINNYWGFRPRSLRVKIFNIQVKEVTVQDSTTTIANNLTSTVQVFTDDDYQLPYVVGNGTEGCLPAFPPQVFTLPQYGYATLNRDNTENPTERSSFFCLEYFPSKMLRTGNNFEFTYNFEEVPFHSSFAPSQNLFKLANPLVDQYLYRFVSTNNTGGVQFNKNLAGRYANTYKNWFPGPMGRTQGWNLGSGVNRASVSAFATTNRMELEGASYQVPPQPNGMTNNLQGSNTYALENTMIFNSQPANPGTTATYLEGNMLITSESETQPVNRVAYNVGGQMATNNQSSTTAPATGTYNLQEIVPGSVWMERDVYLQGPIWAKIPETGVHFHPSPAMGGFGLKHPPPMMLIKNTPVPGNITSFSDVPVSSFITQYSTGQVTVEMEWELKKENSKRWNPEIQYTNNYNDPQFVDFAPDSTGEYRTTRPIGTRYLTRPL

SEQ ID NO: 864 - protein, 724 aa, Artificial Sequence
  Description of Artificial Sequence: Synthetic polypeptide
  MOD_RES (551)..(551): Xaa = any amino acid
MSFVDHPPDWLEEVGEGLREFLGLEAGPPKPKPNQQHQDQARGLVLPGYNYLGPGNGLDRGEPVNRADEVAREHDISYNEQLEAGDNPYLKYNHADAEFQEKLADDTSFGGNLGKAVFQAKKRVLEPFGLVEEGAKTAPTGKRIDDHFPKRKKARTEEDSKPSTSSDAEAGPSGSQQLQIPAQPASSLGADTMSAGGGGPLGDNNQGADGVGNASGDWHCDSTWMGDRVVTKSTRTWVLPSYNNHQYREIKSGSVDGSNANAYFGYSTPWGYFDFNRFHSHWSPRDWQRLINNYWGFRPRSLRVKIFNIQVKEVTVQDSTTTIANNLTSTVQVFTDDDYQLPYVVGNGTEGCLPAFPPQVFTLPQYGYATLNRDNTENPTERSSFFCLEYFPSKMLRTGNNFEFTYNFEEVPFHSSFAPSQNLFKLANPLVDQYLYRFVSTNNTGGVQFNKNLAGRYANTYKNWFPGPMGRTQGWNLGSGVNRASVSAFATTNRMELEGASYQVPPQPNGMTNNLQGSNTYALENTMIFNSQPANPGTTATYLEGSMLITXESETQPVNRVAYNVGGQMATNNQSSTTAPATGTYNLQEIVPGSVWMERDVYLQGPIWAKIPETGAHFHPSPAMGGFGLKHPPPMMLIKNTPVPGNITSFSDVPVSSFITQYSTGQVTVEMEWELKKENSKRWNPEIQYTNNYNDPQFVDFAPDSTGEYRTTRPIGTRYLTRPL

SEQ ID NO: 865 - protein, 736 aa, Artificial Sequence; identical to SEQ ID NO: 39
  Description of Artificial Sequence: Synthetic polypeptide

SEQ ID NO: 866 - protein, 734 aa, Artificial Sequence; identical to SEQ ID NO: 57
  Description of Artificial Sequence: Synthetic polypeptide

SEQ ID NO: 867 - protein, 723 aa, Artificial Sequence
  Description of Artificial Sequence: Synthetic polypeptide
MSFVDHPPDWLEEVGEGLREFLGLEAGPPKPKPNQQHQDQARGLVLPGYNYLGPGNGLDRGEPVNRADEVAREHDISYNEQLEAGDNPYLKYNHADAEFQEKLADDTSFGGNLGKAVFQAKKRVLEPFGLVEEGAKTAPTGKRIDDHFPKRKKARTEEDSKPSTSSDAEAGPSGSQQLQIPAQPASSLGADTMSAGGGPLGDNNQGADGVGNASGDWHCDSTWMGDRVVTKSTRTWVLPSYNNHQYREIKSGSVDGSNANAYFGYSTPWGYFDFNRFHSHWSPRDWQRLINNYWGFRPRSLRVKIFNIQVKEVTVQDSTTTIANNLTSTVQVFTDDDYQLPYVVGNGTEGCLPAFPPQVFTLPQYGYATLNRDNTENPTERSSFFCLEYFPSKMLRTGNNFEFTYNFEEVPFHSSFAPSQNLFKLANPLVDQYLYRFVSTNNTGGVQFNKNLAGRYANTYKNWFPGPMGRTQGWNLGSGVNRASVSAFATTNRMELEGASYQVPPQPNGMTNNLQGSNTYALENTMIFNSQPANPGTTATYLEGNMLITSESETQPVNRVAYNVGGQMATNNQSSTTAPATGTYNLQEIVPGSVWMERDVYLQGPIWAKIPETGAHFHPSPAMGGFGLKHPPPMMLIKNTPVPGNITSFSDVPVSSFITQYSTGQVTVEMEWELKKENSKRWNPEIQYTNNYNDPQFVDFAPDSTGEYRTTRPIGTRYLTRPL

SEQ ID NO: 868 - protein, 743 aa, Artificial Sequence
  Description of Artificial Sequence: Synthetic polypeptide
MAADGYLPDWLEDNLSEGIREWWALKPGAPQPKANQQHQDNARGLVLPGYKYLGPGNGLDKGEPVNAADAAALEHDKAYDQQLKAGDNPYLKYNHADAEFQERLKEDTSFGGNLGRAVFQAKKRLLEPLGLVEEAAKTAPGKKRPVEQSPQEPDSSAGIGKSGAQPAKKRLNFGQTGDTESVPDPQPIGEPPAAPSGVGSLTMASGGGAPVADNNEGADGVGSSSGNWHCDSQWLGDRVITTSTRTWALPTYNNHLYKQISNSTSGGSSNDNAYFGYSTPWGYFDFNRFHCHFSPRDWQRLINNNWGFRPKRLNFKLFNIQVKEVTDNNGVKTIANNLTSTVQVFTDSDYQLPYVLGSAHEGCLPPFPADVFMIPQYGYLTLNDGSQAVGRSSFYCLEYFPSQMLRTGNNFQFSYEFENVPFHSSYAHSQSLDRLMNPLIDQYLYYLSRTINGSGQNQQTLKFSVAGPSNMAVQGRNYIPGPSYRQQRVSTTVTQNNNSEFAWPGASSWALNGRNSLMNPGPAMASHKEGEDRFFPLSGSLIFGKQGTGRDNVDADKVMITNEEEIKTTNPVATESYGQVATNHQSAQTLAVPFKAQAQTGWVQNQGILPGMVWQDRDVYLQGPIWAKIPHTDGNFHPSPLMGGFGMKHPPPQILIKNTPVPADPPTAFNKDKLNSFITQYSTGQVSVEIEWELQKENSKRWNPEIQYTSNYYKSNNVEFAVNTEGVYSEPRPIGTRYLTRNL

SEQ ID NO: 869 - DNA, 2232 bp, Artificial Sequence
  Description of Artificial Sequence: Synthetic polynucleotide
atggctgccgatggttatcttccagattggctcgaggacaaccttagtgaaggaattcgcgagtggtgggctttgaaacctggagcccctcaacccaaggcaaatcaacaacatcaagacaacgctcgaggtcttgtgcttccgggttacaaataccttggacccggcaacggactcgacaagggggagccggtcaacgcagcagacgcggcggccctcgagcacgacaaggcctacgaccagcagctcaaggccggagacaacccgtacctcaagtacaaccacgccgacgccgagttccaggagcggctcaaagaagatacgtcttttgggggcaacctcgggcgagcagtcttccaggccaaaaagaggcttcttgaacctcttggtctggttgaggaagcggctaagacggctcctggaaagaagaggcctgtagagcagtctcctcaggaaccggactcctccgcgggtattggcaaatcgggtgcacagcccgctaaaaagagactcaatttcggtcagactggcgacacagagtcagtcccagaccctcaaccaatcggagaacctcccgcagccccctcaggtgtgggatctcttacaatggcttcaggtggtggcgcaccagtggcagacaataacgaaggtgccgatggagtgggtagttcctcgggaaattggcattgcgattcccaatggctgggggacagagtcatcaccaccagcacccgaacctgggccctgcccacctacaacaatcacctctacaagcaaatctccaacagcacatctggaggatcttcaaatgacaacgcctacttcggctacagcaccccctgggggtattttgacttcaacagattccactgccacttctcaccacgtgactggcagcgactcatcaacaacaactggggattccggcctaagcgactcaacttcaagctcttcaacattcaggtcaaagaggttacggacaacaatggagtcaagaccatcgccaataaccttaccagcacggtccaggtcttcacggactcagactatcagctcccgtacgtgctcgggtcggctcacgagggctgcctcccgccgttcccagcggacgttttcatgattcctcagtacgggtatctgacgcttaatgatggaagccaggccgtgggtcgttcgtccttttactgcctggaatatttcccgtcgcaaatgctaagaacgggtaacaacttccagttcagctacgagtttgagaacgtacctttccatagcagctacgctcacagccaaagcctggaccgactaatgaatccactcatcgaccaatacttgtactatctctctagaactattaacggttctggacagaatcaacaaacgctaaaattcagtgtggccggacccagcaacatggctgtccagggaagaaactacatacctggacccagctaccgacaacaacgtgtctcaaccactgtgactcaaaacaacaacagcgaatttgcttggcctggagcttcttcttgggctctcaatggacgtaatagcttgatgaatcctggacctgctatggccagccacaaagaaggagaggaccgtttctttcctttgtctggatctttaatttttggcaaacaaggtaccggcagagacaacgtggatgcggacaaagtcatgataaccaacgaagaagaaattaaaactactaacccggtagcaacggagtcctatggacaagtggccacaaaccaccagagtgcccaaactttggcggtgccttttaaggcacaggcgcagaccggttgggttcaaaaccaaggaatacttccgggtatggtttggcaggacagagatgtgtacctgcaaggacccatttgggccaaaattcctcacacggacggcaactttcacccttctccgctgatgggagggtttggaatgaagcacccgcctcctcagatcctcatcaaaaacacacctgtacctgcggatcctccaacggccttcaacaaggacaagctgaactctttcatcacccagtattctactggccaagtcagcgtggagatcgagtgggagctgcagaaggaaaacagcaagcgctggaacccggagatccagtacacttccaactattacaagtctaataatgttgaatttgctgttaatactgaaggtgtatatagtgaaccccgccccattggcaccagatacctgactcgtaatctgtaa

SEQ ID NO: 870 - protein, 736 aa, Artificial Sequence
  Description of Artificial Sequence: Synthetic polypeptide
MAADGYLPDWLEDNLSEGIREWWALKPGAPQPKANQQHQDNARGLVLPGYKYLGPGNGLDKGEPVNAADAAALEHDKAYDQQLKAGDNPYLKYNHADAEFQERLKEDTSFGGNLGRAVFQAKKRLLEPLGLVEEAAKTAPGKKRPVEQSPQEPDSSAGIGKSGAQPAKKRLNFGQTGDTESVPDPQPIGEPPAAPSGVGSLTMASGGGAPVADNNEGADGVGSSSGNWHCDSQWLGDRVITTSTRTWALPTYNNHLYKQISNSTSGGSSNDNAYFGYSTPWGYFDFNRFHCHFSPRDWQRLINNNWGFRPKRLNFKLFNIQVKEVTDNNGVKTIANNLTSTVQVFTDSDYQLPYVLGSAHEGCLPPFPADVFMIPQYGYLTLNDGSQAVGRSSFYCLEYFPSQMLRTGNNFQFSYEFENVPFHSSYAHSQSLDRLMNPLIDQYLYYLSRTIQSSQTPRQTLKFSVAGPSNMAVQGRNYIPGPSYRQQRVSTTVTQNNNSEFAWPGASSWALNGRNSLMNPGPAMASHKEGEDRFFPLSGSLIFGKQGTGRDNVDADKVMITNEEEIKTTNPVATESYGQVATNHQSAQAQAQTGWVQNQGILPGMVWQDRDVYLQGPIWAKIPHTDGNFHPSPLMGGFGMKHPPPQILIKNTPVPADPPTAFNKDKLNSFITQYSTGQVSVEIEWELQKENSKRWNPEIQYTSNYYKSNNVEFAVNTEGVYSEPRPIGTRYLTRNL

SEQ ID NO: 871 - protein, 743 aa, Artificial Sequence
  Description of Artificial Sequence: Synthetic polypeptide
MAADGYLPDWLEDNLSEGIREWWALKPGAPQPKANQQHQDNARGLVLPGYKYLGPGNGLDKGEPVNAADAAALEHDKAYDQQLKAGDNPYLKYNHADAEFQERLKEDTSFGGNLGRAVFQAKKRLLEPLGLVEEAAKTAPGKKRPVEQSPQEPDSSAGIGKSGAQPAKKRLNFGQTGDTESVPDPQPIGEPPAAPSGVGSLTMASGGGAPVADNNEGADGVGSSSGNWHCDSQWLGDRVITTSTRTWALPTYNNHLYKQISNSTSGGSSNDNAYFGYSTPWGYFDFNRFHCHFSPRDWQRLINNNWGFRPKRLNFKLFNIQVKEVTDNNGVKTIANNLTSTVQVFTDSDYQLPYVLGSAHEGCLPPFPADVFMIPQYGYLTLNDGSQAVGRSSFYCLEYFPSQMLRTGNNFQFSYEFENVPFHSSYAHSQSLDRLMNPLIDQYLYYLSRTIILGTGTSQTLKFSVAGPSNMAVQGRNYIPGPSYRQQRVSTTVTQNNNSEFAWPGASSWALNGRNSLMNPGPAMASHKEGEDRFFPLSGSLIFGKQGTGRDNVDADKVMITNEEEIKTTNPVATESYGQVATNHQSAQTRTNPEAAQAQTGWVQNQGILPGMVWQDRDVYLQGPIWAKIPHTDGNFHPSPLMGGFGMKHPPPQILIKNTPVPADPPTAFNKDKLNSFITQYSTGQVSVEIEWELQKENSKRWNPEIQYTSNYYKSNNVEFAVNTEGVYSEPRPIGTRYLTRNL

SEQ ID NO: 872 - protein, 743 aa, Artificial Sequence
  Description of Artificial Sequence: Synthetic polypeptide
MAADGYLPDWLEDNLSEGIREWWALKPGAPQPKANQQHQDNARGLVLPGYKYLGPGNGLDKGEPVNAADAAALEHDKAYDQQLKAGDNPYLKYNHADAEFQERLKEDTSFGGNLGRAVFQAKKRLLEPLGLVEEAAKTAPGKKRPVEQSPQEPDSSAGIGKSGAQPAKKRLNFGQTGDTESVPDPQPIGEPPAAPSGVGSLTMASGGGAPVADNNEGADGVGSSSGNWHCDSQWLGDRVITTSTRTWALPTYNNHLYKQISNSTSGGSSNDNAYFGYSTPWGYFDFNRFHCHFSPRDWQRLINNNWGFRPKRLNFKLFNIQVKEVTDNNGVKTIANNLTSTVQVFTDSDYQLPYVLGSAHEGCLPPFPADVFMIPQYGYLTLNDGSQAVGRSSFYCLEYFPSQMLRTGNNFQFSYEFENVPFHSSYAHSQSLDRLMNPLIDQYLYYLSRTIILGTGTSQTLKFSVAGPSNMAVQGRNYIPGPSYRQQRVSTTVTQNNNSEFAWPGASSWALNGRNSLMNPGPAMASHKEGEDRFFPLSGSLIFGKQGTGRDNVDADKVMITNEEEIKTTNPVATESYGQVATNHQSAQNGGTSSSAQAQTGWVQNQGILPGMVWQDRDVYLQGPIWAKIPHTDGNFHPSPLMGGFGMKHPPPQILIKNTPVPADPPTAFNKDKLNSFITQYSTGQVSVEIEWELQKENSKRWNPEIQYTSNYYKSNNVEFAVNTEGVYSEPRPIGTRYLTRNL

SEQ ID NO: 873 - protein, 7 aa, Artificial Sequence
  Description of Artificial Sequence: Synthetic polypeptide
TLAVPFK

SEQ ID NO: 874 - protein, 7 aa, Artificial Sequence
  Description of Artificial Sequence: Synthetic polypeptide
KFPVALT

SEQ ID NO: 875 - protein, 6 aa, Artificial Sequence
  Description of Artificial Sequence: Synthetic polypeptide
LAVPFK

SEQ ID NO: 876 - protein, 5 aa, Artificial Sequence
  Description of Artificial Sequence: Synthetic polypeptide
AVPFK

SEQ ID NO: 877 - protein, 4 aa, Artificial Sequence
  Description of Artificial Sequence: Synthetic polypeptide
VPFK

SEQ ID NO: 878 - protein, 6 aa, Artificial Sequence
  Description of Artificial Sequence: Synthetic polypeptide
TLAVPF

SEQ ID NO: 879 - protein, 5 aa, Artificial Sequence
  Description of Artificial Sequence: Synthetic polypeptide
TLAVP

SEQ ID NO: 880 - protein, 4 aa, Artificial Sequence
  Description of Artificial Sequence: Synthetic polypeptide
TLAV

SEQ ID NO: 881 - protein, 7 aa, Artificial Sequence
  Description of Artificial Sequence: Synthetic polypeptide
SVSKPFL

SEQ ID NO: 882 - protein, 7 aa, Artificial Sequence
  Description of Artificial Sequence: Synthetic polypeptide
FTLTTPK

SEQ ID NO: 883 - protein, 7 aa, Artificial Sequence
  Description of Artificial Sequence: Synthetic polypeptide
MNATKNV

SEQ ID NO: 884 - protein, 7 aa, Artificial Sequence
  Description of Artificial Sequence: Synthetic polypeptide
QSSQTPR

SEQ ID NO: 885 - protein, 7 aa, Artificial Sequence
  Description of Artificial Sequence: Synthetic polypeptide
ILGTGTS

SEQ ID NO: 886 - protein, 7 aa, Artificial Sequence
  Description of Artificial Sequence: Synthetic polypeptide
TRTNPEA

SEQ ID NO: 887 - protein, 7 aa, Artificial Sequence
  Description of Artificial Sequence: Synthetic polypeptide
NGGTSSS

SEQ ID NO: 888 - protein, 7 aa, Artificial Sequence
  Description of Artificial Sequence: Synthetic polypeptide
YTLSQGW

SEQ ID NO: 889 - DNA, 21 bp, Artificial Sequence
  Description of Artificial Sequence: Synthetic polynucleotide
aagtttcctgtggcgttgact

SEQ ID NO: 890 - DNA, 21 bp, Artificial Sequence
  Description of Artificial Sequence: Synthetic polynucleotide
actttggcggtgccttttaag

SEQ ID NO: 891 - DNA, 21 bp, Artificial Sequence
  Description of Artificial Sequence: Synthetic polynucleotide
agtgtgagtaagccttttttg

SEQ ID NO: 892 - DNA, 21 bp, Artificial Sequence
  Description of Artificial Sequence: Synthetic polynucleotide
tttacgttgacgacgcctaag

SEQ ID NO: 893 - DNA, 21 bp, Artificial Sequence
  Description of Artificial Sequence: Synthetic polynucleotide
atgaatgctacgaagaatgtg

SEQ ID NO: 894 - DNA, 21 bp, Artificial Sequence
  Description of Artificial Sequence: Synthetic polynucleotide
cagtcgtcgcagacgcctagg

SEQ ID NO: 895 - DNA, 21 bp, Artificial Sequence
  Description of Artificial Sequence: Synthetic polynucleotide
attctggggactggtacttcg

SEQ ID NO: 896 - DNA, 21 bp, Artificial Sequence
  Description of Artificial Sequence: Synthetic polynucleotide
acgcggactaatcctgaggct

SEQ ID NO: 897 - DNA, 21 bp, Artificial Sequence
  Description of Artificial Sequence: Synthetic polynucleotide
aatggggggactagtagttct

SEQ ID NO: 898 - DNA, 21 bp, Artificial Sequence
  Description of Artificial Sequence: Synthetic polynucleotide
tatactttgtcgcagggttgg

SEQ ID NO: 899 - protein, 9 aa, Artificial Sequence
  Description of Artificial Sequence: Synthetic polypeptide
SADNNNSEY

SEQ ID NO: 900 - protein, 9 aa, Artificial Sequence
  Description of Artificial Sequence: Synthetic polypeptide
LIDQYLYYL

SEQ ID NO: 901 - protein, 9 aa, Artificial Sequence
  Description of Artificial Sequence: Synthetic polypeptide
VPQYGYLTL

SEQ ID NO: 902 - protein, 9 aa, Artificial Sequence
  Description of Artificial Sequence: Synthetic polypeptide
TTSTRTWAL

SEQ ID NO: 903 - protein, 9 aa, Artificial Sequence
  Description of Artificial Sequence: Synthetic polypeptide
YHLNGRDSL

SEQ ID NO: 904 - protein, 9 aa, Artificial Sequence
  Description of Artificial Sequence: Synthetic polypeptide
SQAVGRSSF

SEQ ID NO: 905 - protein, 9 aa, Artificial Sequence
  Description of Artificial Sequence: Synthetic polypeptide
VPANPSTTF

SEQ ID NO: 906 - protein, 9 aa, Artificial Sequence
  Description of Artificial Sequence: Synthetic polypeptide
FPQSGVLIF

SEQ ID NO: 907 - protein, 15 aa, Artificial Sequence
  Description of Artificial Sequence: Synthetic polypeptide
YFDFNRFHCHFSPRD

SEQ ID NO: 908 - protein, 15 aa, Artificial Sequence
  Description of Artificial Sequence: Synthetic polypeptide
VGNSSGNWHCDSTWM

SEQ ID NO: 909 - protein, 15 aa, Artificial Sequence
  Description of Artificial Sequence: Synthetic polypeptide
QFSQAGASDIRDQSR

SEQ ID NO: 910 - protein, 13 aa, Artificial Sequence
  Description of Artificial Sequence: Synthetic polypeptide
GASDIRQSRNWLP

SEQ ID NO: 911 - protein, 15 aa, Artificial Sequence
  Description of Artificial Sequence: Synthetic polypeptide
GNRQAATADVNTQGV

SEQ ID NO: 912 - protein, 9 aa, Artificial Sequence
  Description of Artificial Sequence: Synthetic polypeptide
LDRLMNPLI

SEQ ID NO: 913 - protein, 9 aa, Artificial Sequence
  Description of Artificial Sequence: Synthetic polypeptide
QPAKKRLNF

SEQ ID NO: 914 - protein, 7 aa, Artificial Sequence
  Description of Artificial Sequence: Synthetic polypeptide
QAVRTSL

SEQ ID NO: 915 - protein, 7 aa, Artificial Sequence
  Description of Artificial Sequence: Synthetic polypeptide
LAKERLS

SEQ ID NO: 916 - RNA, 21 nt, Artificial Sequence
  Description of Artificial Sequence: Synthetic oligonucleotide
uuaacgucaguucauaaacuu

SEQ ID NO: 917 - DNA, 21 bp, Artificial Sequence
  Description of Artificial Sequence: Synthetic oligonucleotide
  Description of Combined DNA/RNA Molecule: Synthetic oligonucleotide
  misc_feature (20)..(21): Deoxythymidine dinucleotide
uuaacgucaguucauaaactt

SEQ ID NO: 918 - RNA, 21 nt, Artificial Sequence
  Description of Artificial Sequence: Synthetic oligonucleotide
ugucgguaccgucuaacacuu

SEQ ID NO: 919 - DNA, 21 bp, Artificial Sequence
  Description of Artificial Sequence: Synthetic oligonucleotide
  Description of Combined DNA/RNA Molecule: Synthetic oligonucleotide
  misc_feature (20)..(21): Deoxythymidine dinucleotide
ugucgguaccgucuaacactt

SEQ ID NO: 920 - RNA, 21 nt, Artificial Sequence
  Description of Artificial Sequence: Synthetic oligonucleotide
uaagcauggagcuagcagguu

SEQ ID NO: 921 - DNA, 21 bp, Artificial Sequence
  Description of Artificial Sequence: Synthetic oligonucleotide
  Description of Combined DNA/RNA Molecule: Synthetic oligonucleotide
  misc_feature (20)..(21): Deoxythymidine dinucleotide
uaagcauggagcuagcaggtt

SEQ ID NO: 922 - RNA, 21 nt, Artificial Sequence
  Description of Artificial Sequence: Synthetic oligonucleotide
uacaacgagacugaauugcuu

SEQ ID NO: 923 - DNA, 21 bp, Artificial Sequence
  Description of Artificial Sequence: Synthetic oligonucleotide
  Description of Combined DNA/RNA Molecule: Synthetic oligonucleotide
  misc_feature (20)..(21): Deoxythymidine dinucleotide
uacaacgagacugaauugctt

SEQ ID NO: 924 - RNA, 21 nt, Artificial Sequence
  Description of Artificial Sequence: Synthetic oligonucleotide
uucaguucauaaaccuggauu

SEQ ID NO: 925 - DNA, 21 bp, Artificial Sequence
  Description of Artificial Sequence: Synthetic oligonucleotide
  Description of Combined DNA/RNA Molecule: Synthetic oligonucleotide
  misc_feature (20)..(21): Deoxythymidine dinucleotide
uucaguucauaaaccuggatt

SEQ ID NO: 926 - RNA, 21 nt, Artificial Sequence
  Description of Artificial Sequence: Synthetic oligonucleotide
uaacgucaguucauaaaccuu

SEQ ID NO: 927 - DNA, 21 bp, Artificial Sequence
  Description of Artificial Sequence: Synthetic oligonucleotide
  Description of Combined DNA/RNA Molecule: Synthetic oligonucleotide
  misc_feature (20)..(21): Deoxythymidine dinucleotide
uaacgucaguucauaaacctt

SEQ ID NO: 928 - RNA, 21 nt, Artificial Sequence
  Description of Artificial Sequence: Synthetic oligonucleotide
uccggucacaacauugugguu

SEQ ID NO: 929 - DNA, 21 bp, Artificial Sequence
  Description of Artificial Sequence: Synthetic oligonucleotide
  Description of Combined DNA/RNA Molecule: Synthetic oligonucleotide
  misc_feature (20)..(21): Deoxythymidine dinucleotide
uccggucacaacauuguggtt

SEQ ID NO: 930 - RNA, 21 nt, Artificial Sequence
  Description of Artificial Sequence: Synthetic oligonucleotide
uugcacgguucuuugugacuu

SEQ ID NO: 931 - DNA, 21 bp, Artificial Sequence
  Description of Artificial Sequence: Synthetic oligonucleotide
  Description of Combined DNA/RNA Molecule: Synthetic oligonucleotide
  misc_feature (20)..(21): Deoxythymidine dinucleotide
uugcacgguucuuugugactt

SEQ ID NO: 932 - RNA, 21 nt, Artificial Sequence
  Description of Artificial Sequence: Synthetic oligonucleotide
uuuuauaacaagagguucauu

SEQ ID NO: 933 - DNA, 21 bp, Artificial Sequence
  Description of Artificial Sequence: Synthetic oligonucleotide
  Description of Combined DNA/RNA Molecule: Synthetic oligonucleotide
  misc_feature (20)..(21): Deoxythymidine dinucleotide
uuuuauaacaagagguucatt

SEQ ID NO: 934 - RNA, 21 nt, Artificial Sequence
  Description of Artificial Sequence: Synthetic oligonucleotide
uccaaauacugguugucgguu

SEQ ID NO: 935 - DNA, 21 bp, Artificial Sequence
  Description of Artificial Sequence: Synthetic oligonucleotide
  Description of Combined DNA/RNA Molecule: Synthetic oligonucleotide
  misc_feature (20)..(21): Deoxythymidine dinucleotide
uccaaauacugguugucggtt

SEQ ID NO: 936 - RNA, 21 nt, Artificial Sequence
  Description of Artificial Sequence: Synthetic oligonucleotide
uauuuuaggaauuccaauguu

SEQ ID NO: 937 - DNA, 21 bp, Artificial Sequence
  Description of Artificial Sequence: Synthetic oligonucleotide
  Description of Combined DNA/RNA Molecule: Synthetic oligonucleotide
  misc_feature (20)..(21): Deoxythymidine dinucleotide
uauuuuaggaauuccaaugtt

SEQ ID NO: 938 - RNA, 21 nt, Artificial Sequence
  Description of Artificial Sequence: Synthetic oligonucleotide
uuuaggaauuccaaugaucuu

SEQ ID NO: 939 - DNA, 21 bp, Artificial Sequence
  Description of Artificial Sequence: Synthetic oligonucleotide
  Description of Combined DNA/RNA Molecule: Synthetic oligonucleotide
  misc_feature (20)..(21): Deoxythymidine dinucleotide
uuuaggaauuccaaugauctt

SEQ ID NO: 940 - DNA, 21 bp, Artificial Sequence
  Description of Artificial Sequence: Synthetic oligonucleotide
  Description of Combined DNA/RNA Molecule: Synthetic oligonucleotide
  misc_feature (20)..(21): Deoxythymidine dinucleotide
uuaaucucuuuacugauautt

SEQ ID NO: 941 - DNA, 21 bp, Artificial Sequence
  Description of Artificial Sequence: Synthetic oligonucleotide
  Description of Combined DNA/RNA Molecule: Synthetic oligonucleotide
  misc_feature (20)..(21): Deoxythymidine dinucleotide
gauuuuaggaauuccaaugtt

SEQ ID NO: 942 - RNA, 22 nt, Artificial Sequence
  Description of Artificial Sequence: Synthetic oligonucleotide
uaagcauggagcuagcaggcuu

SEQ ID NO: 943 - RNA, 21 nt, Artificial Sequence
  Description of Artificial Sequence: Synthetic oligonucleotide
uaagcauggagcuagcagggu

SEQ ID NO: 944 - RNA, 22 nt, Artificial Sequence
  Description of Artificial Sequence: Synthetic oligonucleotide
aaggacuugagggacucgaagu

SEQ ID NO: 945 - RNA, 21 nt, Artificial Sequence
  Description of Artificial Sequence: Synthetic oligonucleotide
aaggacuugagggacucgaag

SEQ ID NO: 946 - RNA, 19 nt, Artificial Sequence
  Description of Artificial Sequence: Synthetic oligonucleotide
aaggacuugagggacucga

SEQ ID NO: 947 - RNA, 21 nt, Artificial Sequence
  Description of Artificial Sequence: Synthetic oligonucleotide
aggacuugagggacucgaagu

SEQ ID NO: 948 - RNA, 22 nt, Artificial Sequence
  Description of Artificial Sequence: Synthetic oligonucleotide
gaggacuugagggacucgaagu

SEQ ID NO: 949 - RNA, 22 nt, Artificial Sequence
  Description of Artificial Sequence: Synthetic oligonucleotide
aaggacuugagggacucgaagu

SEQ ID NO: 950 - RNA, 23 nt, Artificial Sequence
  Description of Artificial Sequence: Synthetic oligonucleotide
aaggacuugagggacucgaaguu

SEQ ID NO: 951 - RNA, 21 nt, Artificial Sequence
  Description of Artificial Sequence: Synthetic oligonucleotide
aaggacuugagggacucgaag

SEQ ID NO: 952 - RNA, 19 nt, Artificial Sequence
  Description of Artificial Sequence: Synthetic oligonucleotide
aaggacuugagggacucga

SEQ ID NO: 953 - RNA, 22 nt, Artificial Sequence
  Description of Artificial Sequence: Synthetic oligonucleotide
aaggacuugagggacucgaagg

SEQ ID NO: 954 - RNA, 21 nt, Artificial Sequence
  Description of Artificial Sequence: Synthetic oligonucleotide
aaggacuugagggacucgaau

SEQ ID NO: 955 - RNA, 22 nt, Artificial Sequence
  Description of Artificial Sequence: Synthetic oligonucleotide
aaggacuugagggacucgaaga

SEQ ID NO: 956 - RNA, 22 nt, Artificial Sequence
  Description of Artificial Sequence: Synthetic oligonucleotide
aaggacuugagggacucgaagg

SEQ ID NO: 957 - RNA, 23 nt, Artificial Sequence
  Description of Artificial Sequence: Synthetic oligonucleotide
aaggacuugagggacucgaaggu

SEQ ID NO: 958 - RNA, 23 nt, Artificial Sequence
  Description of Artificial Sequence: Synthetic oligonucleotide
aaggacuugagggacucgaagga

SEQ ID NO: 959 - RNA, 21 nt, Artificial Sequence
  Description of Artificial Sequence: Synthetic oligonucleotide
aaggacuugagggacucgaag

SEQ ID NO: 960 - RNA, 22 nt, Artificial Sequence
  Description of Artificial Sequence: Synthetic oligonucleotide
aaggacuugagggacucgaagu

SEQ ID NO: 961 - RNA, 19 nt, Artificial Sequence
  Description of Artificial Sequence: Synthetic oligonucleotide
aaggacuugagggacucga

SEQ ID NO: 962 - RNA, 23 nt, Artificial Sequence
  Description of Artificial Sequence: Synthetic oligonucleotide
aaggacuugagggacucgaagga

SEQ ID NO: 963 - RNA, 22 nt, Artificial Sequence
  Description of Artificial Sequence: Synthetic oligonucleotide
aaggacuugagggacucgaagg

SEQ ID NO: 964 - RNA, 24 nt, Artificial Sequence
  Description of Artificial Sequence: Synthetic oligonucleotide
aaggacuugagggacucgaaggau

SEQ ID NO: 965 - RNA, 25 nt, Artificial Sequence
  Description of Artificial Sequence: Synthetic oligonucleotide
aaggacuugagggacucgaaggauu

SEQ ID NO: 966 - RNA, 21 nt, Artificial Sequence
  Description of Artificial Sequence: Synthetic oligonucleotide
aaggacuugagggacucgaag

SEQ ID NO: 967 - RNA, 24 nt, Artificial Sequence
  Description of Artificial Sequence: Synthetic oligonucleotide
aaggacuugagggacucgaaggaa

SEQ ID NO: 968 - RNA, 23 nt, Artificial Sequence
  Description of Artificial Sequence: Synthetic oligonucleotide
gaugaagugcacacauuggauga

SEQ ID NO: 969 - RNA, 22 nt, Artificial Sequence
  Description of Artificial Sequence: Synthetic oligonucleotide
gaugaacugcacacauuggaug

SEQ ID NO: 970 - RNA, 23 nt, Artificial Sequence
  Description of Artificial Sequence: Synthetic oligonucleotide
gaugaauugcacacaguagauga

SEQ ID NO: 971 - RNA, 24 nt, Artificial Sequence
  Description of Artificial Sequence: Synthetic oligonucleotide
aaggacuugagggacucgaagguu

SEQ ID NO: 972 - RNA, 25 nt, Artificial Sequence
  Description of Artificial Sequence: Synthetic oligonucleotide
aaggacuugagggacucgaagguuu

SEQ ID NO: 973 - RNA, 23 nt, Artificial Sequence
  Description of Artificial Sequence: Synthetic oligonucleotide
aaggacuugagggacucgaaggu

SEQ ID NO: 974 - RNA, 26 nt, Artificial Sequence
  Description of Artificial Sequence: Synthetic oligonucleotide
aaggacuugagggacucgaagguuuu

SEQ ID NO: 975 - RNA, 27 nt, Artificial Sequence
  Description of Artificial Sequence: Synthetic oligonucleotide
aaggacuugagggacucgaagguuuuu

SEQ ID NO: 976 - RNA, 22 nt, Artificial Sequence
  Description of Artificial Sequence: Synthetic oligonucleotide
aaggacuugagggacucgaagg

SEQ ID NO: 977 - RNA, 22 nt, Artificial Sequence
  Description of Artificial Sequence: Synthetic oligonucleotide
uaaggacuugagggacucgaag

SEQ ID NO: 978 - RNA, 21 nt, Artificial Sequence
  Description of Artificial Sequence: Synthetic oligonucleotide
aaggacuugagggacucgaag

SEQ ID NO: 979 - RNA, 22 nt, Artificial Sequence
  Description of Artificial Sequence: Synthetic oligonucleotide
aaggacuugagggacucgaagu

SEQ ID NO: 980 - RNA, 30 nt, Artificial Sequence
  Description of Artificial Sequence: Synthetic oligonucleotide
aaggacuugagggacucgaagacgaguccc

SEQ ID NO: 981 - RNA, 31 nt, Artificial Sequence
  Description of Artificial Sequence: Synthetic oligonucleotide
aaggacuugagggacucgaagacgaguccca

SEQ ID NO: 982 - RNA, 31 nt, Artificial Sequence
  Description of Artificial Sequence: Synthetic oligonucleotide
aaggacuugagggacucgaagacgagucccu

SEQ ID NO: 983 - RNA, 23 nt, Artificial Sequence
  Description of Artificial Sequence: Synthetic oligonucleotide
gaugaagugcacacauuggauac

SEQ ID NO: 984 - RNA, 24 nt, Artificial Sequence
  Description of Artificial Sequence: Synthetic oligonucleotide
gaugaagugcacacauuggauaca

SEQ ID NO: 985 - RNA, 30 nt, Artificial Sequence
  Description of Artificial Sequence: Synthetic oligonucleotide
gaugaagugcacacauuggauacaaugugu

SEQ ID NO: 986 - RNA, 21 nt, Artificial Sequence
  Description of Artificial Sequence: Synthetic oligonucleotide
gaugaagugcacacauuggau

SEQ ID NO: 987 - RNA, 22 nt, Artificial Sequence
  Description of Artificial Sequence: Synthetic oligonucleotide
gaugaagugcacacauuggaua

SEQ ID NO: 988 - RNA, 23 nt, Artificial Sequence
  Description of Artificial Sequence: Synthetic oligonucleotide
gaugaauugcacacaguagauau

SEQ ID NO: 989 - RNA, 25 nt, Artificial Sequence
  Description of Artificial Sequence: Synthetic oligonucleotide
gaugaauugcacacaguagauauac

SEQ ID NO: 990 - RNA, 30 nt, Artificial Sequence
  Description of Artificial Sequence: Synthetic oligonucleotide
gaugaauugcacacaguagauauacugugu

SEQ ID NO: 991 - RNA, 24 nt, Artificial Sequence
  Description of Artificial Sequence: Synthetic oligonucleotide
gaugaauugcacacaguagauaua

SEQ ID NO: 992 - RNA, 24 nt, Artificial Sequence
  Description of Artificial Sequence: Synthetic oligonucleotide
augaauugcacacaguagauauac

SEQ ID NO: 993 - RNA, 22 nt, Artificial Sequence
  Description of Artificial Sequence: Synthetic oligonucleotide
gaugaauugcacacaguagaua

SEQ ID NO: 994 - RNA, 30 nt, Artificial Sequence; identical to SEQ ID NO: 990
  Description of Artificial Sequence: Synthetic oligonucleotide

SEQ ID NO: 995 - RNA, 20 nt, Artificial Sequence
  Description of Artificial Sequence: Synthetic oligonucleotide
uacaacgagacugaauugcu

SEQ ID NO: 996 - RNA, 20 nt, Artificial Sequence
  Description of Artificial Sequence: Synthetic oligonucleotide
acaacgagacugaauugcuu

SEQ ID NO: 997 - RNA, 22 nt, Artificial Sequence
  Description of Artificial Sequence: Synthetic oligonucleotide
uccggucacaacauugugguuc

SEQ ID NO: 998 - RNA, 20 nt, Artificial Sequence
  Description of Artificial Sequence: Synthetic oligonucleotide
uccggucacaacauuguggu

SEQ ID NO: 999 - RNA, 18 nt, Artificial Sequence
  Description of Artificial Sequence: Synthetic oligonucleotide
uccggucacaacauugug

SEQ ID NO: 1000 - RNA, 20 nt, Artificial Sequence
  Description of Artificial Sequence: Synthetic oligonucleotide
ccggucacaacauugugguu

SEQ ID NO: 1001 - RNA, 20 nt, Artificial Sequence
  Description of Artificial Sequence: Synthetic oligonucleotide
uuuuauaacaagagguucau

SEQ ID NO: 1002 - RNA, 20 nt, Artificial Sequence
  Description of Artificial Sequence: Synthetic oligonucleotide
uuuauaacaagagguucauu

SEQ ID NO: 1003 - RNA, 20 nt, Artificial Sequence
  Description of Artificial Sequence: Synthetic oligonucleotide
uaagcauggagcuagcaggu

SEQ ID NO: 1004 - RNA, 20 nt, Artificial Sequence
  Description of Artificial Sequence: Synthetic oligonucleotide
aagcauggagcuagcagguu

SEQ ID NO: 1005 - RNA, 20 nt, Artificial Sequence
  Description of Artificial Sequence: Synthetic oligonucleotide
ccaaauacugguugucgguu

SEQ ID NO: 1006 - RNA, 22 nt, Artificial Sequence
  Description of Artificial Sequence: Synthetic oligonucleotide
uacaacgagacugaauugcuuu

SEQ ID NO: 1007 - RNA, 22 nt, Artificial Sequence
  Description of Artificial Sequence: Synthetic oligonucleotide
uaacgucaguucauaaaccuuu

SEQ ID NO: 1008 - RNA, 22 nt, Artificial Sequence
  Description of Artificial Sequence: Synthetic oligonucleotide
guccggucacaacauugugguu

SEQ ID NO: 1009 - RNA, 23 nt, Artificial Sequence
  Description of Artificial Sequence: Synthetic oligonucleotide
uccggucacaacauugugguuug

SEQ ID NO: 1010 - RNA, 22 nt, Artificial Sequence
  Description of Artificial Sequence: Synthetic oligonucleotide
uccggucacaacauugugguuu

SEQ ID NO: 1011 - RNA, 19 nt, Artificial Sequence
  Description of Artificial Sequence: Synthetic oligonucleotide
uccggucacaacauugugg

SEQ ID NO: 1012 - RNA, 22 nt, Artificial Sequence
  Description of Artificial Sequence: Synthetic oligonucleotide
uaagcauggagcuagcagguuu

SEQ ID NO: 1013 - RNA, 21 nt, Artificial Sequence
  Description of Artificial Sequence: Synthetic oligonucleotide
aagcauggagcuagcagguuu

SEQ ID NO: 1014 - RNA, 22 nt, Artificial Sequence
  Description of Artificial Sequence: Synthetic oligonucleotide
uccaaauacugguugucgguuu

SEQ ID NO: 1015 - RNA, 21 nt, Artificial Sequence
  Description of Artificial Sequence: Synthetic oligonucleotide
ccaaauacugguugucgguuu

SEQ ID NO: 1016 - RNA, 21 nt, Artificial Sequence
  Description of Artificial Sequence: Synthetic oligonucleotide
guuuaugaacugaucuuaccc

SEQ ID NO: 1017 - RNA, 21 nt, Artificial Sequence
  Description of Artificial Sequence: Synthetic oligonucleotide
guguuagacgguacugauccc

SEQ ID NO: 1018 - RNA, 21 nt, Artificial Sequence
  Description of Artificial Sequence: Synthetic oligonucleotide
ccugcuagcuccaugcuuccc

SEQ ID NO: 1019 - RNA, 21 nt, Artificial Sequence
  Description of Artificial Sequence: Synthetic oligonucleotide
guuuaugaacugaucuuagcc

SEQ ID NO: 1020 - RNA, 21 nt, Artificial Sequence
  Description of Artificial Sequence: Synthetic oligonucleotide
guguuagacgguacugaugcc

SEQ ID NO: 1021 - RNA, 21 nt, Artificial Sequence
  Description of Artificial Sequence: Synthetic oligonucleotide
ccugcuagcuccaugcuugcc

SEQ ID NO: 1022 - RNA, 21 nt, Artificial Sequence
  Description of Artificial Sequence: Synthetic oligonucleotide
guuuaugaagugaucuuaacc

SEQ ID NO: 1023 - RNA, 21 nt, Artificial Sequence
  Description of Artificial Sequence: Synthetic oligonucleotide
guguuagaccguacugauacc

SEQ ID NO: 1024 - RNA, 21 nt, Artificial Sequence
  Description of Artificial Sequence: Synthetic oligonucleotide
ccugcuagcaccaugcuuacc

SEQ ID NO: 1025 - RNA, 21 nt, Artificial Sequence
  Description of Artificial Sequence: Synthetic oligonucleotide
guuuaugaacugaucuuaacc

SEQ ID NO: 1026 - RNA, 21 nt, Artificial Sequence
  Description of Artificial Sequence: Synthetic oligonucleotide
guguuagacgguacugauacc

SEQ ID NO: 1027 - RNA, 21 nt, Artificial Sequence
  Description of Artificial Sequence: Synthetic oligonucleotide
ccugcuagcuccaugcuuacc

SEQ ID NO: 1028 - DNA, 21 bp, Artificial Sequence
  Description of Artificial Sequence: Synthetic oligonucleotide
  Description of Combined DNA/RNA Molecule: Synthetic oligonucleotide
  misc_feature (20)..(21): Deoxythymidine dinucleotide
ccugcuagcuccaugcuuatt

SEQ ID NO: 1029 - RNA, 21 nt, Artificial Sequence
  Description of Artificial Sequence: Synthetic oligonucleotide
guuuaugaacugaucuugccc

SEQ ID NO: 1030 - RNA, 21 nt, Artificial Sequence
  Description of Artificial Sequence: Synthetic oligonucleotide
guuuaugaacugaucuuggcc

SEQ ID NO: 1031 - RNA, 21 nt, Artificial Sequence
  Description of Artificial Sequence: Synthetic oligonucleotide
guuuaugaacugaucuugacc

SEQ ID NO: 1032 - RNA, 21 nt, Artificial Sequence
  Description of Artificial Sequence: Synthetic oligonucleotide
gcaauucagucucguuguccc

SEQ ID NO: 1033 - RNA, 21 nt, Artificial Sequence
  Description of Artificial Sequence: Synthetic oligonucleotide
uccagguuuaugaacugaccc

SEQ ID NO: 1034 - RNA, 21 nt, Artificial Sequence
  Description of Artificial Sequence: Synthetic oligonucleotide
gguuuaugaacugacguuccc

SEQ ID NO: 1035 - RNA, 21 nt, Artificial Sequence
  Description of Artificial Sequence: Synthetic oligonucleotide
ccacaauguugugacuggccc

SEQ ID NO: 1036 - RNA, 21 nt, Artificial Sequence
  Description of Artificial Sequence: Synthetic oligonucleotide
gucacaaagaaccguguaccc

SEQ ID NO: 1037 - RNA, 21 nt, Artificial Sequence
  Description of Artificial Sequence: Synthetic oligonucleotide
ugaaccucuuguuauaaaccc

SEQ ID NO: 1038 - RNA, 21 nt, Artificial Sequence
  Description of Artificial Sequence: Synthetic oligonucleotide
ccgacaaccaguauuuggccc

SEQ ID NO: 1039 - RNA, 21 nt, Artificial Sequence
  Description of Artificial Sequence: Synthetic oligonucleotide
gcaauucagucucguugugcc

SEQ ID NO: 1040 - RNA, 21 nt, Artificial Sequence
  Description of Artificial Sequence: Synthetic oligonucleotide
uccagguuuaugaacugagcc

SEQ ID NO: 1041 - RNA, 21 nt, Artificial Sequence
  Description of Artificial Sequence: Synthetic oligonucleotide
gguuuaugaacugacguugcc

SEQ ID NO: 1042 - RNA, 21 nt, Artificial Sequence
  Description of Artificial Sequence: Synthetic oligonucleotide
ccacaauguugugacugggcc

SEQ ID NO: 1043 - RNA, 21 nt, Artificial Sequence
  Description of Artificial Sequence: Synthetic oligonucleotide
gucacaaagaaccguguagcc

SEQ ID NO: 1044 - RNA, 21 nt, Artificial Sequence
  Description of Artificial Sequence: Synthetic oligonucleotide
ugaaccucuuguuauaaagcc

SEQ ID NO: 1045 - RNA, 21 nt, Artificial Sequence
  Description of Artificial Sequence: Synthetic oligonucleotide
ccgacaaccaguauuugggcc

SEQ ID NO: 1046 - RNA, 21 nt, Artificial Sequence
  Description of Artificial Sequence: Synthetic oligonucleotide
gcaauucagucucguuguacc

SEQ ID NO: 1047 - DNA, 21 bp, Artificial Sequence
  Description of Artificial Sequence: Synthetic oligonucleotide
  Description of Combined DNA/RNA Molecule: Synthetic oligonucleotide
  misc_feature (20)..(21): Deoxythymidine dinucleotide
gcaauucagucucguuguatt

SEQ ID NO: 1048 - RNA, 21 nt, Artificial Sequence
  Description of Artificial Sequence: Synthetic oligonucleotide
uccagguuuaugaacugaacc

SEQ ID NO: 1049 - DNA, 21 bp, Artificial Sequence
  Description of Artificial Sequence: Synthetic oligonucleotide
  Description of Combined DNA/RNA Molecule: Synthetic oligonucleotide
  misc_feature (20)..(21): Deoxythymidine dinucleotide
uccagguuuaugaacugaatt

SEQ ID NO: 1050 - RNA, 21 nt, Artificial Sequence
  Description of Artificial Sequence: Synthetic oligonucleotide
gguuuaugaacugacguuacc

SEQ ID NO: 1051 - RNA, 21 nt, Artificial Sequence
  Description of Artificial Sequence: Synthetic oligonucleotide
ccacaauguugugacuggacc

SEQ ID NO: 1052 - RNA, 21 nt, Artificial Sequence
  Description of Artificial Sequence: Synthetic oligonucleotide
gucacaaagaaccguguaacc

SEQ ID NO: 1053 - RNA, 21 nt, Artificial Sequence
  Description of Artificial Sequence: Synthetic oligonucleotide
ugaaccucuuguuauaaaacc

SEQ ID NO: 1054 - DNA, 21 bp, Artificial Sequence
  Description of Artificial Sequence: Synthetic oligonucleotide
  Description of Combined DNA/RNA Molecule: Synthetic oligonucleotide
  misc_feature (20)..(21): Deoxythymidine dinucleotide
ugaaccucuuguuauaaaatt

SEQ ID NO: 1055 - RNA, 21 nt, Artificial Sequence
  Description of Artificial Sequence: Synthetic oligonucleotide
ccgacaaccaguauuuggacc

SEQ ID NO: 1056 - DNA, 21 bp, Artificial Sequence
  Description of Artificial Sequence: Synthetic oligonucleotide
  Description of Combined DNA/RNA Molecule: Synthetic oligonucleotide
  misc_feature (20)..(21): Deoxythymidine dinucleotide
ccgacaaccaguauuuggatt

SEQ ID NO: 1057 - RNA, 21 nt, Artificial Sequence
  Description of Artificial Sequence: Synthetic oligonucleotide
gcaauucagacucguuguacc

SEQ ID NO: 1058 - RNA, 21 nt, Artificial Sequence
  Description of Artificial Sequence: Synthetic oligonucleotide
uccagguuuuugaacugaacc

SEQ ID NO: 1059 - RNA, 21 nt, Artificial Sequence
  Description of Artificial Sequence: Synthetic oligonucleotide
gguuuaugaucugacguuacc

SEQ ID NO: 1060 - RNA, 21 nt, Artificial Sequence
  Description of Artificial Sequence: Synthetic oligonucleotide
ccacaauguagugacuggacc

SEQ ID NO: 1061 - RNA, 21 nt, Artificial Sequence
  Description of Artificial Sequence: Synthetic oligonucleotide
gucacaaaguaccguguaacc

SEQ ID NO: 1062 - RNA, 21 nt, Artificial Sequence
  Description of Artificial Sequence: Synthetic oligonucleotide
ugaaccucuaguuauaaaacc

SEQ ID NO: 1063 - RNA, 21 nt, Artificial Sequence
  Description of Artificial Sequence: Synthetic oligonucleotide
ccgacaaccuguauuuggacc

SEQ ID NO: 1064 - RNA, 21 nt, Artificial Sequence
  Description of Artificial Sequence: Synthetic oligonucleotide
cauuggaauuccuaaaauucc

SEQ ID NO: 1065 - RNA, 21 nt, Artificial Sequence
  Description of Artificial Sequence: Synthetic oligonucleotide
gaucauuggaauuccuaaucc

SEQ ID NO: 1066 - RNA, 21 nt, Artificial Sequence
  Description of Artificial Sequence: Synthetic oligonucleotide
cauuggaauuccuaaaaugcc

SEQ ID NO: 1067 - RNA, 21 nt, Artificial Sequence
  Description of Artificial Sequence: Synthetic oligonucleotide
gaucauuggaauuccuaagcc

SEQ ID NO: 1068 - RNA, 21 nt, Artificial Sequence
  Description of Artificial Sequence: Synthetic oligonucleotide
cauuggaauuccuaaaauacc

SEQ ID NO: 1069 - DNA, 21 bp, Artificial Sequence
  Description of Artificial Sequence: Synthetic oligonucleotide
  Description of Combined DNA/RNA Molecule: Synthetic oligonucleotide
  misc_feature (20)..(21): Deoxythymidine dinucleotide
cauuggaauuccuaaaauatt

SEQ ID NO: 1070 - RNA, 21 nt, Artificial Sequence
  Description of Artificial Sequence: Synthetic oligonucleotide
gaucauuggaauuccuaaacc

SEQ ID NO: 1071 - DNA, 21 bp, Artificial Sequence
  Description of Artificial Sequence: Synthetic oligonucleotide
  Description of Combined DNA/RNA Molecule: Synthetic oligonucleotide
  misc_feature (20)..(21): Deoxythymidine dinucleotide
gaucauuggaauuccuaaatt

SEQ ID NO: 1072 - RNA, 21 nt, Artificial Sequence
  Description of Artificial Sequence: Synthetic oligonucleotide
cauuggaauaccuaaaauacc

SEQ ID NO: 1073 - RNA, 21 nt, Artificial Sequence
  Description of Artificial Sequence: Synthetic oligonucleotide
gaucauugguauuccuaaacc

SEQ ID NO: 1074 - DNA, 21 bp, Artificial Sequence
  Description of Artificial Sequence: Synthetic oligonucleotide
  Description of Combined DNA/RNA Molecule: Synthetic oligonucleotide
  misc_feature (20)..(21): Deoxythymidine dinucleotide
guuuaugaacugacguuaatt

SEQ ID NO: 1075 - DNA, 21 bp, Artificial Sequence
  Description of Artificial Sequence: Synthetic oligonucleotide
  Description of Combined DNA/RNA Molecule: Synthetic oligonucleotide
  misc_feature (20)..(21): Deoxythymidine dinucleotide
guguuagacgguaccgacatt

SEQ ID NO: 1076 - DNA, 21 bp, Artificial Sequence
  Description of Artificial Sequence: Synthetic oligonucleotide
  Description of Combined DNA/RNA Molecule: Synthetic oligonucleotide
  misc_feature (20)..(21): Deoxythymidine dinucleotide
auaucaguaaagagauuaatt

SEQ ID NO: 1077 - DNA, 21 bp, Artificial Sequence
  Description of Artificial Sequence: Synthetic oligonucleotide
  Description of Combined DNA/RNA Molecule: Synthetic oligonucleotide
  misc_feature (20)..(21): Deoxythymidine dinucleotide
gguuuaugaacugacguuatt

SEQ ID NO: 1078 - DNA, 21 bp, Artificial Sequence
  Description of Artificial Sequence: Synthetic oligonucleotide
  Description of Combined DNA/RNA Molecule: Synthetic oligonucleotide
  misc_feature (20)..(21): Deoxythymidine dinucleotide
ccacaauguugugaccggatt

SEQ ID NO: 1079 - DNA, 21 bp, Artificial Sequence
  Description of Artificial Sequence: Synthetic oligonucleotide
  Description of Combined DNA/RNA Molecule: Synthetic oligonucleotide
  misc_feature (20)..(21): Deoxythymidine dinucleotide
gucacaaagaaccgugcaatt

SEQ ID NO: 1080 - DNA, 21 bp, Artificial Sequence
  Description of Artificial Sequence: Synthetic oligonucleotide
  Description of Combined DNA/RNA Molecule: Synthetic oligonucleotide
  misc_feature (20)..(21): Deoxythymidine dinucleotide
cauuggaauuccuaaaauctt

SEQ ID NO: 1081 - RNA, 21 nt, Artificial Sequence
  Description of Artificial Sequence: Synthetic oligonucleotide
ccugcuagcuccaugcuugcu

SEQ ID NO: 1082 - RNA, 21 nt, Artificial Sequence
  Description of Artificial Sequence: Synthetic oligonucleotide
ccugcuagcuccaugcuugau

SEQ ID NO: 1083 - RNA, 21 nt, Artificial Sequence
  Description of Artificial Sequence: Synthetic oligonucleotide
ccugcuagcuccaugcuuauu

SEQ ID NO: 1084 - RNA, 21 nt, Artificial Sequence
  Description of Artificial Sequence: Synthetic oligonucleotide
ccugcuagcuccaugcuuguu

SEQ ID NO: 1085 - RNA, 20 nt, Artificial Sequence
  Description of Artificial Sequence: Synthetic oligonucleotide
uucgagucccucaaguagcu

SEQ ID NO: 1086 - RNA, 22 nt, Artificial Sequence
  Description of Artificial Sequence: Synthetic oligonucleotide
uucgagucccucaaguagcuuu

SEQ ID NO: 1087 - RNA, 22 nt, Artificial Sequence
  Description of Artificial Sequence: Synthetic oligonucleotide
ucgagucccucaaguccauucu

SEQ ID NO: 1088 - RNA, 21 nt, Artificial Sequence
  Description of Artificial Sequence: Synthetic oligonucleotide
uuccaguccaucaagucaauu

SEQ ID NO: 1089 - RNA, 22 nt, Artificial Sequence
  Description of Artificial Sequence: Synthetic oligonucleotide
uuccgagucuaaaaguccuugg

SEQ ID NO: 1090 - RNA, 23 nt, Artificial Sequence
  Description of Artificial Sequence: Synthetic oligonucleotide
uuccgagucuaaaaguccuuggc

SEQ ID NO: 1091 - RNA, 23 nt, Artificial Sequence
  Description of Artificial Sequence: Synthetic oligonucleotide
cuuccgagucuaaaaguccuugg

SEQ ID NO: 1092 - RNA, 23 nt, Artificial Sequence
  Description of Artificial Sequence: Synthetic oligonucleotide
uuccgagucuaaaaguccuuggu

SEQ ID NO: 1093 - RNA, 24 nt, Artificial Sequence
  Description of Artificial Sequence: Synthetic oligonucleotide
uuccgagucuaaaaguccuuggcu

SEQ ID NO: 1094 - RNA, 23 nt, Artificial Sequence
  Description of Artificial Sequence: Synthetic oligonucleotide
uccaaugugaaacuucaucggcu

SEQ ID NO: 1095 - RNA, 22 nt, Artificial Sequence
  Description of Artificial Sequence: Synthetic oligonucleotide
uccaaugugaaacuucaucggc

SEQ ID NO: 1096 - RNA, 22 nt, Artificial Sequence
  Description of Artificial Sequence: Synthetic oligonucleotide
auccaaugugaaacuucaucgu

SEQ ID NO: 1097 - RNA, 23 nt, Artificial Sequence
  Description of Artificial Sequence: Synthetic oligonucleotide
auccaaugugaaacuucaucggu

SEQ ID NO: 1098 - RNA, 22 nt, Artificial Sequence
  Description of Artificial Sequence: Synthetic oligonucleotide
uccaaugugaaacuucaucggu

SEQ ID NO: 1099 - RNA, 24 nt, Artificial Sequence
  Description of Artificial Sequence: Synthetic oligonucleotide
uccaaugugaaacuucaucggcuu

SEQ ID NO: 1100 - RNA, 22 nt, Artificial Sequence
  Description of Artificial Sequence: Synthetic oligonucleotide
aucuacugugaaaauucaucgg

SEQ ID NO: 1101 - RNA, 21 nt, Artificial Sequence
  Description of Artificial Sequence: Synthetic oligonucleotide
ucuacugugaaaauucaucgg

SEQ ID NO: 1102 - RNA, 22 nt, Artificial Sequence
  Description of Artificial Sequence: Synthetic oligonucleotide
ucuacugugaaaauucaucggc

SEQ ID NO: 1103 - RNA, 23 nt, Artificial Sequence
  Description of Artificial Sequence: Synthetic oligonucleotide
aucuacugugaaaauucaucggu

SEQ ID NO: 1104 - RNA, 22 nt, Artificial Sequence
  Description of Artificial Sequence: Synthetic oligonucleotide
ucuacugugaaaauucaucggu

SEQ ID NO: 1105 - RNA, 23 nt, Artificial Sequence
  Description of Artificial Sequence: Synthetic oligonucleotide
ucuacugugaaaauucaucggcu

SEQ ID NO: 1106 - RNA, 22 nt, Artificial Sequence
  Description of Artificial Sequence: Synthetic oligonucleotide
ccuucgguccucaaguccuuca

SEQ ID NO: 1107 - RNA, 24 nt, Artificial Sequence
  Description of Artificial Sequence: Synthetic oligonucleotide
uucgaguccaucaaauccuauagu

SEQ ID NO: 1108 - RNA, 21 nt, Artificial Sequence
  Description of Artificial Sequence: Synthetic oligonucleotide
uacaaugugugcacuucauau

SEQ ID NO: 1109 - RNA, 23 nt, Artificial Sequence
  Description of Artificial Sequence: Synthetic oligonucleotide
uauacugugugcaauucauuucu

SEQ ID NO: 1110 - RNA, 20 nt, Artificial Sequence
  Description of Artificial Sequence: Synthetic oligonucleotide
gcaauucagucucguugucc

SEQ ID NO: 1111 - RNA, 19 nt, Artificial Sequence
  Description of Artificial Sequence: Synthetic oligonucleotide
gcaauucagucucguuguc

SEQ ID NO: 1112 - RNA, 20 nt, Artificial Sequence
  Description of Artificial Sequence: Synthetic oligonucleotide
caauucagucucguuguccc

SEQ ID NO: 1113 - RNA, 19 nt, Artificial Sequence
  Description of Artificial Sequence: Synthetic oligonucleotide
caauucagucucguugucc

SEQ ID NO: 1114 - RNA, 20 nt, Artificial Sequence
  Description of Artificial Sequence: Synthetic oligonucleotide
gcaauucagucucguugugc

SEQ ID NO: 1115 - RNA, 20 nt, Artificial Sequence
  Description of Artificial Sequence: Synthetic oligonucleotide
caauucagucucguugugcc

SEQ ID NO: 1116 - RNA, 22 nt, Artificial Sequence
  Description of Artificial Sequence: Synthetic oligonucleotide
ccacaauguugugacugggccu

SEQ ID NO: 1117 - RNA, 20 nt, Artificial Sequence
  Description of Artificial Sequence: Synthetic oligonucleotide
ccacaauguugugacugggc

SEQ ID NO: 1118 - RNA, 20 nt, Artificial Sequence
  Description of Artificial Sequence: Synthetic oligonucleotide
cacaauguugugacugggcc

SEQ ID NO: 1119 - RNA, 22 nt, Artificial Sequence
  Description of Artificial Sequence: Synthetic oligonucleotide
ugaaccucuuguuauaaagccu

SEQ ID NO: 1120 - RNA, 20 nt, Artificial Sequence
  Description of Artificial Sequence: Synthetic oligonucleotide
ugaaccucuuguuauaaagc

SEQ ID NO: 1121 - RNA, 20 nt, Artificial Sequence
  Description of Artificial Sequence: Synthetic oligonucleotide
gaaccucuuguuauaaagcc

SEQ ID NO: 1122 - RNA, 22 nt, Artificial Sequence
  Description of Artificial Sequence: Synthetic oligonucleotide
ccugcuagcuccaugcuugccu

SEQ ID NO: 1123 - RNA, 20 nt, Artificial Sequence
  Description of Artificial Sequence: Synthetic oligonucleotide
ccugcuagcuccaugcuugc

SEQ ID NO: 1124 - RNA, 19 nt, Artificial Sequence
  Description of Artificial Sequence: Synthetic oligonucleotide
ccugcuagcuccaugcuug

SEQ ID NO: 1125 - RNA, 20 nt, Artificial Sequence
  Description of Artificial Sequence: Synthetic oligonucleotide
cugcuagcuccaugcuugcc

SEQ ID NO: 1126 - RNA, 22 nt, Artificial Sequence
  Description of Artificial Sequence: Synthetic oligonucleotide
ccgacaaccaguauuugggccu

SEQ ID NO: 1127 - RNA, 20 nt, Artificial Sequence
  Description of Artificial Sequence: Synthetic oligonucleotide
ccgacaaccaguauuugggc

SEQ ID NO: 1128 - RNA, 19 nt, Artificial Sequence
  Description of Artificial Sequence: Synthetic oligonucleotide
ccgacaaccaguauuuggg

SEQ ID NO: 1129 - RNA, 20 nt, Artificial Sequence
  Description of Artificial Sequence: Synthetic oligonucleotide
cgacaaccaguauuugggcc

SEQ ID NO: 1130 - RNA, 19 nt, Artificial Sequence
  Description of Artificial Sequence: Synthetic oligonucleotide
cgacaaccaguauuugggc

SEQ ID NO: 1131 - RNA, 22 nt, Artificial Sequence
  Description of Artificial Sequence: Synthetic oligonucleotide
gcaauucagucucguuguaccu

SEQ ID NO: 1132 - RNA, 20 nt, Artificial Sequence
  Description of Artificial Sequence: Synthetic oligonucleotide
gcaauucagucucguuguac

SEQ ID NO: 1133 - RNA, 19 nt, Artificial Sequence
  Description of Artificial Sequence: Synthetic oligonucleotide
gcaauucagucucguugua

SEQ ID NO: 1134 - RNA, 20 nt, Artificial Sequence
  Description of Artificial Sequence: Synthetic oligonucleotide
caauucagucucguuguacc

SEQ ID NO: 1135 - RNA, 22 nt, Artificial Sequence
  Description of Artificial Sequence: Synthetic oligonucleotide
gcaauucagacucguuguaccu

SEQ ID NO: 1136 - RNA, 20 nt, Artificial Sequence
  Description of Artificial Sequence: Synthetic oligonucleotide
gcaauucagacucguuguac

SEQ ID NO: 1137 - RNA, 19 nt, Artificial Sequence
  Description of Artificial Sequence: Synthetic oligonucleotide
gcaauucagacucguugua

SEQ ID NO: 1138 - RNA, 20 nt, Artificial Sequence
  Description of Artificial Sequence: Synthetic oligonucleotide
caauucagacucguuguacc

SEQ ID NO: 1139 - RNA, 22 nt, Artificial Sequence
  Description of Artificial Sequence: Synthetic oligonucleotide
agcaauucagucucguuguacc

SEQ ID NO: 1140 - RNA, 21 nt, Artificial Sequence
  Description of Artificial Sequence: Synthetic oligonucleotide
agcaauucagucucguuguac

SEQ ID NO: 1141 - RNA, 21 nt, Artificial Sequence
  Description of Artificial Sequence: Synthetic oligonucleotide
agguuuaugaacugacguuac

SEQ ID NO: 1142 - RNA, 22 nt, Artificial Sequence
  Description of Artificial Sequence: Synthetic oligonucleotide
agguuuaugaacugacguuacc

SEQ ID NO: 1143 - RNA, 21 nt, Artificial Sequence
  Description of Artificial Sequence: Synthetic oligonucleotide
accacaauguugugacuggac

SEQ ID NO: 1144 - RNA, 22 nt, Artificial Sequence
  Description of Artificial Sequence: Synthetic oligonucleotide
accacaauguugugacuggacc

SEQ ID NO: 1145 - RNA, 23 nt, Artificial Sequence
  Description of Artificial Sequence: Synthetic oligonucleotide
ccacaauguugugacuggaccgu

SEQ ID NO: 1146 - RNA, 22 nt, Artificial Sequence
  Description of Artificial Sequence: Synthetic oligonucleotide
ccacaauguugugacuggaccg

SEQ ID NO: 1147 - RNA, 20 nt, Artificial Sequence
  Description of Artificial Sequence: Synthetic oligonucleotide
ccacaauguugugacuggac

SEQ ID NO: 1148 - RNA, 20 nt, Artificial Sequence
  Description of Artificial Sequence: Synthetic oligonucleotide
cacaauguugugacuggacc

SEQ ID NO: 1149 - RNA, 22 nt, Artificial Sequence
  Description of Artificial Sequence: Synthetic oligonucleotide
accugcuagcuccaugcuuccc

SEQ ID NO: 1150 - RNA, 21 nt, Artificial Sequence
  Description of Artificial Sequence: Synthetic oligonucleotide
accugcuagcuccaugcuucc

SEQ ID NO: 1151 - RNA, 20 nt, Artificial Sequence
  Description of Artificial Sequence: Synthetic oligonucleotide
accugcuagcuccaugcuuc

SEQ ID NO: 1152 - RNA, 20 nt, Artificial Sequence
  Description of Artificial Sequence: Synthetic oligonucleotide
ccugcuagcuccaugcuucc

SEQ ID NO: 1153 - RNA, 19 nt, Artificial Sequence
  Description of Artificial Sequence: Synthetic oligonucleotide
ccugcuagcuccaugcuuc

SEQ ID NO: 1154 - RNA, 20 nt, Artificial Sequence
  Description of Artificial Sequence: Synthetic oligonucleotide
cugcuagcuccaugcuuccc

SEQ ID NO: 1155 - RNA, 19 nt, Artificial Sequence
  Description of Artificial Sequence: Synthetic oligonucleotide
cugcuagcuccaugcuucc

SEQ ID NO: 1156 - RNA, 22 nt, Artificial Sequence
  Description of Artificial Sequence: Synthetic oligonucleotide
accgacaaccaguauuuggacc

SEQ ID NO: 1157 - RNA, 21 nt, Artificial Sequence
  Description of Artificial Sequence: Synthetic oligonucleotide
accgacaaccaguauuuggac

SEQ ID NO: 1158 - RNA, 23 nt, Artificial Sequence
  Description of Artificial Sequence: Synthetic oligonucleotide
ccgacaaccaguauuuggaccgu

SEQ ID NO: 1159 - RNA, 23 nt, Artificial Sequence
  Description of Artificial Sequence: Synthetic oligonucleotide
ccgacaaccaguauuuggaccgu

SEQ ID NO: 1160 - RNA, 20 nt, Artificial Sequence
  Description of Artificial Sequence: Synthetic oligonucleotide
ccgacaaccaguauuuggac

SEQ ID NO: 1161 - RNA, 20 nt, Artificial Sequence
  Description of Artificial Sequence: Synthetic oligonucleotide
cgacaaccaguauuuggacc

SEQ ID NO: 1162 - RNA, 21 nt, Artificial Sequence
  Description of Artificial Sequence: Synthetic oligonucleotide
ccugcuagcaccgugcuuacc

SEQ ID NO: 1163 - DNA, 13669 bp, Homo sapiens
ttgctgtgtgaggcagaacctgcgggggcaggggcgggctggttccctggccagccattggcagagtccgcaggctagggctgtcaatcatgctggccggcgtggccccgcctccgccggcgcggccccgcctccgccggcgcagcgtctgggacgcaaggcgccgtgggggctgccgggacgggtccaagatggacggccgctcaggttctgcttttacctgcggcccagagccccattcattgccccggtgctgagcggcgccgcgagtcggcccgaggcctccggggactgccgtgccgggcgggagaccgccatggcgaccctggaaaagctgatgaaggccttcgagtccctcaagtccttccagcagcagcagcagcagcagcagcagcagcagcagcagcagcagcagcagcagcagcagcagcaacagccgccaccgccgccgccgccgccgccgcctcctcagcttcctcagccgccgccgcaggcacagccgctgctgcctcagccgcagccgcccccgccgccgcccccgccgccacccggcccggctgtggctgaggagccgctgcaccgaccaaagaaagaactttcagctaccaagaaagaccgtgtgaatcattgtctgacaatatgtgaaaacatagtggcacagtctgtcagaaattctccagaatttcagaaacttctgggcatcgctatggaactttttctgctgtgcagtgatgacgcagagtcagatgtcaggatggtggctgacgaatgcctcaacaaagttatcaaagctttgatggattctaatcttccaaggttacagctcgagctctataaggaaattaaaaagaatggtgcccctcggagtttgcgtgctgccctgtggaggtttgctgagctggctcacctggttcggcctcagaaatgcaggccttacctggtgaaccttctgccgtgcctgactcgaacaagcaagagacccgaagaatcagtccaggagaccttggctgcagctgttcccaaaattatggcttcttttggcaattttgcaaatgacaatgaaattaaggttttgttaaaggccttcatagcgaacctgaagtcaagctcccccaccattcggcggacagcggctggatcagcagtgagcatctgccagcactcaagaaggacacaatatttctatagttggctactaaatgtgctcttaggcttactcgttcctgtcgaggatgaacactccactctgctgattcttggcgtgctgctcaccctgaggtatttggtgcccttgctgcagcagcaggtcaaggacacaagcctgaaaggcagcttcggagtgacaaggaaagaaatggaagtctctccttctgcagagcagcttgtccaggtttatgaactgacgttacatcatacacagcaccaagaccacaatgttgtgaccggagccctggagctgttgcagcagctcttcagaacgcctccacccgagcttctgcaaaccctgaccgcagtcgggggcattgggcagctcaccgctgctaaggaggagtctggtggccgaagccgtagtgggagtattgtggaacttatagctggagggggttcctcatgcagccctgtcctttcaagaaaacaaaaaggcaaagtgctcttaggagaagaagaagccttggaggatgactctgaatcgagatcggatgtcagcagctctgccttaacagcctcagtgaaggatgagatcagtggagagctggctgcttcttcaggggtttccactccagggtcagcaggtcatgacatcatcacagaacagccacggtcacagcacacactgcaggcggactcagtggatctggccagctgtgacttgacaagctctgccactgatggggatgaggaggatatcttgagccacagctccagccaggtcagcgccgtcccatctgaccctgccatggacctgaatgatgggacccaggcctcgtcgcccatcagcgacagctcccagaccaccaccgaagggcctgattcagctgttaccccttcagacagttctgaaattgtgttagacggtaccgacaaccagtatttgggcctgcagattggacagccccaggatgaagatgaggaagccacaggtattcttcctgatgaagcctcggaggccttcaggaactcttccatggcccttcaacaggcacatttattgaaaaacatgagtcactgcaggcagccttctgacagcagtgttgataaatttgtgttgagagatgaagctactgaaccgggtgatcaagaaaacaagccttgccgcatcaaaggtgacattggacagtccactgatgatgactctgcacctcttgtccattgtgtccgccttttatctgcttcgtttttgctaacagggggaaaaaatgtgctggttccggacagggatgtgagggtcagcgtgaaggccctggccctcagctgtgtgggagcagctgtggccctccacccggaatctttcttcagcaaactctataaagttcctcttgacaccacggaataccctgaggaacagtatgtctcagacatcttgaactacatcgatcatggagacccacaggttcgaggagccactgccattctctgtgggaccctcatctgctccatcctcagcaggtcccgcttccacgtgggagattggatgggcaccattagaaccctcacaggaaatacattttctttggcggattgcattcctttgctgcggaaaacactgaaggatgagtcttctgttacttgcaagttagcttgtacagctgtgaggaactgtgtcatgagtctctgcagcagcagctacagtgagttaggactgcagctgatcatcgatgtgctgactctgaggaacagttcctattggctggtgaggacagagcttctggaaacccttgcagagattgacttcaggctggtgagctttttggaggcaaaagcagaaaacttacacagaggggctcatcattatacagggcttttaaaactgcaagaacgagtgctcaataatgttgtcatccatttgcttggagatgaagaccccagggtgcgacatgttgccgcagcatcactaattaggcttgtcccaaagctgttttataaatgtgaccaaggacaagctgatccagtagtggccgtggcaagagatcaaagcagtgtttacctgaaacttctcatgcatgagacgcagcctccatctcatttctccgtcagcacaataaccagaatatatagaggctataacctactaccaagcataacagacgtcactatggaaaataacctttcaagagttattgcagcagtttctcatgaactaatcacatcaaccaccagagcactcacatttggatgctgtgaagctttgtgtcttctttccactgccttcccagtttgcatttggagtttaggttggcactgtggagtgcctccactgagtgcctcagatgagtctaggaagagctgtaccgttgggatggccacaatgattctgaccctgctctcgtcagcttggttcccattggatctctcagcccatcaagatgctttgattttggccggaaacttgcttgcagccagtgctcccaaatctctgagaagttcatgggcctctgaagaagaagccaacccagcagccaccaagcaagaggaggtctggccagccctgggggaccgggccctggtgcccatggtggagcagctcttctctcacctgctgaaggtgattaacatttgtgcccacgtcctggatgacgtggctcctggacccgcaataaaggcagccttgccttctctaacaaaccccccttctctaagtcccatccgacgaaaggggaaggagaaagaaccaggagaacaagcatctgtaccgttgagtcccaagaaaggcagtgaggccagtgcagcttctagacaatctgatacctcaggtcctgttacaacaagtaaatcctcatcactggggagtttctatcatcttccttcatacctcaaactgcatgatgtcctgaaagctacacacgctaactacaaggtcacgctggatcttcagaacagcacggaaaagtttggagggtttctccgctcagccttggatgttctttctcagatactagagctggccacactgcaggacattgggaagtgtgttgaagagatcctaggatacctgaaatcctgctttagtcgagaaccaatgatggcaactgtttgtgttcaacaattgttgaagactctctttggcacaaacttggcctcccagtttgatggcttatcttccaaccccagcaagtcacaaggccgagcacagcgccttggctcctccagtgtgaggccaggcttgtaccactactgcttcatggccccgtacacccacttcacccaggccctcgctgacgccagcctgaggaacatggtgcaggcggagcaggagaacgacacctcgggatggtttgatgtcctccagaaagtgtctacccagttgaagacaaacctcacgagtgtcacaaagaaccgtgcagataagaatgctattcataatcacattcgtttgtttgaacctcttgttataaaagctttaaaacagtacacgactacaacatgtgtgcagttacagaagcaggttttagatttgctggcgcagctggttcagttacgggttaattactgtcttctggattcagatcaggtgtttattggctttgtattgaaacagtttgaatacattgaagtgggccagttcagggaatcagaggcaatcattccaaacatctttttcttcttggtattactatcttatgaacgctatcattcaaaacagatcattggaattcctaaaatcattcagctctgtgatggcatcatggccagtggaaggaaggctgtgacacatgccataccggctctgcagcccatagtccacgacctctttgtattaagaggaacaaataaagctgatgcaggaaaagagcttgaaacccaaaaagaggtggtggtgtcaatgttactgagactcatccagtaccatcaggtgttggagatgttcattcttgtcctgcagcagtgccacaaggagaatgaagacaagtggaagcgactgtctcgacagatagctgacatcatcctcccaatgttagccaaacagcagatgcacattgactctcatgaagcccttggagtgttaaatacattatttgagattttggccccttcctccctccgtccggtagacatgcttttacggagtatgttcgtcactccaaacacaatggcgtccgtgagcactgttcaactgtggatatcgggaattctggccattttgagggttctgatttcccagtcaactgaagatattgttctttctcgtattcaggagctctccttctctccgtatttaatctcctgtacagtaattaataggttaagagatggggacagtacttcaacgctagaagaacacagtgaagggaaacaaataaagaatttgccagaagaaacattttcaaggtttctattacaactggttggtattcttttagaagacattgttacaaaacagctgaaggtggaaatgagtgagcagcaacatactttctattgccaggaactaggcacactgctaatgtgtctgatccacatcttcaagtctggaatgttccggagaatcacagcagctgccactaggctgttccgcagtgatggctgtggcggcagtttctacaccctggacagcttgaacttgcgggctcgttccatgatcaccacccacccggccctggtgctgctctggtgtcagatactgctgcttgtcaaccacaccgactaccgctggtgggcagaagtgcagcagaccccgaaaagacacagtctgtccagcacaaagttacttagtccccagatgtctggagaagaggaggattctgacttggcagccaaacttggaatgtgcaatagagaaatagtacgaagaggggctctcattctcttctgtgattatgtctgtcagaacctccatgactccgagcacttaacgtggctcattgtaaatcacattcaagatctgatcagcctttcccacgagcctccagtacaggacttcatcagtgccgttcatcggaactctgctgccagcggcctgttcatccaggcaattcagtctcgttgtgaaaacctttcaactccaaccatgctgaagaaaactcttcagtgcttggaggggatccatctcagccagtcgggagctgtgctcacgctgtatgtggacaggcttctgtgcacccctttccgtgtgctggctcgcatggtcgacatccttgcttgtcgccgggtagaaatgcttctggctgcaaatttacagagcagcatggcccagttgccaatggaagaactcaacagaatccaggaataccttcagagcagcgggctcgctcagagacaccaaaggctctattccctgctggacaggtttcgtctctccaccatgcaagactcacttagtccctctcctccagtctcttcccacccgctggacggggatgggcacgtgtcactggaaacagtgagtccggacaaagactggtacgttcatcttgtcaaatcccagtgttggaccaggtcagattctgcactgctggaaggtgcagagctggtgaatcggattcctgctgaagatatgaatgccttcatgatgaactcggagttcaacctaagcctgctagctccatgcttaagcctagggatgagtgaaatttctggtggccagaagagtgccctttttgaagcagcccgtgaggtgactctggcccgtgtgagcggcaccgtgcagcagctccctgctgtccatcatgtcttccagcccgagctgcctgcagagccggcggcctactggagcaagttgaatgatctgtttggggatgctgcactgtatcagtccctgcccactctggcccgggccctggcacagtacctggtggtggtctccaaactgcccagtcatttgcaccttcctcctgagaaagagaaggacattgtgaaattcgtggtggcaacccttgaggccctgtcctggcatttgatccatgagcagatcccgctgagtctggatctccaggcagggctggactgctgctgcctggccctgcagctgcctggcctctggagcgtggtctcctccacagagtttgtgacccacgcctgctccctcatctactgtgtgcacttcatcctggaggccgttgcagtgcagcctggagagcagcttcttagtccagaaagaaggacaaataccccaaaagccatcagcgaggaggaggaggaagtagatccaaacacacagaatcctaagtatatcactgcagcctgtgagatggtggcagaaatggtggagtctctgcagtcggtgttggccttgggtcataaaaggaatagcggcgtgccggcgtttctcacgccattgctaaggaacatcatcatcagcctggcccgcctgccccttgtcaacagctacacacgtgtgcccccactggtgtggaagcttggatggtcacccaaaccgggaggggattttggcacagcattccctgagatccccgtggagttcctccaggaaaaggaagtctttaaggagttcatctaccgcatcaacacactaggctggaccagtcgtactcagtttgaagaaacttgggccaccctccttggtgtcctggtgacgcagcccctcgtgatggagcaggaggagagcccaccagaagaagacacagagaggacccagatcaacgtcctggccgtgcaggccatcacctcactggtgctcagtgcaatgactgtgcctgtggccggcaacccagctgtaagctgcttggagcagcagccccggaacaagcctctgaaagctctcgacaccaggtttgggaggaagctgagcattatcagagggattgtggagcaagagattcaagcaatggtttcaaagagagagaatattgccacccatcatttatatcaggcatgggatcctgtcccttctctgtctccggctactacaggtgccctcatcagccacgagaagctgctgctacagatcaaccccgagcgggagctggggagcatgagctacaaactcggccaggtgtccatacactccgtgtggctggggaacagcatcacacccctgagggaggaggaatgggacgaggaagaggaggaggaggccgacgcccctgcaccttcgtcaccacccacgtctccagtcaactccaggaaacaccgggctggagttgacatccactcctgttcgcagtttttgcttgagttgtacagccgctggatcctgccgtccagctcagccaggaggaccccggccatcctgatcagtgaggtggtcagatcccttctagtggtctcagacttgttcaccgagcgcaaccagtttgagctgatgtatgtgacgctgacagaactgcgaagggtgcacccttcagaagacgagatcctcgctcagtacctggtgcctgccacctgcaaggcagctgccgtccttgggatggacaaggccgtggcggagcctgtcagccgcctgctggagagcacgctcaggagcagccacctgcccagcagggttggagccctgcacggcgtcctctatgtgctggagtgcgacctgctggacgacactgccaagcagctcatcccggtcatcagcgactatctcctctccaacctgaaagggatcgcccactgcgtgaacattcacagccagcagcacgtactggtcatgtgtgccactgcgttttacctcattgagaactatcctctggacgtagggccggaattttcagcatcaataatacagatgtgtggggtgatgctgtctggaagtgaggagtccaccccctccatcatttaccactgtgccctcagaggcctggagcgcctcctgctctctgagcagctctcccgcctggatgcagaatcgctggtcaagctgagtgtggacagagtgaacgtgcacagcccgcaccgggccatggcggctctgggcctgatgctcacctgcatgtacacaggaaaggagaaagtcagtccgggtagaacttcagaccctaatcctgcagcccccgacagcgagtcagtgattgttgctatggagcgggtatctgttctttttgataggatcaggaaaggctttccttgtgaagccagagtggtggccaggatcctgccccagtttctagacgacttcttcccaccccaggacatcatgaacaaagtcatcggagagtttctgtccaaccagcagccatacccccagttcatggccaccgtggtgtataaggtgtttcagactctgcacagcaccgggcagtcgtccatggtccgggactgggtcatgctgtccctctccaacttcacgcagagggccccggtcgccatggccacgtggagcctctcctgcttctttgtcagcgcgtccaccagcccgtgggtcgcggcgatcctcccacatgtcatcagcaggatgggcaagctggagcaggtggacgtgaaccttttctgcctggtcgccacagacttctacagacaccagatagaggaggagctcgaccgcagggccttccagtctgtgcttgaggtggttgcagccccaggaagcccatatcaccggctgctgacttgtttacgaaatgtccacaaggtcaccacctgctgagcgccatggtgggagagactgtgaggcggcagctggggccggagcctttggaagtctgcgcccttgtgccctgcctccaccgagccagcttggtccctatgggcttccgcacatgccgcgggcggccaggcaacgtgcgtgtctctgccatgtggcagaagtgctctttgtggcagtggccaggcagggagtgtctgcagtcctggtggggctgagcctgaggccttccagaaagcaggagcagctgtgctgcaccccatgtgggtgaccaggtcctttctcctgatagtcacctgctggttgttgccaggttgcagctgctcttgcatctgggccagaagtcctccctcctgcaggctggctgttggcccctctgctgtcctgcagtagaaggtgccgtgagcaggctttgggaacactggcctgggtctccctggtggggtgtgcatgccacgccccgtgtctggatgcacagatgccatggcctgtgctgggccagtggctgggggtgctagacacccggcaccattctcccttctctcttttcttctcaggatttaaaatttaattatatcagtaaagagattaattttaacgtaactctttctatgcccgtgtaaagtatgtgaatcgcaaggcctgtgctgcatgcgacagcgtccggggtggtggacagggcccccggccacgctccctctcctgtagccactggcatagccctcctgagcacccgctgacatttccgttgtacatgttcctgtttatgcattcacaaggtgactgggatgtagagaggcgttagtgggcaggtggccacagcaggactgaggacaggcccccattatcctaggggtgcgctcacctgcagcccctcctcctcgggcacagacgactgtcgttctccacccaccagtcagggacagcagcctccctgtcactcagctgagaaggccagccctccctggctgtgagcagcctccactgtgtccagagacatgggcctcccactcctgttccttgctagccctggggtggcgtctgcctaggagctggctggcaggtgttgggacctgctgctccatggatgcatgccctaagagtgtcactgagctgtgttttgtctgagcctctctcggtcaacagcaaagcttggtgtcttggcactgttagtgacagagcccagcatcccttctgcccccgttccagctgacatcttgcacggtgaccccttttagtcaggagagtgcagatctgtgctcatcggagactgccccacggccctgtcagagccgccactcctatccccaggccaggtccctggaccagcctcctgtttgcaggcccagaggagccaagtcattaaaatggaagtggattctggatggccgggctgctgctgatgtaggagctggatttgggagctctgcttgccgactggctgtgagacgaggcaggggctctgcttcctcagccctagaggcgagccaggcaaggttggcgactgtcatgtggcttggtttggtcatgcccgtcgatgttttgggtattgaatgtggtaagtggaggaaatgttggaactctgtgcaggtgctgccttgagacccccaagcttccacctgtccctctcctatgtggcagctggggagcagctgagatgtggacttgtatgctgcccacatacgtgagggggagctgaaagggagcccctcctctgagcagcctctgccaggcctgtatgaggcttttcccaccagctcccaacagaggcctcccccagccaggaccacctcgtcctcgtggcggggcagcaggagcggtagaaaggggtccgatgtttgaggaggcccttaagggaagctactgaattataacacgtaagaaaatcaccattccgtattggttgggggctcctgtttctcatcctagctttttcctggaaagcccgctagaaggtttgggaacgaggggaaagttctcagaactgttggctgctccccacccgcctcccgcctcccccgcaggttatgtcagcagctctgagacagcagtatcacaggccagatgttgttcctggctagatgtttacatttgtaagaaataacactgtgaatgtaaaacagagccattcccttggaatgcatatcgctgggctcaacatagagtttgtcttcctcttgtttacgacgtgatctaaaccagtccttagcaaggggctcagaacaccccgctctggcagtaggtgtcccccacccccaaagacctgcctgtgtgctccggagatgaatatgagctcattagtaaaaatgacttcacccacgcatatacataaagtatccatgcatgtgcatatagacacatctataattttacacacacacctctcaagacggagatgcatggcctctaagagtgcccgtgtcggttcttcctggaagttgactttccttagacccgccaggtcaagttagccgcgtgacggacatccaggcgtgggacgtggtcagggcagggctcattcattgcccactaggatcccactggcgaagatggtctccatatcagctctctgcagaagggaggaagactttatcatgttcctaaaaatctgtggcaagcacccatcgtattatccaaattttgttgcaaatgtgattaatttggttgtcaagttttgggggtgggctgtggggagattgcttttgttttcctgctggtaatatcgggaaagattttaatgaaaccagggtagaattgtttggcaatgcactgaagcgtgtttctttcccaaaatgtgcctcccttccgctgcgggcccagctgagtctatgtaggtgatgtttccagctgccaagtgctctttgttactgtccaccctcatttctgccagcgcatgtgtcctttcaaggggaaaatgtgaagctgaaccccctccagacacccagaatgtagcatctgagaaggccctgtgccctaaaggacacccctcgcccccatcttcatggagggggtcatttcagagccctcggagccaatgaacagctcctcctcttggagctgagatgagccccacgtggagctcgggacggatagtagacagcaataactcggtgtgtggccgcctggcaggtggaacttcctcccgttgcggggtggagtgaggttagttctgtgtgtctggtgggtggagtcaggcttctcttgctacctgtgagcatccttcccagcagacatcctcatcgggctttgtccctcccccgcttcctccctctgcggggaggacccgggaccacagctgctggccagggtagacttggagctgtcctccagaggggtcacgtgtaggagtgagaagaaggaagatcttgagagctgctgagggaccttggagagctcaggatggctcagacgaggacactcgcttgccgggcctgggcctcctgggaaggagggagctgctcagaatgccgcatgacaactgaaggcaacctggaaggttcaggggccgctcttcccccatgtgcctgtcacgctctggtgcagtcaaaggaacgccttcccctcagttgtttctaagagcagagtctcccgctgcaatctgggtggtaactgccagccttggaggatcgtggccaacgtggacctgcctacggagggtgggctctgacccaagtggggcctccttgtccaggtctcactgctttgcaccgtggtcagagggactgtcagctgagcttgagctcccctggagccagcagggctgtgatgggcgagtcccggagccccacccagacctgaatgcttctgagagcaaagggaaggactgacgagagatgtatatttaattttttaactgctgcaaacattgtacatccaaattaaaggaaaaaaatggaaaccatcaaaaaaaaaaaaaaaaaa

SEQ ID NO: 1164 - DNA, 21 bp, Artificial Sequence
  Description of Artificial Sequence: Synthetic oligonucleotide
  Description of Combined DNA/RNA Molecule: Synthetic oligonucleotide
  misc_feature (20)..(21): Deoxythymidine dinucleotide
uuuauaggccagaccuccgtt

SEQ ID NO: 1165 - DNA, 21 bp, Artificial Sequence
  Description of Artificial Sequence: Synthetic oligonucleotide
  Description of Combined DNA/RNA Molecule: Synthetic oligonucleotide
  misc_feature (20)..(21): Deoxythymidine dinucleotide
uuuuauaggccagaccucctt

SEQ ID NO: 1166 - DNA, 21 bp, Artificial Sequence
  Description of Artificial Sequence: Synthetic oligonucleotide
  Description of Combined DNA/RNA Molecule: Synthetic oligonucleotide
  misc_feature (20)..(21): Deoxythymidine dinucleotide
ucuuuauaggccagaccuctt

SEQ ID NO: 1167 - DNA, 21 bp, Artificial Sequence
  Description of Artificial Sequence: Synthetic oligonucleotide
  Description of Combined DNA/RNA Molecule: Synthetic oligonucleotide
  misc_feature (20)..(21): Deoxythymidine dinucleotide
uacuuuauaggccagaccutt

SEQ ID NO: 1168 - DNA, 21 bp, Artificial Sequence
  Description of Artificial Sequence: Synthetic oligonucleotide
  Description of Combined DNA/RNA Molecule: Synthetic oligonucleotide
  misc_feature (20)..(21): Deoxythymidine dinucleotide
uuacuuuauaggccagacctt

SEQ ID NO: 1169 - DNA, 21 bp, Artificial Sequence
  Description of Artificial Sequence: Synthetic oligonucleotide
  Description of Combined DNA/RNA Molecule: Synthetic oligonucleotide
  misc_feature (20)..(21): Deoxythymidine dinucleotide
uacuacuuuauaggccagatt

SEQ ID NO: 1170 - DNA, 21 bp, Artificial Sequence
  Description of Artificial Sequence: Synthetic oligonucleotide
  Description of Combined DNA/RNA Molecule: Synthetic oligonucleotide
  misc_feature (20)..(21): Deoxythymidine dinucleotide
ugacuacuuuauaggccagtt

SEQ ID NO: 1171 - DNA, 21 bp, Artificial Sequence
  Description of Artificial Sequence: Synthetic oligonucleotide
  Description of Combined DNA/RNA Molecule: Synthetic oligonucleotide
  misc_feature (20)..(21): Deoxythymidine dinucleotide
ucgacuacuuuauaggccatt

SEQ ID NO: 1172 - DNA, 21 bp, Artificial Sequence
  Description of Artificial Sequence: Synthetic oligonucleotide
  Description of Combined DNA/RNA Molecule: Synthetic oligonucleotide
  misc_feature (20)..(21): Deoxythymidine dinucleotide
ugcgacuacuuuauaggcctt

SEQ ID NO: 1173 - DNA, 21 bp, Artificial Sequence
  Description of Artificial Sequence: Synthetic oligonucleotide
  Description of Combined DNA/RNA Molecule: Synthetic oligonucleotide
  misc_feature (20)..(21): Deoxythymidine dinucleotide
ucgcgacuacuuuauaggctt

SEQ ID NO: 1174 - DNA, 21 bp, Artificial Sequence
  Description of Artificial Sequence: Synthetic oligonucleotide
  Description of Combined DNA/RNA Molecule: Synthetic oligonucleotide
  misc_feature (20)..(21): Deoxythymidine dinucleotide
uccgcgacuacuuuauaggtt

SEQ ID NO: 1175 - DNA, 21 bp, Artificial Sequence
  Description of Artificial Sequence: Synthetic oligonucleotide
  Description of Combined DNA/RNA Molecule: Synthetic oligonucleotide
  misc_feature (20)..(21): Deoxythymidine dinucleotide
ugcugcaggagacuacgactt

SEQ ID NO: 1176 - DNA, 21 bp, Artificial Sequence
  Description of Artificial Sequence: Synthetic oligonucleotide
  Description of Combined DNA/RNA Molecule: Synthetic oligonucleotide
  misc_feature (20)..(21): Deoxythymidine dinucleotide
uacgcugcaggagacuacgtt

SEQ ID NO: 1177 - DNA, 21 bp, Artificial Sequence
  Description of Artificial Sequence: Synthetic oligonucleotide
  Description of Combined DNA/RNA Molecule: Synthetic oligonucleotide
  misc_feature (20)..(21): Deoxythymidine dinucleotide
ugacgcugcaggagacuactt

SEQ ID NO: 1178 - DNA, 21 bp, Artificial Sequence
  Description of Artificial Sequence: Synthetic oligonucleotide
  Description of Combined DNA/RNA Molecule: Synthetic oligonucleotide
  misc_feature (20)..(21): Deoxythymidine dinucleotide
uagacgcugcaggagacuatt

SEQ ID NO: 1179 - DNA, 21 bp, Artificial Sequence
  Description of Artificial Sequence: Synthetic oligonucleotide
  Description of Combined DNA/RNA Molecule: Synthetic oligonucleotide
  misc_feature (20)..(21): Deoxythymidine dinucleotide
ucacggccuucgucgccautt

SEQ ID NO: 1180 - DNA, 21 bp, Artificial Sequence
  Description of Artificial Sequence: Synthetic oligonucleotide
  Description of Combined DNA/RNA Molecule: Synthetic oligonucleotide
  misc_feature (20)..(21): Deoxythymidine dinucleotide
ucgcacacggccuucgucgtt

SEQ ID NO: 1181 - DNA, 21 bp, Artificial Sequence
  Description of Artificial Sequence: Synthetic oligonucleotide
  Description of Combined DNA/RNA Molecule: Synthetic oligonucleotide
  misc_feature (20)..(21): Deoxythymidine dinucleotide
uagcacgcacacggccuuctt

SEQ ID NO: 1182 - DNA, 21 bp, Artificial Sequence
  Description of Artificial Sequence: Synthetic oligonucleotide
  Description of Combined DNA/RNA Molecule: Synthetic oligonucleotide
  misc_feature (20)..(21): Deoxythymidine dinucleotide
uuucagcacgcacacggcctt

SEQ ID NO: 1183 - DNA, 21 bp, Artificial Sequence
  Description of Artificial Sequence: Synthetic oligonucleotide
  Description of Combined DNA/RNA Molecule: Synthetic oligonucleotide
  misc_feature (20)..(21): Deoxythymidine dinucleotide
ugcacugggccgucgcccutt

SEQ ID NO: 1184 - DNA, 21 bp, Artificial Sequence
  Description of Artificial Sequence: Synthetic oligonucleotide
  Description of Combined DNA/RNA Molecule: Synthetic oligonucleotide
  misc_feature (20)..(21): Deoxythymidine dinucleotide
uaauugaugaugcccugcatt

SEQ ID NO: 1185 - DNA, 21 bp, Artificial Sequence
  Description of Artificial Sequence: Synthetic oligonucleotide
  Description of Combined DNA/RNA Molecule: Synthetic oligonucleotide
  misc_feature (20)..(21): Deoxythymidine dinucleotide
uaaauugaugaugcccugctt

SEQ ID NO: 1186 - DNA, 21 bp, Artificial Sequence
  Description of Artificial Sequence: Synthetic oligonucleotide
  Description of Combined DNA/RNA Molecule: Synthetic oligonucleotide
  misc_feature (20)..(21): Deoxythymidine dinucleotide
ucgaaauugaugaugcccutt

SEQ ID NO: 1187 - DNA, 21 bp, Artificial Sequence
  Description of Artificial Sequence: Synthetic oligonucleotide
  Description of Combined DNA/RNA Molecule: Synthetic oligonucleotide
  misc_feature (20)..(21): Deoxythymidine dinucleotide
uucgaaauugaugaugccctt

SEQ ID NO: 1188 - DNA, 21 bp, Artificial Sequence
  Description of Artificial Sequence: Synthetic oligonucleotide
  Description of Combined DNA/RNA Molecule: Synthetic oligonucleotide
  misc_feature (20)..(21): Deoxythymidine dinucleotide
ucucgaaauugaugaugcctt

SEQ ID NO: 1189 - DNA, 21 bp, Artificial Sequence
  Description of Artificial Sequence: Synthetic oligonucleotide
  Description of Combined DNA/RNA Molecule: Synthetic oligonucleotide
  misc_feature (20)..(21): Deoxythymidine dinucleotide
ugcucgaaauugaugaugctt

SEQ ID NO: 1190 - DNA, 21 bp, Artificial Sequence
  Description of Artificial Sequence: Synthetic oligonucleotide
  Description of Combined DNA/RNA Molecule: Synthetic oligonucleotide
  misc_feature (20)..(21): Deoxythymidine dinucleotide
uugcucgaaauugaugaugtt

SEQ ID NO: 1191 - DNA, 21 bp, Artificial Sequence
  Description of Artificial Sequence: Synthetic oligonucleotide
  Description of Combined DNA/RNA Molecule: Synthetic oligonucleotide
  misc_feature (20)..(21): Deoxythymidine dinucleotide
uuuccuucugcucgaaauutt

SEQ ID NO: 1192 - DNA, 21 bp, Artificial Sequence
  Description of Artificial Sequence: Synthetic oligonucleotide
  Description of Combined DNA/RNA Molecule: Synthetic oligonucleotide
  misc_feature (20)..(21): Deoxythymidine dinucleotide
uacuuuccuucugcucgaatt

SEQ ID NO: 1193 - DNA, 21 bp, Artificial Sequence
  Description of Artificial Sequence: Synthetic oligonucleotide
  Description of Combined DNA/RNA Molecule: Synthetic oligonucleotide
  misc_feature (20)..(21): Deoxythymidine dinucleotide
uuacuuuccuucugcucgatt

SEQ ID NO: 1194 - DNA, 21 bp, Artificial Sequence
  Description of Artificial Sequence: Synthetic oligonucleotide
  Description of Combined DNA/RNA Molecule: Synthetic oligonucleotide
  misc_feature (20)..(21): Deoxythymidine dinucleotide
uaaugcuuccccacaccuutt

SEQ ID NO: 1195 - DNA, 21 bp, Artificial Sequence
  Description of Artificial Sequence: Synthetic oligonucleotide
  Description of Combined DNA/RNA Molecule: Synthetic oligonucleotide
  misc_feature (20)..(21): Deoxythymidine dinucleotide
uuuaaugcuuccccacacctt

SEQ ID NO: 1196 - DNA, 21 bp, Artificial Sequence
  Description of Artificial Sequence: Synthetic oligonucleotide
  Description of Combined DNA/RNA Molecule: Synthetic oligonucleotide
  misc_feature (20)..(21): Deoxythymidine dinucleotide
ugcaggccuucagucaguctt

SEQ ID NO: 1197 - DNA, 21 bp, Artificial Sequence
  Description of Artificial Sequence: Synthetic oligonucleotide
  Description of Combined DNA/RNA Molecule: Synthetic oligonucleotide
  misc_feature (20)..(21): Deoxythymidine dinucleotide
uaugcaggccuucagucagtt

SEQ ID NO: 1198 - DNA, 21 bp, Artificial Sequence
  Description of Artificial Sequence: Synthetic oligonucleotide
  Description of Combined DNA/RNA Molecule: Synthetic oligonucleotide
  misc_feature (20)..(21): Deoxythymidine dinucleotide
ucaugcaggccuucagucatt

SEQ ID NO: 1199 - DNA, 21 bp, Artificial Sequence
  Description of Artificial Sequence: Synthetic oligonucleotide
  Description of Combined DNA/RNA Molecule: Synthetic oligonucleotide
  misc_feature (20)..(21): Deoxythymidine dinucleotide
uaauccaugcaggccuucatt

SEQ ID NO: 1200 - DNA, 21 bp, Artificial Sequence
  Description of Artificial Sequence: Synthetic oligonucleotide
  Description of Combined DNA/RNA Molecule: Synthetic oligonucleotide
  misc_feature (20)..(21): Deoxythymidine dinucleotide
ugaauccaugcaggccuuctt

SEQ ID NO: 1201 - DNA, 21 bp, Artificial Sequence
  Description of Artificial Sequence: Synthetic oligonucleotide
  Description of Combined DNA/RNA Molecule: Synthetic oligonucleotide
  misc_feature (20)..(21): Deoxythymidine dinucleotide
ugaacauggaauccaugcatt

SEQ ID NO: 1202 - DNA, 21 bp, Artificial Sequence
  Description of Artificial Sequence: Synthetic oligonucleotide
  Description of Combined DNA/RNA Molecule: Synthetic oligonucleotide
  misc_feature (20)..(21): Deoxythymidine dinucleotide
uaugaacauggaauccaugtt

SEQ ID NO: 1203 - DNA, 21 bp, Artificial Sequence
  Description of Artificial Sequence: Synthetic oligonucleotide
  Description of Combined DNA/RNA Molecule: Synthetic oligonucleotide
  misc_feature (20)..(21): Deoxythymidine dinucleotide
ucucaugaacauggaaucctt

SEQ ID NO: 1204 - DNA, 21 bp, Artificial Sequence
  Description of Artificial Sequence: Synthetic oligonucleotide
  Description of Combined DNA/RNA Molecule: Synthetic oligonucleotide
  misc_feature (20)..(21): Deoxythymidine dinucleotide
uaaacucaugaacauggaatt

SEQ ID NO: 1205 - DNA, 21 bp, Artificial Sequence
  Description of Artificial Sequence: Synthetic oligonucleotide
  Description of Combined DNA/RNA Molecule: Synthetic oligonucleotide
  misc_feature (20)..(21): Deoxythymidine dinucleotide
uaucuccaaacucaugaactt

SEQ ID NO: 1206 - DNA, 21 bp, Artificial Sequence
  Description of Artificial Sequence: Synthetic oligonucleotide
  Description of Combined DNA/RNA Molecule: Synthetic oligonucleotide
  misc_feature (20)..(21): Deoxythymidine dinucleotide
uuaucuccaaacucaugaatt

SEQ ID NO: 1207 - DNA, 21 bp, Artificial Sequence
  Description of Artificial Sequence: Synthetic oligonucleotide
  Description of Combined DNA/RNA Molecule: Synthetic oligonucleotide
  misc_feature (20)..(21): Deoxythymidine dinucleotide
uguauuaucuccaaacucatt

SEQ ID NO: 1208 - DNA, 21 bp, Artificial Sequence
  Description of Artificial Sequence: Synthetic oligonucleotide
  Description of Combined DNA/RNA Molecule: Synthetic oligonucleotide
  misc_feature (20)..(21): Deoxythymidine dinucleotide
uuguauuaucuccaaacuctt

SEQ ID NO: 1209 - DNA, 21 bp, Artificial Sequence
  Description of Artificial Sequence: Synthetic oligonucleotide
  Description of Combined DNA/RNA Molecule: Synthetic oligonucleotide
  misc_feature (20)..(21): Deoxythymidine dinucleotide
uccugcacugguacagccutt

SEQ ID NO: 1210 - DNA, 21 bp, Artificial Sequence
  Description of Artificial Sequence: Synthetic oligonucleotide
  Description of Combined DNA/RNA Molecule: Synthetic oligonucleotide
  misc_feature (20)..(21): Deoxythymidine dinucleotide
uaccugcacugguacagcctt

SEQ ID NO: 1211 - DNA, 21 bp, Artificial Sequence
  Description of Artificial Sequence: Synthetic oligonucleotide
  Description of Combined DNA/RNA Molecule: Synthetic oligonucleotide
  misc_feature (20)..(21): Deoxythymidine dinucleotide
uauuaaagugaggaccugctt

SEQ ID NO: 1212 - DNA, 21 bp, Artificial Sequence
  Description of Artificial Sequence: Synthetic oligonucleotide
  Description of Combined DNA/RNA Molecule: Synthetic oligonucleotide
  misc_feature (20)..(21): Deoxythymidine dinucleotide
ugauuaaagugaggaccugtt

SEQ ID NO: 1213 - DNA, 21 bp, Artificial Sequence
  Description of Artificial Sequence: Synthetic oligonucleotide
  Description of Combined DNA/RNA Molecule: Synthetic oligonucleotide
  misc_feature (20)..(21): Deoxythymidine dinucleotide
ugauagaggauuaaagugatt

SEQ ID NO: 1214 - DNA, 21 bp, Artificial Sequence
  Description of Artificial Sequence: Synthetic oligonucleotide
  Description of Combined DNA/RNA Molecule: Synthetic oligonucleotide
  misc_feature (20)..(21): Deoxythymidine dinucleotide
uaccguguuuucuggauagtt

SEQ ID NO: 1215 - DNA, 21 bp, Artificial Sequence
  Description of Artificial Sequence: Synthetic oligonucleotide
  Description of Combined DNA/RNA Molecule: Synthetic oligonucleotide
  misc_feature (20)..(21): Deoxythymidine dinucleotide
ucaccguguuuucuggauatt

SEQ ID NO: 1216 - DNA, 21 bp, Artificial Sequence
  Description of Artificial Sequence: Synthetic oligonucleotide
  Description of Combined DNA/RNA Molecule: Synthetic oligonucleotide
  misc_feature (20)..(21): Deoxythymidine dinucleotide
uccaccguguuuucuggautt

SEQ ID NO: 1217 - DNA, 21 bp, Artificial Sequence
  Description of Artificial Sequence: Synthetic oligonucleotide
  Description of Combined DNA/RNA Molecule: Synthetic oligonucleotide
  misc_feature (20)..(21): Deoxythymidine dinucleotide
ugcccaccguguuuucuggtt

SEQ ID NO: 1218 - DNA, 21 bp, Artificial Sequence
  Description of Artificial Sequence: Synthetic oligonucleotide
  Description of Combined DNA/RNA Molecule: Synthetic oligonucleotide
  misc_feature (20)..(21): Deoxythymidine dinucleotide
uuuggcccaccguguuuuctt

SEQ ID NO: 1219 - DNA, 21 bp, Artificial Sequence
  Description of Artificial Sequence: Synthetic oligonucleotide
  Description of Combined DNA/RNA Molecule: Synthetic oligonucleotide
  misc_feature (20)..(21): Deoxythymidine dinucleotide
uuuuggcccaccguguuuutt

SEQ ID NO: 1220 - DNA, 21 bp, Artificial Sequence
  Description of Artificial Sequence: Synthetic oligonucleotide
  Description of Combined DNA/RNA Molecule: Synthetic oligonucleotide
  misc_feature (20)..(21): Deoxythymidine dinucleotide
uucauccuuuggcccaccgtt

SEQ ID NO: 1221 - DNA, 21 bp, Artificial Sequence
  Description of Artificial Sequence: Synthetic oligonucleotide
  Description of Combined DNA/RNA Molecule: Synthetic oligonucleotide
  misc_feature (20)..(21): Deoxythymidine dinucleotide
ucaugccucucuucauccutt

SEQ ID NO: 1222 - DNA, 21 bp, Artificial Sequence
  Description of Artificial Sequence: Synthetic oligonucleotide
  Description of Combined DNA/RNA Molecule: Synthetic oligonucleotide
  misc_feature (20)..(21): Deoxythymidine dinucleotide
ucaacaugccucucuucautt

SEQ ID NO: 1223 - DNA, 21 bp, Artificial Sequence
  Description of Artificial Sequence: Synthetic oligonucleotide
  Description of Combined DNA/RNA Molecule: Synthetic oligonucleotide
  misc_feature (20)..(21): Deoxythymidine dinucleotide
ugucuccaacaugccucuctt

SEQ ID NO: 1224 - DNA, 21 bp, Artificial Sequence
  Description of Artificial Sequence: Synthetic oligonucleotide
  Description of Combined DNA/RNA Molecule: Synthetic oligonucleotide
  misc_feature (20)..(21): Deoxythymidine dinucleotide
uagucuccaacaugccucutt

SEQ ID NO: 1225 - DNA, 21 bp, Artificial Sequence
  Description of Artificial Sequence: Synthetic oligonucleotide
  Description of Combined DNA/RNA Molecule: Synthetic oligonucleotide
  misc_feature (20)..(21): Deoxythymidine dinucleotide
uugcccaagucuccaacautt

SEQ ID NO: 1226 - DNA, 21 bp, Artificial Sequence
  Description of Artificial Sequence: Synthetic oligonucleotide
  Description of Combined DNA/RNA Molecule: Synthetic oligonucleotide
  misc_feature (20)..(21): Deoxythymidine dinucleotide
uauugcccaagucuccaactt

SEQ ID NO: 1227 - DNA, 21 bp, Artificial Sequence
  Description of Artificial Sequence: Synthetic oligonucleotide
  Description of Combined DNA/RNA Molecule: Synthetic oligonucleotide
  misc_feature (20)..(21): Deoxythymidine dinucleotide
ucacauugcccaagucucctt

SEQ ID NO: 1228 - DNA, 21 bp, Artificial Sequence
  Description of Artificial Sequence: Synthetic oligonucleotide
  Description of Combined DNA/RNA Molecule: Synthetic oligonucleotide
  misc_feature (20)..(21): Deoxythymidine dinucleotide
ugucagcagucacauugcctt

SEQ ID NO: 1229 - DNA, 21 bp, Artificial Sequence
  Description of Artificial Sequence: Synthetic oligonucleotide
  Description of Combined DNA/RNA Molecule: Synthetic oligonucleotide
  misc_feature (20)..(21): Deoxythymidine dinucleotide
uuugucagcagucacauugtt

SEQ ID NO: 1230 - DNA, 21 bp, Artificial Sequence
  Description of Artificial Sequence: Synthetic oligonucleotide
  Description of Combined DNA/RNA Molecule: Synthetic oligonucleotide
  misc_feature (20)..(21): Deoxythymidine dinucleotide
uccacaccaucuuugucagtt

SEQ ID NO: 1231 - DNA, 21 bp, Artificial Sequence
  Description of Artificial Sequence: Synthetic oligonucleotide
  Description of Combined DNA/RNA Molecule: Synthetic oligonucleotide
  misc_feature (20)..(21): Deoxythymidine dinucleotide
ugccacaccaucuuugucatt

SEQ ID NO: 1232 - DNA, 21 bp, Artificial Sequence
  Description of Artificial Sequence: Synthetic oligonucleotide
  Description of Combined DNA/RNA Molecule: Synthetic oligonucleotide
  misc_feature (20)..(21): Deoxythymidine dinucleotide
uaugcaauggucuccugagtt

SEQ ID NO: 1233 - DNA, 21 bp, Artificial Sequence
  Description of Artificial Sequence: Synthetic oligonucleotide
  Description of Combined DNA/RNA Molecule: Synthetic oligonucleotide
  misc_feature (20)..(21): Deoxythymidine dinucleotide
ugaugcaauggucuccugatt

SEQ ID NO: 1234 - DNA, 21 bp, Artificial Sequence
  Description of Artificial Sequence: Synthetic oligonucleotide
  Description of Combined DNA/RNA Molecule: Synthetic oligonucleotide
  misc_feature (20)..(21): Deoxythymidine dinucleotide
uccaaugaugcaauggucutt

SEQ ID NO: 1235 - DNA, 21 bp, Artificial Sequence
  Description of Artificial Sequence: Synthetic oligonucleotide
  Description of Combined DNA/RNA Molecule: Synthetic oligonucleotide
  misc_feature (20)..(21): Deoxythymidine dinucleotide
ugccaaugaugcaaugguctt

SEQ ID NO: 1236 - DNA, 21 bp, Artificial Sequence
  Description of Artificial Sequence: Synthetic oligonucleotide
  Description of Combined DNA/RNA Molecule: Synthetic oligonucleotide
  misc_feature (20)..(21): Deoxythymidine dinucleotide
uugcggccaaugaugcaautt

SEQ ID NO: 1237 - DNA, 21 bp, Artificial Sequence
  Description of Artificial Sequence: Synthetic oligonucleotide
  Description of Combined DNA/RNA Molecule: Synthetic oligonucleotide
  misc_feature (20)..(21): Deoxythymidine dinucleotide
uaccagugugcggccaaugtt

SEQ ID NO: 1238 - DNA, 21 bp, Artificial Sequence
  Description of Artificial Sequence: Synthetic oligonucleotide
  Description of Combined DNA/RNA Molecule: Synthetic oligonucleotide
  misc_feature (20)..(21): Deoxythymidine dinucleotide
uauggaccaccagugugcgtt

SEQ ID NO: 1239 - DNA, 21 bp, Artificial Sequence
  Description of Artificial Sequence: Synthetic oligonucleotide
  Description of Combined DNA/RNA Molecule: Synthetic oligonucleotide
  misc_feature (20)..(21): Deoxythymidine dinucleotide
uucauggaccaccagugugtt

SEQ ID NO: 1240 - DNA, 21 bp, Artificial Sequence
  Description of Artificial Sequence: Synthetic oligonucleotide
  Description of Combined DNA/RNA Molecule: Synthetic oligonucleotide
  misc_feature (20)..(21): Deoxythymidine dinucleotide
uuucauggaccaccagugutt

SEQ ID NO: 1241 - DNA, 21 bp, Artificial Sequence
  Description of Artificial Sequence: Synthetic oligonucleotide
  Description of Combined DNA/RNA Molecule: Synthetic oligonucleotide
  misc_feature (20)..(21): Deoxythymidine dinucleotide
ucuuuuucauggaccaccatt

SEQ ID NO: 1242 - DNA, 21 bp, Artificial Sequence
  Description of Artificial Sequence: Synthetic oligonucleotide
  Description of Combined DNA/RNA Molecule: Synthetic oligonucleotide
  misc_feature (20)..(21): Deoxythymidine dinucleotide
ucugcuuuuucauggaccatt

SEQ ID NO: 1243 - DNA, 21 bp, Artificial Sequence
  Description of Artificial Sequence: Synthetic oligonucleotide
  Description of Combined DNA/RNA Molecule: Synthetic oligonucleotide
  misc_feature (20)..(21): Deoxythymidine dinucleotide
ugcccaagucaucugcuuutt

SEQ ID NO: 1244 - DNA, 21 bp, Artificial Sequence
  Description of Artificial Sequence: Synthetic oligonucleotide
  Description of Combined DNA/RNA Molecule: Synthetic oligonucleotide
  misc_feature (20)..(21): Deoxythymidine dinucleotide
uuuugcccaagucaucugctt

SEQ ID NO: 1245 - DNA, 21 bp, Artificial Sequence
  Description of Artificial Sequence: Synthetic oligonucleotide
  Description of Combined DNA/RNA Molecule: Synthetic oligonucleotide
  misc_feature (20)..(21): Deoxythymidine dinucleotide
ucaccuuugcccaagucautt

SEQ ID NO: 1246 - DNA, 21 bp, Artificial Sequence
  Description of Artificial Sequence: Synthetic oligonucleotide
  Description of Combined DNA/RNA Molecule: Synthetic oligonucleotide
  misc_feature (20)..(21): Deoxythymidine dinucleotide
uccaccuuugcccaagucatt

SEQ ID NO: 1247 - DNA, 21 bp, Artificial Sequence
  Description of Artificial Sequence: Synthetic oligonucleotide
  Description of Combined DNA/RNA Molecule: Synthetic oligonucleotide
  misc_feature (20)..(21): Deoxythymidine dinucleotide
uuccaccuuugcccaaguctt

SEQ ID NO: 1248 - DNA, 21 bp, Artificial Sequence
  Description of Artificial Sequence: Synthetic oligonucleotide
  Description of Combined DNA/RNA Molecule: Synthetic oligonucleotide
  misc_feature (20)..(21): Deoxythymidine dinucleotide
ucguuuccugucuuuguactt

SEQ ID NO: 1249 - DNA, 21 bp, Artificial Sequence
  Description of Artificial Sequence: Synthetic oligonucleotide
  Description of Combined DNA/RNA Molecule: Synthetic oligonucleotide
  misc_feature (20)..(21): Deoxythymidine dinucleotide
uagcguuuccugucuuugutt

SEQ ID NO: 1250 - DNA, 21 bp, Artificial Sequence
  Description of Artificial Sequence: Synthetic oligonucleotide
  Description of Combined DNA/RNA Molecule: Synthetic oligonucleotide
  misc_feature (20)..(21): Deoxythymidine dinucleotide
ucagcguuuccugucuuugtt

SEQ ID NO: 1251 - DNA, 21 bp, Artificial Sequence
  Description of Artificial Sequence: Synthetic oligonucleotide
  Description of Combined DNA/RNA Molecule: Synthetic oligonucleotide
  misc_feature (20)..(21): Deoxythymidine dinucleotide
ucgacuuccagcguuuccutt

SEQ ID NO: 1252 - DNA, 21 bp, Artificial Sequence
  Description of Artificial Sequence: Synthetic oligonucleotide
  Description of Combined DNA/RNA Molecule: Synthetic oligonucleotide
  misc_feature (20)..(21): Deoxythymidine dinucleotide
ucaccacaagccaaacgactt

SEQ ID NO: 1253 - DNA, 21 bp, Artificial Sequence
  Description of Artificial Sequence: Synthetic oligonucleotide
  Description of Combined DNA/RNA Molecule: Synthetic oligonucleotide
  misc_feature (20)..(21): Deoxythymidine dinucleotide
uacaccacaagccaaacgatt

SEQ ID NO: 1254 - DNA, 21 bp, Artificial Sequence
  Description of Artificial Sequence: Synthetic oligonucleotide
  Description of Combined DNA/RNA Molecule: Synthetic oligonucleotide
  misc_feature (20)..(21): Deoxythymidine dinucleotide
uuacaccacaagccaaacgtt

SEQ ID NO: 1255 - DNA, 21 bp, Artificial Sequence
  Description of Artificial Sequence: Synthetic oligonucleotide
  Description of Combined DNA/RNA Molecule: Synthetic oligonucleotide
  misc_feature (20)..(21): Deoxythymidine dinucleotide
uuuacaccacaagccaaactt

SEQ ID NO: 1256 - DNA, 21 bp, Artificial Sequence
  Description of Artificial Sequence: Synthetic oligonucleotide
  Description of Combined DNA/RNA Molecule: Synthetic oligonucleotide
  misc_feature (20)..(21): Deoxythymidine dinucleotide
uaauuacaccacaagccaatt

SEQ ID NO: 1257 - DNA, 21 bp, Artificial Sequence
  Description of Artificial Sequence: Synthetic oligonucleotide
  Description of Combined DNA/RNA Molecule: Synthetic oligonucleotide
  misc_feature (20)..(21): Deoxythymidine dinucleotide
uccaauuacaccacaagcctt

SEQ ID NO: 1258 - DNA, 21 bp, Artificial Sequence
  Description of Artificial Sequence: Synthetic oligonucleotide
  Description of Combined DNA/RNA Molecule: Synthetic oligonucleotide
  misc_feature (20)..(21): Deoxythymidine dinucleotide
ucccaauuacaccacaagctt

SEQ ID NO: 1259 - DNA, 21 bp, Artificial Sequence
  Description of Artificial Sequence: Synthetic oligonucleotide
  Description of Combined DNA/RNA Molecule: Synthetic oligonucleotide
  misc_feature (20)..(21): Deoxythymidine dinucleotide
uucccaauuacaccacaagtt

SEQ ID NO: 1260 - DNA, 21 bp, Artificial Sequence
  Description of Artificial Sequence: Synthetic oligonucleotide
  Description of Combined DNA/RNA Molecule: Synthetic oligonucleotide
  misc_feature (20)..(21): Deoxythymidine dinucleotide
ugaucccaauuacaccacatt

SEQ ID NO: 1261 - DNA, 21 bp, Artificial Sequence
  Description of Artificial Sequence: Synthetic oligonucleotide
  Description of Combined DNA/RNA Molecule: Synthetic oligonucleotide
  misc_feature (20)..(21): Deoxythymidine dinucleotide
ucgaucccaauuacaccactt

SEQ ID NO: 1262 - DNA, 21 bp, Artificial Sequence
  Description of Artificial Sequence: Synthetic oligonucleotide
  Description of Combined DNA/RNA Molecule: Synthetic oligonucleotide
  misc_feature (20)..(21): Deoxythymidine dinucleotide
ugcgaucccaauuacaccatt

SEQ ID NO: 1263 - DNA, 21 bp, Artificial Sequence
  Description of Artificial Sequence: Synthetic oligonucleotide
  Description of Combined DNA/RNA Molecule: Synthetic oligonucleotide
  misc_feature (20)..(21): Deoxythymidine dinucleotide
uuugggcgaucccaauuactt

SEQ ID NO: 1264 - DNA, 21 bp, Artificial Sequence
  Description of Artificial Sequence: Synthetic oligonucleotide
  Description of Combined DNA/RNA Molecule: Synthetic oligonucleotide
  misc_feature (20)..(21): Deoxythymidine dinucleotide
uauugggcgaucccaauuatt

SEQ ID NO: 1265 - DNA, 21 bp, Artificial Sequence
  Description of Artificial Sequence: Synthetic oligonucleotide
  Description of Combined DNA/RNA Molecule: Synthetic oligonucleotide
  misc_feature (20)..(21): Deoxythymidine dinucleotide
uuauugggcgaucccaauutt

SEQ ID NO: 1266 - DNA, 21 bp, Artificial Sequence
  Description of Artificial Sequence: Synthetic oligonucleotide
  Description of Combined DNA/RNA Molecule: Synthetic oligonucleotide
  misc_feature (20)..(21): Deoxythymidine dinucleotide
uuuauugggcgaucccaautt

SEQ ID NO: 1267 - DNA, 21 bp, Artificial Sequence
  Description of Artificial Sequence: Synthetic oligonucleotide
  Description of Combined DNA/RNA Molecule: Synthetic oligonucleotide
  misc_feature (20)..(21): Deoxythymidine dinucleotide
uuuuauugggcgaucccaatt

SEQ ID NO: 1268 - DNA, 21 bp, Artificial Sequence
  Description of Artificial Sequence: Synthetic oligonucleotide
  Description of Combined DNA/RNA Molecule: Synthetic oligonucleotide
  misc_feature (20)..(21): Deoxythymidine dinucleotide
uguuuauugggcgaucccatt

SEQ ID NO: 1269 - DNA, 21 bp, Artificial Sequence
  Description of Artificial Sequence: Synthetic oligonucleotide
  Description of Combined DNA/RNA Molecule: Synthetic oligonucleotide
  misc_feature (20)..(21): Deoxythymidine dinucleotide
uuguuuauugggcgauccctt

SEQ ID NO: 1270 - DNA, 21 bp, Artificial Sequence
  Description of Artificial Sequence: Synthetic oligonucleotide
  Description of Combined DNA/RNA Molecule: Synthetic oligonucleotide
  misc_feature (20)..(21): Deoxythymidine dinucleotide
ugaauguuuauugggcgautt

SEQ ID NO: 1271 - DNA, 21 bp, Artificial Sequence
  Description of Artificial Sequence: Synthetic oligonucleotide
  Description of Combined DNA/RNA Molecule: Synthetic oligonucleotide
  misc_feature (20)..(21): Deoxythymidine dinucleotide
ucaagggaauguuuauuggtt

SEQ ID NO: 1272 - DNA, 21 bp, Artificial Sequence
  Description of Artificial Sequence: Synthetic oligonucleotide
  Description of Combined DNA/RNA Molecule: Synthetic oligonucleotide
  misc_feature (20)..(21): Deoxythymidine dinucleotide
uccaagggaauguuuauugtt

SEQ ID NO: 1273 - DNA, 21 bp, Artificial Sequence
  Description of Artificial Sequence: Synthetic oligonucleotide
  Description of Combined DNA/RNA Molecule: Synthetic oligonucleotide
  misc_feature (20)..(21): Deoxythymidine dinucleotide
uuccaagggaauguuuauutt

SEQ ID NO: 1274 - DNA, 21 bp, Artificial Sequence
  Description of Artificial Sequence: Synthetic oligonucleotide
  Description of Combined DNA/RNA Molecule: Synthetic oligonucleotide
  misc_feature (20)..(21): Deoxythymidine dinucleotide
uauccaagggaauguuuautt

SEQ ID NO: 1275 - DNA, 21 bp, Artificial Sequence
  Description of Artificial Sequence: Synthetic oligonucleotide
  Description of Combined DNA/RNA Molecule: Synthetic oligonucleotide
  misc_feature (20)..(21): Deoxythymidine dinucleotide
ucauccaagggaauguuuatt

SEQ ID NO: 1276 - DNA, 21 bp, Artificial Sequence
  Description of Artificial Sequence: Synthetic oligonucleotide
  Description of Combined DNA/RNA Molecule: Synthetic oligonucleotide
  misc_feature (20)..(21): Deoxythymidine dinucleotide
uacauccaagggaauguuutt

SEQ ID NO: 1277 - DNA, 21 bp, Artificial Sequence
  Description of Artificial Sequence: Synthetic oligonucleotide
  Description of Combined DNA/RNA Molecule: Synthetic oligonucleotide
  misc_feature (20)..(21): Deoxythymidine dinucleotide
uuacauccaagggaauguutt

SEQ ID NO: 1278 - DNA, 21 bp, Artificial Sequence
  Description of Artificial Sequence: Synthetic oligonucleotide
  Description of Combined DNA/RNA Molecule: Synthetic oligonucleotide
  misc_feature (20)..(21): Deoxythymidine dinucleotide
ugacuacauccaagggaautt

SEQ ID NO: 1279 - DNA, 21 bp, Artificial Sequence
  Description of Artificial Sequence: Synthetic oligonucleotide
  Description of Combined DNA/RNA Molecule: Synthetic oligonucleotide
  misc_feature (20)..(21): Deoxythymidine dinucleotide
uccucagacuacauccaagtt

SEQ ID NO: 1280 - DNA, 21 bp, Artificial Sequence
  Description of Artificial Sequence: Synthetic oligonucleotide
  Description of Combined DNA/RNA Molecule: Synthetic oligonucleotide
  misc_feature (20)..(21): Deoxythymidine dinucleotide
uugaguuaaggggccucagtt

SEQ ID NO: 1281 - DNA, 21 bp, Artificial Sequence
  Description of Artificial Sequence: Synthetic oligonucleotide
  Description of Combined DNA/RNA Molecule: Synthetic oligonucleotide
  misc_feature (20)..(21): Deoxythymidine dinucleotide
ugaugaguuaaggggccuctt

SEQ ID NO: 1282 - DNA, 21 bp, Artificial Sequence
  Description of Artificial Sequence: Synthetic oligonucleotide
  Description of Combined DNA/RNA Molecule: Synthetic oligonucleotide
  misc_feature (20)..(21): Deoxythymidine dinucleotide
uagaugaguuaaggggccutt

SEQ ID NO: 1283 - DNA, 21 bp, Artificial Sequence
  Description of Artificial Sequence: Synthetic oligonucleotide
  Description of Combined DNA/RNA Molecule: Synthetic oligonucleotide
  misc_feature (20)..(21): Deoxythymidine dinucleotide
uaacagaugaguuaaggggtt

SEQ ID NO: 1284 - DNA, 21 bp, Artificial Sequence
  Description of Artificial Sequence: Synthetic oligonucleotide
  Description of Combined DNA/RNA Molecule: Synthetic oligonucleotide
  misc_feature (20)..(21): Deoxythymidine dinucleotide
uuaacagaugaguuaagggtt

SEQ ID NO: 1285 - DNA, 21 bp, Artificial Sequence
  Description of Artificial Sequence: Synthetic oligonucleotide
  Description of Combined DNA/RNA Molecule: Synthetic oligonucleotide
  misc_feature (20)..(21): Deoxythymidine dinucleotide
uauaacagaugaguuaaggtt

SEQ ID NO: 1286 - DNA, 21 bp, Artificial Sequence
  Description of Artificial Sequence: Synthetic oligonucleotide
  Description of Combined DNA/RNA Molecule: Synthetic oligonucleotide
  misc_feature (20)..(21): Deoxythymidine dinucleotide
ugauaacagaugaguuaagtt

SEQ ID NO: 1287 - DNA, 21 bp, Artificial Sequence
  Description of Artificial Sequence: Synthetic oligonucleotide
  Description of Combined DNA/RNA Molecule: Synthetic oligonucleotide
  misc_feature (20)..(21): Deoxythymidine dinucleotide
uggauaacagaugaguuaatt

SEQ ID NO: 1288 - DNA, 21 bp, Artificial Sequence
  Description of Artificial Sequence: Synthetic oligonucleotide
  Description of Combined DNA/RNA Molecule: Synthetic oligonucleotide
  misc_feature (20)..(21): Deoxythymidine dinucleotide
uaggauaacagaugaguuatt

SEQ ID NO: 1289 - DNA, 21 bp, Artificial Sequence
  Description of Artificial Sequence: Synthetic oligonucleotide
  Description of Combined DNA/RNA Molecule: Synthetic oligonucleotide
  misc_feature (20)..(21): Deoxythymidine dinucleotide
ucaggauaacagaugaguutt

SEQ ID NO: 1290 - DNA, 21 bp, Artificial Sequence
  Description of Artificial Sequence: Synthetic oligonucleotide
  Description of Combined DNA/RNA Molecule: Synthetic oligonucleotide
  misc_feature (20)..(21): Deoxythymidine dinucleotide
uuacagcuagcaggauaactt

SEQ ID NO: 1291 - DNA, 21 bp, Artificial Sequence
  Description of Artificial Sequence: Synthetic oligonucleotide
  Description of Combined DNA/RNA Molecule: Synthetic oligonucleotide
  misc_feature (20)..(21): Deoxythymidine dinucleotide
ucauuucuacagcuagcagtt

SEQ ID NO: 1292 - DNA, 21 bp, Artificial Sequence
  Description of Artificial Sequence: Synthetic oligonucleotide
  Description of Combined DNA/RNA Molecule: Synthetic oligonucleotide
  misc_feature (20)..(21): Deoxythymidine dinucleotide
uacauuucuacagcuagcatt

SEQ ID NO: 1293 - DNA, 21 bp, Artificial Sequence
  Description of Artificial Sequence: Synthetic oligonucleotide
  Description of Combined DNA/RNA Molecule: Synthetic oligonucleotide
  misc_feature (20)..(21): Deoxythymidine dinucleotide
uaggauacauuucuacagctt

SEQ ID NO: 1294 - DNA, 21 bp, Artificial Sequence
  Description of Artificial Sequence: Synthetic oligonucleotide
  Description of Combined DNA/RNA Molecule: Synthetic oligonucleotide
  misc_feature (20)..(21): Deoxythymidine dinucleotide
ucaggauacauuucuacagtt

SEQ ID NO: 1295 - DNA, 21 bp, Artificial Sequence
  Description of Artificial Sequence: Synthetic oligonucleotide
  Description of Combined DNA/RNA Molecule: Synthetic oligonucleotide
  misc_feature (20)..(21): Deoxythymidine dinucleotide
uucaggauacauuucuacatt

SEQ ID NO: 1296 - DNA, 21 bp, Artificial Sequence
  Description of Artificial Sequence: Synthetic oligonucleotide
  Description of Combined DNA/RNA Molecule: Synthetic oligonucleotide
  misc_feature (20)..(21): Deoxythymidine dinucleotide
uaucaggauacauuucuactt

SEQ ID NO: 1297 - DNA, 21 bp, Artificial Sequence
  Description of Artificial Sequence: Synthetic oligonucleotide
  Description of Combined DNA/RNA Molecule: Synthetic oligonucleotide
  misc_feature (20)..(21): Deoxythymidine dinucleotide
uguuuaucaggauacauuutt

SEQ ID NO: 1298 - DNA, 21 bp, Artificial Sequence
  Description of Artificial Sequence: Synthetic oligonucleotide
  Description of Combined DNA/RNA Molecule: Synthetic oligonucleotide
  misc_feature (20)..(21): Deoxythymidine dinucleotide
uuaauguuuaucaggauactt

SEQ ID NO: 1299 - DNA, 21 bp, Artificial Sequence
  Description of Artificial Sequence: Synthetic oligonucleotide
  Description of Combined DNA/RNA Molecule: Synthetic oligonucleotide
  misc_feature (20)..(21): Deoxythymidine dinucleotide
uuaagauuacaguguuuaatt

SEQ ID NO: 1300 - DNA, 21 bp, Artificial Sequence
  Description of Artificial Sequence: Synthetic oligonucleotide
  Description of Combined DNA/RNA Molecule: Synthetic oligonucleotide
  misc_feature (20)..(21): Deoxythymidine dinucleotide
ucacuuuuaagauuacagutt

SEQ ID NO: 1301 - DNA, 21 bp, Artificial Sequence
  Description of Artificial Sequence: Synthetic oligonucleotide
  Description of Combined DNA/RNA Molecule: Synthetic oligonucleotide
  misc_feature (20)..(21): Deoxythymidine dinucleotide
uacacuuuuaagauuacagtt

SEQ ID NO: 1302 - DNA, 21 bp, Artificial Sequence
  Description of Artificial Sequence: Synthetic oligonucleotide
  Description of Combined DNA/RNA Molecule: Synthetic oligonucleotide
  misc_feature (20)..(21): Deoxythymidine dinucleotide
uuacacuuuuaagauuacatt

SEQ ID NO: 1303 - DNA, 21 bp, Artificial Sequence
  Description of Artificial Sequence: Synthetic oligonucleotide
  Description of Combined DNA/RNA Molecule: Synthetic oligonucleotide
  misc_feature (20)..(21): Deoxythymidine dinucleotide
uuuacacuuuuaagauuactt

SEQ ID NO: 1304 - DNA, 21 bp, Artificial Sequence
  Description of Artificial Sequence: Synthetic oligonucleotide
  Description of Combined DNA/RNA Molecule: Synthetic oligonucleotide
  misc_feature (20)..(21): Deoxythymidine dinucleotide
ucacaauuacacuuuuaagtt

SEQ ID NO: 1305 - DNA, 21 bp, Artificial Sequence
  Description of Artificial Sequence: Synthetic oligonucleotide
  Description of Combined DNA/RNA Molecule: Synthetic oligonucleotide
  misc_feature (20)..(21): Deoxythymidine dinucleotide
uaguuucucacuacagguatt

SEQ ID NO: 1306 - DNA, 21 bp, Artificial Sequence
  Description of Artificial Sequence: Synthetic oligonucleotide
  Description of Combined DNA/RNA Molecule: Synthetic oligonucleotide
  misc_feature (20)..(21): Deoxythymidine dinucleotide
uucuuccaagugaucauaatt

SEQ ID NO: 1307 - DNA, 21 bp, Artificial Sequence
  Description of Artificial Sequence: Synthetic oligonucleotide
  Description of Combined DNA/RNA Molecule: Synthetic oligonucleotide
  misc_feature (20)..(21): Deoxythymidine dinucleotide
uaaucuuccaagugaucautt

SEQ ID NO: 1308 - DNA, 21 bp, Artificial Sequence
  Description of Artificial Sequence: Synthetic oligonucleotide
  Description of Combined DNA/RNA Molecule: Synthetic oligonucleotide
  misc_feature (20)..(21): Deoxythymidine dinucleotide
uacaaaucuuccaagugautt

SEQ ID NO: 1309 - DNA, 21 bp, Artificial Sequence
  Description of Artificial Sequence: Synthetic oligonucleotide
  Description of Combined DNA/RNA Molecule: Synthetic oligonucleotide
  misc_feature (20)..(21): Deoxythymidine dinucleotide
uaacuauacaaaucuuccatt

SEQ ID NO: 1310 - DNA, 21 bp, Artificial Sequence
  Description of Artificial Sequence: Synthetic oligonucleotide
  Description of Combined DNA/RNA Molecule: Synthetic oligonucleotide
  misc_feature (20)..(21): Deoxythymidine dinucleotide
uuuuuaacugaguuuuauatt

SEQ ID NO: 1311 - DNA, 21 bp, Artificial Sequence
  Description of Artificial Sequence: Synthetic oligonucleotide
  Description of Combined DNA/RNA Molecule: Synthetic oligonucleotide
  misc_feature (20)..(21): Deoxythymidine dinucleotide
ugacauuuuaacugaguuutt

SEQ ID NO: 1312 - DNA, 21 bp, Artificial Sequence
  Description of Artificial Sequence: Synthetic oligonucleotide
  Description of Combined DNA/RNA Molecule: Synthetic oligonucleotide
  misc_feature (20)..(21): Deoxythymidine dinucleotide
ucaggucauugaaacagactt

SEQ ID NO: 1313 - DNA, 21 bp, Artificial Sequence
  Description of Artificial Sequence: Synthetic oligonucleotide
  Description of Combined DNA/RNA Molecule: Synthetic oligonucleotide
  misc_feature (20)..(21): Deoxythymidine dinucleotide
uuggcaaaauacaggucautt

SEQ ID NO: 1314 - DNA, 21 bp, Artificial Sequence
  Description of Artificial Sequence: Synthetic oligonucleotide
  Description of Combined DNA/RNA Molecule: Synthetic oligonucleotide
  misc_feature (20)..(21): Deoxythymidine dinucleotide
ugucuggcaaaauacaggutt

SEQ ID NO: 1315 - DNA, 21 bp, Artificial Sequence
  Description of Artificial Sequence: Synthetic oligonucleotide
  Description of Combined DNA/RNA Molecule: Synthetic oligonucleotide
  misc_feature (20)..(21): Deoxythymidine dinucleotide
uagucuggcaaaauacaggtt

SEQ ID NO: 1316 - DNA, 21 bp, Artificial Sequence
  Description of Artificial Sequence: Synthetic oligonucleotide
  Description of Combined DNA/RNA Molecule: Synthetic oligonucleotide
  misc_feature (20)..(21): Deoxythymidine dinucleotide
uauacccaucugugauuuatt

SEQ ID NO: 1317 - DNA, 21 bp, Artificial Sequence
  Description of Artificial Sequence: Synthetic oligonucleotide
  Description of Combined DNA/RNA Molecule: Synthetic oligonucleotide
  misc_feature (20)..(21): Deoxythymidine dinucleotide
uuuaauacccaucugugautt

SEQ ID NO: 1318 - DNA, 21 bp, Artificial Sequence
  Description of Artificial Sequence: Synthetic oligonucleotide
  Description of Combined DNA/RNA Molecule: Synthetic oligonucleotide
  misc_feature (20)..(21): Deoxythymidine dinucleotide
uuuuaauacccaucugugatt

SEQ ID NO: 1319 - DNA, 21 bp, Artificial Sequence
  Description of Artificial Sequence: Synthetic oligonucleotide
  Description of Combined DNA/RNA Molecule: Synthetic oligonucleotide
  misc_feature (20)..(21): Deoxythymidine dinucleotide
uaguuuaauacccaucugutt

SEQ ID NO: 1320 - DNA, 21 bp, Artificial Sequence
  Description of Artificial Sequence: Synthetic oligonucleotide
  Description of Combined DNA/RNA Molecule: Synthetic oligonucleotide
  misc_feature (20)..(21): Deoxythymidine dinucleotide
uaaguuuaauacccaucugtt

SEQ ID NO: 1321 - DNA, 21 bp, Artificial Sequence
  Description of Artificial Sequence: Synthetic oligonucleotide
  Description of Combined DNA/RNA Molecule: Synthetic oligonucleotide
  misc_feature (20)..(21): Deoxythymidine dinucleotide
ucaaguuuaauacccaucutt

SEQ ID NO: 1322 - DNA, 21 bp, Artificial Sequence
  Description of Artificial Sequence: Synthetic oligonucleotide
  Description of Combined DNA/RNA Molecule: Synthetic oligonucleotide
  misc_feature (20)..(21): Deoxythymidine dinucleotide
ugacaaguuuaauacccautt

SEQ ID NO: 1323 - DNA, 21 bp, Artificial Sequence
  Description of Artificial Sequence: Synthetic oligonucleotide
  Description of Combined DNA/RNA Molecule: Synthetic oligonucleotide
  misc_feature (20)..(21): Deoxythymidine dinucleotide
ugaaauucugacaaguuuatt

SEQ ID NO: 1324 - DNA, 21 bp, Artificial Sequence
  Description of Artificial Sequence: Synthetic oligonucleotide
  Description of Combined DNA/RNA Molecule: Synthetic oligonucleotide
  misc_feature (20)..(21): Deoxythymidine dinucleotide
uauucacaggcuugaaugatt

SEQ ID NO: 1325 - DNA, 21 bp, Artificial Sequence
  Description of Artificial Sequence: Synthetic oligonucleotide
  Description of Combined DNA/RNA Molecule: Synthetic oligonucleotide
  misc_feature (20)..(21): Deoxythymidine dinucleotide
uuauucacaggcuugaaugtt

SEQ ID NO: 1326 - DNA, 21 bp, Artificial Sequence
  Description of Artificial Sequence: Synthetic oligonucleotide
  Description of Combined DNA/RNA Molecule: Synthetic oligonucleotide
  misc_feature (20)..(21): Deoxythymidine dinucleotide
uccauacaggguuuuuauutt

SEQ ID NO: 1327 - DNA, 21 bp, Artificial Sequence
  Description of Artificial Sequence: Synthetic oligonucleotide
  Description of Combined DNA/RNA Molecule: Synthetic oligonucleotide
  misc_feature (20)..(21): Deoxythymidine dinucleotide
ugccauacaggguuuuuautt

SEQ ID NO: 1328 - DNA, 21 bp, Artificial Sequence
  Description of Artificial Sequence: Synthetic oligonucleotide
  Description of Combined DNA/RNA Molecule: Synthetic oligonucleotide
  misc_feature (20)..(21): Deoxythymidine dinucleotide
uuaagugccauacaggguutt

SEQ ID NO: 1329 - DNA, 21 bp, Artificial Sequence
  Description of Artificial Sequence: Synthetic oligonucleotide
  Description of Combined DNA/RNA Molecule: Synthetic oligonucleotide
  misc_feature (20)..(21): Deoxythymidine dinucleotide
uauaagugccauacagggutt

SEQ ID NO: 1330 - DNA, 21 bp, Artificial Sequence
  Description of Artificial Sequence: Synthetic oligonucleotide
  Description of Combined DNA/RNA Molecule: Synthetic oligonucleotide
  misc_feature (20)..(21): Deoxythymidine dinucleotide
ugauucuuuuaauagccuctt

SEQ ID NO: 1331 - DNA, 21 bp, Artificial Sequence
  Description of Artificial Sequence: Synthetic oligonucleotide
  Description of Combined DNA/RNA Molecule: Synthetic oligonucleotide
  misc_feature (20)..(21): Deoxythymidine dinucleotide
uuuugaauuuggauucuuutt

SEQ ID NO: 1332 - DNA, 21 bp, Artificial Sequence
  Description of Artificial Sequence: Synthetic oligonucleotide
  Description of Combined DNA/RNA Molecule: Synthetic oligonucleotide
  misc_feature (20)..(21): Deoxythymidine dinucleotide
uuaguuugaauuuggauuctt

SEQ ID NO: 1333 - DNA, 21 bp, Artificial Sequence
  Description of Artificial Sequence: Synthetic oligonucleotide
  Description of Combined DNA/RNA Molecule: Synthetic oligonucleotide
  misc_feature (20)..(21): Deoxythymidine dinucleotide
cggaggucuggccuauaactt

SEQ ID NO: 1334 - DNA, 21 bp, Artificial Sequence
  Description of Artificial Sequence: Synthetic oligonucleotide
  Description of Combined DNA/RNA Molecule: Synthetic oligonucleotide
  misc_feature (20)..(21): Deoxythymidine dinucleotide
ggaggucuggccuauaaactt

SEQ ID NO: 1335 - DNA, 21 bp, Artificial Sequence
  Description of Artificial Sequence: Synthetic oligonucleotide
  Description of Combined DNA/RNA Molecule: Synthetic oligonucleotide
  misc_feature (20)..(21): Deoxythymidine dinucleotide
gaggucuggccuauaaagctt

SEQ ID NO: 1336 - DNA, 21 bp, Artificial Sequence
  Description of Artificial Sequence: Synthetic oligonucleotide
  Description of Combined DNA/RNA Molecule: Synthetic oligonucleotide
  misc_feature (20)..(21): Deoxythymidine dinucleotide
aggucuggccuauaaaguctt

SEQ ID NO: 1337 - DNA, 21 bp, Artificial Sequence
  Description of Artificial Sequence: Synthetic oligonucleotide
  Description of Combined DNA/RNA Molecule: Synthetic oligonucleotide
  misc_feature (20)..(21): Deoxythymidine dinucleotide
ggucuggccuauaaaguactt

SEQ ID NO: 1338 - DNA, 21 bp, Artificial Sequence
  Description of Artificial Sequence: Synthetic oligonucleotide
  Description of Combined DNA/RNA Molecule: Synthetic oligonucleotide
  misc_feature (20)..(21): Deoxythymidine dinucleotide
ucuggccuauaaaguaguctt

SEQ ID NO: 1339 - DNA, 21 bp, Artificial Sequence
  Description of Artificial Sequence: Synthetic oligonucleotide
  Description of Combined DNA/RNA Molecule: Synthetic oligonucleotide
  misc_feature (20)..(21): Deoxythymidine dinucleotide
cuggccuauaaaguagucctt

SEQ ID NO: 1340 - DNA, 21 bp, Artificial Sequence
  Description of Artificial Sequence: Synthetic oligonucleotide
  Description of Combined DNA/RNA Molecule: Synthetic oligonucleotide
  misc_feature (20)..(21): Deoxythymidine dinucleotide
uggccuauaaaguagucgctt

SEQ ID NO: 1341 - DNA, 21 bp, Artificial Sequence
  Description of Artificial Sequence: Synthetic oligonucleotide
  Description of Combined DNA/RNA Molecule: Synthetic oligonucleotide
  misc_feature (20)..(21): Deoxythymidine dinucleotide
ggccuauaaaguagucgcctt

SEQ ID NO: 1342 - DNA, 21 bp, Artificial Sequence
  Description of Artificial Sequence: Synthetic oligonucleotide
  Description of Combined DNA/RNA Molecule: Synthetic oligonucleotide
  misc_feature (20)..(21): Deoxythymidine dinucleotide
gccuauaaaguagucgcgctt

SEQ ID NO: 1343 - DNA, 21 bp, Artificial Sequence
  Description of Artificial Sequence: Synthetic oligonucleotide
  Description of Combined DNA/RNA Molecule: Synthetic oligonucleotide
  misc_feature (20)..(21): Deoxythymidine dinucleotide
ccuauaaaguagucgcggctt

SEQ ID NO: 1344 - DNA, 21 bp, Artificial Sequence
  Description of Artificial Sequence: Synthetic oligonucleotide
  Description of Combined DNA/RNA Molecule: Synthetic oligonucleotide
  misc_feature (20)..(21): Deoxythymidine dinucleotide
gucguagucuccugcagcctt

SEQ ID NO: 1345 - DNA, 21 bp, Artificial Sequence
  Description of Artificial Sequence: Synthetic oligonucleotide
  Description of Combined DNA/RNA Molecule: Synthetic oligonucleotide
  misc_feature (20)..(21): Deoxythymidine dinucleotide
cguagucuccugcagcguctt

SEQ ID NO: 1346 - DNA, 21 bp, Artificial Sequence
  Description of Artificial Sequence: Synthetic oligonucleotide
  Description of Combined DNA/RNA Molecule: Synthetic oligonucleotide
  misc_feature (20)..(21): Deoxythymidine dinucleotide
guagucuccugcagcgucctt

SEQ ID NO: 1347 - DNA, 21 bp, Artificial Sequence
  Description of Artificial Sequence: Synthetic oligonucleotide
  Description of Combined DNA/RNA Molecule: Synthetic oligonucleotide
  misc_feature (20)..(21): Deoxythymidine dinucleotide
uagucuccugcagcgucuctt

SEQ ID NO: 1348 - DNA, 21 bp, Artificial Sequence
  Description of Artificial Sequence: Synthetic oligonucleotide
  Description of Combined DNA/RNA Molecule: Synthetic oligonucleotide
  misc_feature (20)..(21): Deoxythymidine dinucleotide
auggcgacgaaggccgugctt

SEQ ID NO: 1349 - DNA, 21 bp, Artificial Sequence
  Description of Artificial Sequence: Synthetic oligonucleotide
  Description of Combined DNA/RNA Molecule: Synthetic oligonucleotide
  misc_feature (20)..(21): Deoxythymidine dinucleotide
cgacgaaggccgugugcgctt

SEQ ID NO: 1350 - DNA, 21 bp, Artificial Sequence
  Description of Artificial Sequence: Synthetic oligonucleotide
  Description of Combined DNA/RNA Molecule: Synthetic oligonucleotide
  misc_feature (20)..(21): Deoxythymidine dinucleotide
gaaggccgugugcgugcuctt

SEQ ID NO: 1351 - DNA, 21 bp, Artificial Sequence
  Description of Artificial Sequence: Synthetic oligonucleotide
  Description of Combined DNA/RNA Molecule: Synthetic oligonucleotide
  misc_feature (20)..(21): Deoxythymidine dinucleotide
ggccgugugcgugcugaactt

SEQ ID NO: 1352 - DNA, 21 bp, Artificial Sequence
  Description of Artificial Sequence: Synthetic oligonucleotide
  Description of Combined DNA/RNA Molecule: Synthetic oligonucleotide
  misc_feature (20)..(21): Deoxythymidine dinucleotide
agggcgacggcccagugcctt

SEQ ID NO: 1353 - DNA, 21 bp, Artificial Sequence
  Description of Artificial Sequence: Synthetic oligonucleotide
  Description of Combined DNA/RNA Molecule: Synthetic oligonucleotide
  misc_feature (20)..(21): Deoxythymidine dinucleotide
ugcagggcaucaucaauuctt

SEQ ID NO: 1354 - DNA, 21 bp, Artificial Sequence
  Description of Artificial Sequence: Synthetic oligonucleotide
  Description of Combined DNA/RNA Molecule: Synthetic oligonucleotide
  misc_feature (20)..(21): Deoxythymidine dinucleotide
gcagggcaucaucaauuuctt

SEQ ID NO: 1355 - DNA, 21 bp, Artificial Sequence
  Description of Artificial Sequence: Synthetic oligonucleotide
  Description of Combined DNA/RNA Molecule: Synthetic oligonucleotide
  misc_feature (20)..(21): Deoxythymidine dinucleotide
agggcaucaucaauuucgctt

SEQ ID NO: 1356 - DNA, 21 bp, Artificial Sequence
  Description of Artificial Sequence: Synthetic oligonucleotide
  Description of Combined DNA/RNA Molecule: Synthetic oligonucleotide
  misc_feature (20)..(21): Deoxythymidine dinucleotide
gggcaucaucaauuucgactt

SEQ ID NO: 1357 - DNA, 21 bp, Artificial Sequence
  Description of Artificial Sequence: Synthetic oligonucleotide
  Description of Combined DNA/RNA Molecule: Synthetic oligonucleotide
  misc_feature (20)..(21): Deoxythymidine dinucleotide
ggcaucaucaauuucgagctt

SEQ ID NO: 1358 - DNA, 21 bp, Artificial Sequence
  Description of Artificial Sequence: Synthetic oligonucleotide
  Description of Combined DNA/RNA Molecule: Synthetic oligonucleotide
  misc_feature (20)..(21): Deoxythymidine dinucleotide
gcaucaucaauuucgagcctt

SEQ ID NO: 1359 - DNA, 21 bp, Artificial Sequence
  Description of Artificial Sequence: Synthetic oligonucleotide
  Description of Combined DNA/RNA Molecule: Synthetic oligonucleotide
  misc_feature (20)..(21): Deoxythymidine dinucleotide
caucaucaauuucgagcactt

SEQ ID NO: 1360 - DNA, 21 bp, Artificial Sequence
  Description of Artificial Sequence: Synthetic oligonucleotide
  Description of Combined DNA/RNA Molecule: Synthetic oligonucleotide
  misc_feature (20)..(21): Deoxythymidine dinucleotide
aauuucgagcagaaggaactt

SEQ ID NO: 1361 - DNA, 21 bp, Artificial Sequence
  Description of Artificial Sequence: Synthetic oligonucleotide
  Description of Combined DNA/RNA Molecule: Synthetic oligonucleotide
  misc_feature (20)..(21): Deoxythymidine dinucleotide
uucgagcagaaggaaaguctt

SEQ ID NO: 1362 - DNA, 21 bp, Artificial Sequence
  Description of Artificial Sequence: Synthetic oligonucleotide
  Description of Combined DNA/RNA Molecule: Synthetic oligonucleotide
  misc_feature (20)..(21): Deoxythymidine dinucleotide
ucgagcagaaggaaaguactt

SEQ ID NO: 1363 - DNA, 21 bp, Artificial Sequence
  Description of Artificial Sequence: Synthetic oligonucleotide
  Description of Combined DNA/RNA Molecule: Synthetic oligonucleotide
  misc_feature (20)..(21): Deoxythymidine dinucleotide
aagguguggggaagcauuctt

SEQ ID NO: 1364 - DNA, 21 bp, Artificial Sequence
  Description of Artificial Sequence: Synthetic oligonucleotide
  Description of Combined DNA/RNA Molecule: Synthetic oligonucleotide
  misc_feature (20)..(21): Deoxythymidine dinucleotide
gguguggggaagcauuaactt

SEQ ID NO: 1365 - DNA, 21 bp, Artificial Sequence
  Description of Artificial Sequence: Synthetic oligonucleotide
  Description of Combined DNA/RNA Molecule: Synthetic oligonucleotide
  misc_feature (20)..(21): Deoxythymidine dinucleotide
gacugacugaaggccugcctt

SEQ ID NO: 1366 - DNA, 21 bp, Artificial Sequence
  Description of Artificial Sequence: Synthetic oligonucleotide
  Description of Combined DNA/RNA Molecule: Synthetic oligonucleotide
  misc_feature (20)..(21): Deoxythymidine dinucleotide
cugacugaaggccugcauctt

SEQ ID NO: 1367 - DNA, 21 bp, Artificial Sequence
  Description of Artificial Sequence: Synthetic oligonucleotide
  Description of Combined DNA/RNA Molecule: Synthetic oligonucleotide
  misc_feature (20)..(21): Deoxythymidine dinucleotide
ugacugaaggccugcaugctt

SEQ ID NO: 1368 - DNA, 21 bp, Artificial Sequence
  Description of Artificial Sequence: Synthetic oligonucleotide
  Description of Combined DNA/RNA Molecule: Synthetic oligonucleotide
  misc_feature (20)..(21): Deoxythymidine dinucleotide
ugaaggccugcauggauuctt

SEQ ID NO: 1369 - DNA, 21 bp, Artificial Sequence
  Description of Artificial Sequence: Synthetic oligonucleotide
  Description of Combined DNA/RNA Molecule: Synthetic oligonucleotide
  misc_feature (20)..(21): Deoxythymidine dinucleotide
gaaggccugcauggauucctt

SEQ ID NO: 1370 - DNA, 21 bp, Artificial Sequence
  Description of Artificial Sequence: Synthetic oligonucleotide
  Description of Combined DNA/RNA Molecule: Synthetic oligonucleotide
  misc_feature (20)..(21): Deoxythymidine dinucleotide
ugcauggauuccauguucctt

SEQ ID NO: 1371 - DNA, 21 bp, Artificial Sequence
  Description of Artificial Sequence: Synthetic oligonucleotide
  Description of Combined DNA/RNA Molecule: Synthetic oligonucleotide
  misc_feature (20)..(21): Deoxythymidine dinucleotide
cauggauuccauguucauctt

SEQ ID NO: 1372 - DNA, 21 bp, Artificial Sequence
  Description of Artificial Sequence: Synthetic oligonucleotide
  Description of Combined DNA/RNA Molecule: Synthetic oligonucleotide
  misc_feature (20)..(21): Deoxythymidine dinucleotide
ggauuccauguucaugagctt

SEQ ID NO: 1373 - DNA, 21 bp, Artificial Sequence
  Description of Artificial Sequence: Synthetic oligonucleotide
  Description of Combined DNA/RNA Molecule: Synthetic oligonucleotide
  misc_feature (20)..(21): Deoxythymidine dinucleotide
uuccauguucaugaguuuctt

SEQ ID NO: 1374 - DNA, 21 bp, Artificial Sequence
  Description of Artificial Sequence: Synthetic oligonucleotide
  Description of Combined DNA/RNA Molecule: Synthetic oligonucleotide
  misc_feature (20)..(21): Deoxythymidine dinucleotide
guucaugaguuuggagauctt

SEQ ID NO: 1375 - DNA, 21 bp, Artificial Sequence
  Description of Artificial Sequence: Synthetic oligonucleotide
  Description of Combined DNA/RNA Molecule: Synthetic oligonucleotide
  misc_feature (20)..(21): Deoxythymidine dinucleotide
uucaugaguuuggagauactt

SEQ ID NO: 1376 - DNA, 21 bp, Artificial Sequence
  Description of Artificial Sequence: Synthetic oligonucleotide
  Description of Combined DNA/RNA Molecule: Synthetic oligonucleotide
  misc_feature (20)..(21): Deoxythymidine dinucleotide
ugaguuuggagauaauacctt

SEQ ID NO: 1377 - DNA, 21 bp, Artificial Sequence
  Description of Artificial Sequence: Synthetic oligonucleotide
  Description of Combined DNA/RNA Molecule: Synthetic oligonucleotide
  misc_feature (20)..(21): Deoxythymidine dinucleotide
gaguuuggagauaauacactt

SEQ ID NO: 1378 - DNA, 21 bp, Artificial Sequence
  Description of Artificial Sequence: Synthetic oligonucleotide
  Description of Combined DNA/RNA Molecule: Synthetic oligonucleotide
  misc_feature (20)..(21): Deoxythymidine dinucleotide
aggcuguaccagugcaggctt

SEQ ID NO: 1379 - DNA, 21 bp, Artificial Sequence
  Description of Artificial Sequence: Synthetic oligonucleotide
  Description of Combined DNA/RNA Molecule: Synthetic oligonucleotide
  misc_feature (20)..(21): Deoxythymidine dinucleotide
ggcuguaccagugcagguctt

SEQ ID NO: 1380 - DNA, 21 bp, Artificial Sequence
  Description of Artificial Sequence: Synthetic oligonucleotide
  Description of Combined DNA/RNA Molecule: Synthetic oligonucleotide
  misc_feature (20)..(21): Deoxythymidine dinucleotide
gcagguccucacuuuaauctt

SEQ ID NO: 1381 - DNA, 21 bp, Artificial Sequence
  Description of Artificial Sequence: Synthetic oligonucleotide
  Description of Combined DNA/RNA Molecule: Synthetic oligonucleotide
  misc_feature (20)..(21): Deoxythymidine dinucleotide
cagguccucacuuuaaucctt

SEQ ID NO: 1382 - DNA, 21 bp, Artificial Sequence
  Description of Artificial Sequence: Synthetic oligonucleotide
  Description of Combined DNA/RNA Molecule: Synthetic oligonucleotide
  misc_feature (20)..(21): Deoxythymidine dinucleotide
ucacuuuaauccucuaucctt

SEQ ID NO: 1383 - DNA, 21 bp, Artificial Sequence
  Description of Artificial Sequence: Synthetic oligonucleotide
  Description of Combined DNA/RNA Molecule: Synthetic oligonucleotide
  misc_feature (20)..(21): Deoxythymidine dinucleotide
cuauccagaaaacacgguctt

SEQ ID NO: 1384 - DNA, 21 bp, Artificial Sequence
  Description of Artificial Sequence: Synthetic oligonucleotide
  Description of Combined DNA/RNA Molecule: Synthetic oligonucleotide
  misc_feature (20)..(21): Deoxythymidine dinucleotide
uauccagaaaacacggugctt

SEQ ID NO: 1385 - DNA, 21 bp, Artificial Sequence
  Description of Artificial Sequence: Synthetic oligonucleotide
  Description of Combined DNA/RNA Molecule: Synthetic oligonucleotide
  misc_feature (20)..(21): Deoxythymidine dinucleotide
auccagaaaacacgguggctt

SEQ ID NO: 1386 - DNA, 21 bp, Artificial Sequence
  Description of Artificial Sequence: Synthetic oligonucleotide
  Description of Combined DNA/RNA Molecule: Synthetic oligonucleotide
  misc_feature (20)..(21): Deoxythymidine dinucleotide
ccagaaaacacggugggcctt

SEQ ID NO: 1387 - DNA, 21 bp, Artificial Sequence
  Description of Artificial Sequence: Synthetic oligonucleotide
  Description of Combined DNA/RNA Molecule: Synthetic oligonucleotide
  misc_feature (20)..(21): Deoxythymidine dinucleotide
gaaaacacggugggccaactt

SEQ ID NO: 1388 - DNA, 21 bp, Artificial Sequence
  Description of Artificial Sequence: Synthetic oligonucleotide
  Description of Combined DNA/RNA Molecule: Synthetic oligonucleotide
  misc_feature (20)..(21): Deoxythymidine dinucleotide
aaaacacggugggccaaactt

SEQ ID NO: 1389 - DNA, 21 bp, Artificial Sequence
  Description of Artificial Sequence: Synthetic oligonucleotide
  Description of Combined DNA/RNA Molecule: Synthetic oligonucleotide
  misc_feature (20)..(21): Deoxythymidine dinucleotide
cggugggccaaaggaugactt

SEQ ID NO: 1390 - DNA, 21 bp, Artificial Sequence
  Description of Artificial Sequence: Synthetic oligonucleotide
  Description of Combined DNA/RNA Molecule: Synthetic oligonucleotide
  misc_feature (20)..(21): Deoxythymidine dinucleotide
aggaugaagagaggcaugctt

SEQ ID NO: 1391 - DNA, 21 bp, Artificial Sequence
  Description of Artificial Sequence: Synthetic oligonucleotide
  Description of Combined DNA/RNA Molecule: Synthetic oligonucleotide
  misc_feature (20)..(21): Deoxythymidine dinucleotide
augaagagaggcauguugctt

SEQ ID NO: 1392 - DNA, 21 bp, Artificial Sequence
  Description of Artificial Sequence: Synthetic oligonucleotide
  Description of Combined DNA/RNA Molecule: Synthetic oligonucleotide
  misc_feature (20)..(21): Deoxythymidine dinucleotide
gagaggcauguuggagacctt

SEQ ID NO: 1393 - DNA, 21 bp, Artificial Sequence
  Description of Artificial Sequence: Synthetic oligonucleotide
  Description of Combined DNA/RNA Molecule: Synthetic oligonucleotide
  misc_feature (20)..(21): Deoxythymidine dinucleotide
agaggcauguuggagacuctt

SEQ ID NO: 1394 - DNA, 21 bp, Artificial Sequence
  Description of Artificial Sequence: Synthetic oligonucleotide
  Description of Combined DNA/RNA Molecule: Synthetic oligonucleotide
  misc_feature (20)..(21): Deoxythymidine dinucleotide
auguuggagacuugggcactt

SEQ ID NO: 1395 - DNA, 21 bp, Artificial Sequence
  Description of Artificial Sequence: Synthetic oligonucleotide
  Description of Combined DNA/RNA Molecule: Synthetic oligonucleotide
  misc_feature (20)..(21): Deoxythymidine dinucleotide
guuggagacuugggcaauctt

SEQ ID NO: 1396 - DNA, 21 bp, Artificial Sequence
  Description of Artificial Sequence: Synthetic oligonucleotide
  Description of Combined DNA/RNA Molecule: Synthetic oligonucleotide
  misc_feature (20)..(21): Deoxythymidine dinucleotide
ggagacuugggcaaugugctt

SEQ ID NO: 1397 - DNA, 21 bp, Artificial Sequence
  Description of Artificial Sequence: Synthetic oligonucleotide
  Description of Combined DNA/RNA Molecule: Synthetic oligonucleotide
  misc_feature (20)..(21): Deoxythymidine dinucleotide
ggcaaugugacugcugacctt

SEQ ID NO: 1398 - DNA, 21 bp, Artificial Sequence
  Description of Artificial Sequence: Synthetic oligonucleotide
  Description of Combined DNA/RNA Molecule: Synthetic oligonucleotide
  misc_feature (20)..(21): Deoxythymidine dinucleotide
caaugugacugcugacaactt

SEQ ID NO: 1399 - DNA, 21 bp, Artificial Sequence
  Description of Artificial Sequence: Synthetic oligonucleotide
  Description of Combined DNA/RNA Molecule: Synthetic oligonucleotide
  misc_feature (20)..(21): Deoxythymidine dinucleotide
cugacaaagaugguguggctt

SEQ ID NO: 1400 - DNA, 21 bp, Artificial Sequence
  Description of Artificial Sequence: Synthetic oligonucleotide
  Description of Combined DNA/RNA Molecule: Synthetic oligonucleotide
  misc_feature (20)..(21): Deoxythymidine dinucleotide
ugacaaagaugguguggcctt

SEQ ID NO: 1401 - DNA, 21 bp, Artificial Sequence
  Description of Artificial Sequence: Synthetic oligonucleotide
  Description of Combined DNA/RNA Molecule: Synthetic oligonucleotide
  misc_feature (20)..(21): Deoxythymidine dinucleotide
cucaggagaccauugcauctt

SEQ ID NO: 1402 - DNA, 21 bp, Artificial Sequence
  Description of Artificial Sequence: Synthetic oligonucleotide
  Description of Combined DNA/RNA Molecule: Synthetic oligonucleotide
  misc_feature (20)..(21): Deoxythymidine dinucleotide
ucaggagaccauugcaucctt

SEQ ID NO: 1403 - DNA, 21 bp, Artificial Sequence
  Description of Artificial Sequence: Synthetic oligonucleotide
  Description of Combined DNA/RNA Molecule: Synthetic oligonucleotide
  misc_feature (20)..(21): Deoxythymidine dinucleotide
agaccauugcaucauuggctt

SEQ ID NO: 1404 - DNA, 21 bp, Artificial Sequence
  Description of Artificial Sequence: Synthetic oligonucleotide
  Description of Combined DNA/RNA Molecule: Synthetic oligonucleotide
  misc_feature (20)..(21): Deoxythymidine dinucleotide
gaccauugcaucauuggcctt

SEQ ID NO: 1405 - DNA, 21 bp, Artificial Sequence
  Description of Artificial Sequence: Synthetic oligonucleotide
  Description of Combined DNA/RNA Molecule: Synthetic oligonucleotide
  misc_feature (20)..(21): Deoxythymidine dinucleotide
auugcaucauuggccgcactt

SEQ ID NO: 1406 - DNA, 21 bp, Artificial Sequence
  Description of Artificial Sequence: Synthetic oligonucleotide
  Description of Combined DNA/RNA Molecule: Synthetic oligonucleotide
  misc_feature (20)..(21): Deoxythymidine dinucleotide
cauuggccgcacacugguctt

SEQ ID NO: 1407 - DNA, 21 bp, Artificial Sequence
  Description of Artificial Sequence: Synthetic oligonucleotide
  Description of Combined DNA/RNA Molecule: Synthetic oligonucleotide
  misc_feature (20)..(21): Deoxythymidine dinucleotide
cgcacacuggugguccauctt

SEQ ID NO: 1408 - DNA, 21 bp, Artificial Sequence
  Description of Artificial Sequence: Synthetic oligonucleotide
  Description of Combined DNA/RNA Molecule: Synthetic oligonucleotide
  misc_feature (20)..(21): Deoxythymidine dinucleotide
cacacuggugguccaugactt

SEQ ID NO: 1409 - DNA, 21 bp, Artificial Sequence
  Description of Artificial Sequence: Synthetic oligonucleotide
  Description of Combined DNA/RNA Molecule: Synthetic oligonucleotide
  misc_feature (20)..(21): Deoxythymidine dinucleotide
acacuggugguccaugaactt

SEQ ID NO: 1410 - DNA, 21 bp, Artificial Sequence
  Description of Artificial Sequence: Synthetic oligonucleotide
  Description of Combined DNA/RNA Molecule: Synthetic oligonucleotide
  misc_feature (20)..(21): Deoxythymidine dinucleotide
uggugguccaugaaaaagctt

SEQ ID NO: 1411 - DNA, 21 bp, Artificial Sequence
  Description of Artificial Sequence: Synthetic oligonucleotide
  Description of Combined DNA/RNA Molecule: Synthetic oligonucleotide
  misc_feature (20)..(21): Deoxythymidine dinucleotide
ugguccaugaaaaagcagctt

SEQ ID NO: 1412 - DNA, 21 bp, Artificial Sequence
  Description of Artificial Sequence: Synthetic oligonucleotide
  Description of Combined DNA/RNA Molecule: Synthetic oligonucleotide
  misc_feature (20)..(21): Deoxythymidine dinucleotide
aaagcagaugacuugggcctt

SEQ ID NO: 1413 - DNA, 21 bp, Artificial Sequence
  Description of Artificial Sequence: Synthetic oligonucleotide
  Description of Combined DNA/RNA Molecule: Synthetic oligonucleotide
  misc_feature (20)..(21): Deoxythymidine dinucleotide
gcagaugacuugggcaaactt

SEQ ID NO: 1414 - DNA, 21 bp, Artificial Sequence
  Description of Artificial Sequence: Synthetic oligonucleotide
  Description of Combined DNA/RNA Molecule: Synthetic oligonucleotide
  misc_feature (20)..(21): Deoxythymidine dinucleotide
augacuugggcaaaggugctt

SEQ ID NO: 1415 - DNA, 21 bp, Artificial Sequence
  Description of Artificial Sequence: Synthetic oligonucleotide
  Description of Combined DNA/RNA Molecule: Synthetic oligonucleotide
  misc_feature (20)..(21): Deoxythymidine dinucleotide
ugacuugggcaaagguggctt

SEQ ID NO: 1416 - DNA, 21 bp, Artificial Sequence
  Description of Artificial Sequence: Synthetic oligonucleotide
  Description of Combined DNA/RNA Molecule: Synthetic oligonucleotide
  misc_feature (20)..(21): Deoxythymidine dinucleotide
gacuugggcaaagguggactt

SEQ ID NO: 1417 - DNA, 21 bp, Artificial Sequence
  Description of Artificial Sequence: Synthetic oligonucleotide
  Description of Combined DNA/RNA Molecule: Synthetic oligonucleotide
  misc_feature (20)..(21): Deoxythymidine dinucleotide
guacaaagacaggaaacgctt

SEQ ID NO: 1418 - DNA, 21 bp, Artificial Sequence
  Description of Artificial Sequence: Synthetic oligonucleotide
  Description of Combined DNA/RNA Molecule: Synthetic oligonucleotide
  misc_feature (20)..(21): Deoxythymidine dinucleotide
acaaagacaggaaacgcuctt

SEQ ID NO: 1419 - DNA, 21 bp, Artificial Sequence
  Description of Artificial Sequence: Synthetic oligonucleotide
  Description of Combined DNA/RNA Molecule: Synthetic oligonucleotide
  misc_feature (20)..(21): Deoxythymidine dinucleotide
caaagacaggaaacgcugctt

SEQ ID NO: 1420 - DNA, 21 bp, Artificial Sequence
  Description of Artificial Sequence: Synthetic oligonucleotide
  Description of Combined DNA/RNA Molecule: Synthetic oligonucleotide
  misc_feature (20)..(21): Deoxythymidine dinucleotide
aggaaacgcuggaagucgctt

SEQ ID NO: 1421 - DNA, 21 bp, Artificial Sequence
  Description of Artificial Sequence: Synthetic oligonucleotide
  Description of Combined DNA/RNA Molecule: Synthetic oligonucleotide
  misc_feature (20)..(21): Deoxythymidine dinucleotide
gucguuuggcuuguggugctt

SEQ ID NO: 1422 - DNA, 21 bp, Artificial Sequence
  Description of Artificial Sequence: Synthetic oligonucleotide
  Description of Combined DNA/RNA Molecule: Synthetic oligonucleotide
  misc_feature (20)..(21): Deoxythymidine dinucleotide
ucguuuggcuugugguguctt

SEQ ID NO: 1423 - DNA, 21 bp, Artificial Sequence
  Description of Artificial Sequence: Synthetic oligonucleotide
  Description of Combined DNA/RNA Molecule: Synthetic oligonucleotide
  misc_feature (20)..(21): Deoxythymidine dinucleotide
cguuuggcuugugguguactt

SEQ ID NO: 1424 - DNA, 21 bp, Artificial Sequence
  Description of Artificial Sequence: Synthetic oligonucleotide
  Description of Combined DNA/RNA Molecule: Synthetic oligonucleotide
  misc_feature (20)..(21): Deoxythymidine dinucleotide
guuuggcuugugguguaactt

SEQ ID NO: 1425 - DNA, 21 bp, Artificial Sequence
  Description of Artificial Sequence: Synthetic oligonucleotide
  Description of Combined DNA/RNA Molecule: Synthetic oligonucleotide
  misc_feature (20)..(21): Deoxythymidine dinucleotide
uuggcuugugguguaauuctt

SEQ ID NO: 1426 - DNA, 21 bp, Artificial Sequence
  Description of Artificial Sequence: Synthetic oligonucleotide
  Description of Combined DNA/RNA Molecule: Synthetic oligonucleotide
  misc_feature (20)..(21): Deoxythymidine dinucleotide
ggcuugugguguaauuggctt

SEQ ID NO: 1427 - DNA, 21 bp, Artificial Sequence
  Description of Artificial Sequence: Synthetic oligonucleotide
  Description of Combined DNA/RNA Molecule: Synthetic oligonucleotide
  misc_feature (20)..(21): Deoxythymidine dinucleotide
gcuugugguguaauugggctt

SEQ ID NO: 1428 - DNA, 21 bp, Artificial Sequence
  Description of Artificial Sequence: Synthetic oligonucleotide
  Description of Combined DNA/RNA Molecule: Synthetic oligonucleotide
  misc_feature (20)..(21): Deoxythymidine dinucleotide
cuugugguguaauugggactt

SEQ ID NO: 1429 - DNA, 21 bp, Artificial Sequence
  Description of Artificial Sequence: Synthetic oligonucleotide
  Description of Combined DNA/RNA Molecule: Synthetic oligonucleotide
  misc_feature (20)..(21): Deoxythymidine dinucleotide
ugugguguaauugggaucctt

SEQ ID NO: 1430 - DNA, 21 bp, Artificial Sequence
  Description of Artificial Sequence: Synthetic oligonucleotide
  Description of Combined DNA/RNA Molecule: Synthetic oligonucleotide
  misc_feature (20)..(21): Deoxythymidine dinucleotide
gugguguaauugggaucgctt

SEQ ID NO: 1431 - DNA, 21 bp, Artificial Sequence
  Description of Artificial Sequence: Synthetic oligonucleotide
  Description of Combined DNA/RNA Molecule: Synthetic oligonucleotide
  misc_feature (20)..(21): Deoxythymidine dinucleotide
ugguguaauugggaucgcctt

SEQ ID NO: 1432 - DNA, 21 bp, Artificial Sequence
  Description of Artificial Sequence: Synthetic oligonucleotide
  Description of Combined DNA/RNA Molecule: Synthetic oligonucleotide
  misc_feature (20)..(21): Deoxythymidine dinucleotide
guaauugggaucgcccaactt

SEQ ID NO: 1433 - DNA, 21 bp, Artificial Sequence
  Description of Artificial Sequence: Synthetic oligonucleotide
  Description of Combined DNA/RNA Molecule: Synthetic oligonucleotide
  misc_feature (20)..(21): Deoxythymidine dinucleotide
uaauugggaucgcccaauctt

SEQ ID NO: 1434 - DNA, 21 bp, Artificial Sequence
  Description of Artificial Sequence: Synthetic oligonucleotide
  Description of Combined DNA/RNA Molecule: Synthetic oligonucleotide
  misc_feature (20)..(21): Deoxythymidine dinucleotide
aauugggaucgcccaauactt

SEQ ID NO: 1435 - DNA, 21 bp, Artificial Sequence
  Description of Artificial Sequence: Synthetic oligonucleotide
  Description of Combined DNA/RNA Molecule: Synthetic oligonucleotide
  misc_feature (20)..(21): Deoxythymidine dinucleotide
auugggaucgcccaauaactt

SEQ ID NO: 1436 - DNA, 21 bp, Artificial Sequence
  Description of Artificial Sequence: Synthetic oligonucleotide
  Description of Combined DNA/RNA Molecule: Synthetic oligonucleotide
  misc_feature (20)..(21): Deoxythymidine dinucleotide
uugggaucgcccaauaaactt

SEQ ID NO: 1437 - DNA, 21 bp, Artificial Sequence
  Description of Artificial Sequence: Synthetic oligonucleotide
  Description of Combined DNA/RNA Molecule: Synthetic oligonucleotide
  misc_feature (20)..(21): Deoxythymidine dinucleotide
ugggaucgcccaauaaacctt

SEQ ID NO: 1438 - DNA, 21 bp, Artificial Sequence
  Description of Artificial Sequence: Synthetic oligonucleotide
  Description of Combined DNA/RNA Molecule: Synthetic oligonucleotide
  misc_feature (20)..(21): Deoxythymidine dinucleotide
gggaucgcccaauaaacactt

SEQ ID NO: 1439 - DNA, 21 bp, Artificial Sequence
  Description of Artificial Sequence: Synthetic oligonucleotide
  Description of Combined DNA/RNA Molecule: Synthetic oligonucleotide
  misc_feature (20)..(21): Deoxythymidine dinucleotide
aucgcccaauaaacauucctt

SEQ ID NO: 1440 - DNA, 21 bp, Artificial Sequence
  Description of Artificial Sequence: Synthetic oligonucleotide
  Description of Combined DNA/RNA Molecule: Synthetic oligonucleotide
  misc_feature (20)..(21): Deoxythymidine dinucleotide
ccaauaaacauucccuugctt

SEQ ID NO: 1441 - DNA, 21 bp, Artificial Sequence
  Description of Artificial Sequence: Synthetic oligonucleotide
  Description of Combined DNA/RNA Molecule: Synthetic oligonucleotide
  misc_feature (20)..(21): Deoxythymidine dinucleotide
caauaaacauucccuuggctt

SEQ ID NO: 1442 - DNA, 21 bp, Artificial Sequence
  Description of Artificial Sequence: Synthetic oligonucleotide
  Description of Combined DNA/RNA Molecule: Synthetic oligonucleotide
  misc_feature (20)..(21): Deoxythymidine dinucleotide
aauaaacauucccuuggactt

SEQ ID NO: 1443 - DNA, 21 bp, Artificial Sequence
  Description of Artificial Sequence: Synthetic oligonucleotide
  Description of Combined DNA/RNA Molecule: Synthetic oligonucleotide
  misc_feature (20)..(21): Deoxythymidine dinucleotide
auaaacauucccuuggauctt

SEQ ID NO: 1444 - DNA, 21 bp, Artificial Sequence
  Description of Artificial Sequence: Synthetic oligonucleotide
  Description of Combined DNA/RNA Molecule: Synthetic oligonucleotide
  misc_feature (20)..(21): Deoxythymidine dinucleotide
uaaacauucccuuggaugctt

SEQ ID NO: 1445 - DNA, 21 bp, Artificial Sequence
  Description of Artificial Sequence: Synthetic oligonucleotide
  Description of Combined DNA/RNA Molecule: Synthetic oligonucleotide
  misc_feature (20)..(21): Deoxythymidine dinucleotide
aaacauucccuuggauguctt

SEQ ID NO: 1446 - DNA, 21 bp, Artificial Sequence
  Description of Artificial Sequence: Synthetic oligonucleotide
  Description of Combined DNA/RNA Molecule: Synthetic oligonucleotide
  misc_feature (20)..(21): Deoxythymidine dinucleotide
aacauucccuuggauguactt

SEQ ID NO: 1447 - DNA, 21 bp, Artificial Sequence
  Description of Artificial Sequence: Synthetic oligonucleotide
  Description of Combined DNA/RNA Molecule: Synthetic oligonucleotide
  misc_feature (20)..(21): Deoxythymidine dinucleotide
auucccuuggauguagucctt

SEQ ID NO: 1448 - DNA, 21 bp, Artificial Sequence
  Description of Artificial Sequence: Synthetic oligonucleotide
  Description of Combined DNA/RNA Molecule: Synthetic oligonucleotide
  misc_feature (20)..(21): Deoxythymidine dinucleotide
cuuggauguagucugaggctt

SEQ ID NO: 1449 - DNA, 21 bp, Artificial Sequence
  Description of Artificial Sequence: Synthetic oligonucleotide
  Description of Combined DNA/RNA Molecule: Synthetic oligonucleotide
  misc_feature (20)..(21): Deoxythymidine dinucleotide
cugaggccccuuaacucactt

SEQ ID NO: 1450 - DNA, 21 bp, Artificial Sequence
  Description of Artificial Sequence: Synthetic oligonucleotide
  Description of Combined DNA/RNA Molecule: Synthetic oligonucleotide
  misc_feature (20)..(21): Deoxythymidine dinucleotide
gaggccccuuaacucaucctt

SEQ ID NO: 1451 - DNA, 21 bp, Artificial Sequence
  Description of Artificial Sequence: Synthetic oligonucleotide
  Description of Combined DNA/RNA Molecule: Synthetic oligonucleotide
  misc_feature (20)..(21): Deoxythymidine dinucleotide
aggccccuuaacucaucuctt

SEQ ID NO: 1452 - DNA, 21 bp, Artificial Sequence
  Description of Artificial Sequence: Synthetic oligonucleotide
  Description of Combined DNA/RNA Molecule: Synthetic oligonucleotide
  misc_feature (20)..(21): Deoxythymidine dinucleotide
ccccuuaacucaucuguuctt

SEQ ID NO: 1453 - DNA, 21 bp, Artificial Sequence
  Description of Artificial Sequence: Synthetic oligonucleotide
  Description of Combined DNA/RNA Molecule: Synthetic oligonucleotide
  misc_feature (20)..(21): Deoxythymidine dinucleotide
cccuuaacucaucuguuactt

SEQ ID NO: 1454 - DNA, 21 bp, Artificial Sequence
  Description of Artificial Sequence: Synthetic oligonucleotide
  Description of Combined DNA/RNA Molecule: Synthetic oligonucleotide
  misc_feature (20)..(21): Deoxythymidine dinucleotide
ccuuaacucaucuguuauctt

SEQ ID NO: 1455 - DNA, 21 bp, Artificial Sequence
  Description of Artificial Sequence: Synthetic oligonucleotide
  Description of Combined DNA/RNA Molecule: Synthetic oligonucleotide
  misc_feature (20)..(21): Deoxythymidine dinucleotide
cuuaacucaucuguuaucctt

SEQ ID NO: 1456 - DNA, 21 bp, Artificial Sequence
  Description of Artificial Sequence: Synthetic oligonucleotide
  Description of Combined DNA/RNA Molecule: Synthetic oligonucleotide
  misc_feature (20)..(21): Deoxythymidine dinucleotide
uuaacucaucuguuauccctt

SEQ ID NO: 1457 - DNA, 21 bp, Artificial Sequence
  Description of Artificial Sequence: Synthetic oligonucleotide
  Description of Combined DNA/RNA Molecule: Synthetic oligonucleotide
  misc_feature (20)..(21): Deoxythymidine dinucleotide
uaacucaucuguuauccuctt

SEQ ID NO: 1458 - DNA, 21 bp, Artificial Sequence
  Description of Artificial Sequence: Synthetic oligonucleotide
  Description of Combined DNA/RNA Molecule: Synthetic oligonucleotide
  misc_feature (20)..(21): Deoxythymidine dinucleotide
aacucaucuguuauccugctt

SEQ ID NO: 1459 - DNA, 21 bp, Artificial Sequence
  Description of Artificial Sequence: Synthetic oligonucleotide
  Description of Combined DNA/RNA Molecule: Synthetic oligonucleotide
  misc_feature (20)..(21): Deoxythymidine dinucleotide
guuauccugcuagcuguactt

SEQ ID NO: 1460 - DNA, 21 bp, Artificial Sequence
  Description of Artificial Sequence: Synthetic oligonucleotide
  Description of Combined DNA/RNA Molecule: Synthetic oligonucleotide
  misc_feature (20)..(21): Deoxythymidine dinucleotide
cugcuagcuguagaaaugctt

SEQ ID NO: 1461 - DNA, 21 bp, Artificial Sequence
  Description of Artificial Sequence: Synthetic oligonucleotide
  Description of Combined DNA/RNA Molecule: Synthetic oligonucleotide
  misc_feature (20)..(21): Deoxythymidine dinucleotide
ugcuagcuguagaaauguctt

SEQ ID NO: 1462 - DNA, 21 bp, Artificial Sequence
  Description of Artificial Sequence: Synthetic oligonucleotide
  Description of Combined DNA/RNA Molecule: Synthetic oligonucleotide
  misc_feature (20)..(21): Deoxythymidine dinucleotide
gcuguagaaauguauccuctt

SEQ ID NO: 1463 - DNA, 21 bp, Artificial Sequence
  Description of Artificial Sequence: Synthetic oligonucleotide
  Description of Combined DNA/RNA Molecule: Synthetic oligonucleotide
  misc_feature (20)..(21): Deoxythymidine dinucleotide
cuguagaaauguauccugctt

SEQ ID NO: 1464 - DNA, 21 bp, Artificial Sequence
  Description of Artificial Sequence: Synthetic oligonucleotide
  Description of Combined DNA/RNA Molecule: Synthetic oligonucleotide
  misc_feature (20)..(21): Deoxythymidine dinucleotide
uguagaaauguauccugactt

SEQ ID NO: 1465 - DNA, 21 bp, Artificial Sequence
  Description of Artificial Sequence: Synthetic oligonucleotide
  Description of Combined DNA/RNA Molecule: Synthetic oligonucleotide
  misc_feature (20)..(21): Deoxythymidine dinucleotide
guagaaauguauccugauctt

SEQ ID NO: 1466 - DNA, 21 bp, Artificial Sequence
  Description of Artificial Sequence: Synthetic oligonucleotide
  Description of Combined DNA/RNA Molecule: Synthetic oligonucleotide
  misc_feature (20)..(21): Deoxythymidine dinucleotide
aaauguauccugauaaacctt

SEQ ID NO: 1467 - DNA, 21 bp, Artificial Sequence
  Description of Artificial Sequence: Synthetic oligonucleotide
  Description of Combined DNA/RNA Molecule: Synthetic oligonucleotide
  misc_feature (20)..(21): Deoxythymidine dinucleotide
guauccugauaaacauuactt

SEQ ID NO: 1468 - DNA, 21 bp, Artificial Sequence
  Description of Artificial Sequence: Synthetic oligonucleotide
  Description of Combined DNA/RNA Molecule: Synthetic oligonucleotide
  misc_feature (20)..(21): Deoxythymidine dinucleotide
uuaaacacuguaaucuuactt

SEQ ID NO: 1469 - DNA, 21 bp, Artificial Sequence
  Description of Artificial Sequence: Synthetic oligonucleotide
  Description of Combined DNA/RNA Molecule: Synthetic oligonucleotide
  misc_feature (20)..(21): Deoxythymidine dinucleotide
acuguaaucuuaaaagugctt

SEQ ID NO: 1470 - DNA, 21 bp, Artificial Sequence
  Description of Artificial Sequence: Synthetic oligonucleotide
  Description of Combined DNA/RNA Molecule: Synthetic oligonucleotide
  misc_feature (20)..(21): Deoxythymidine dinucleotide
cuguaaucuuaaaaguguctt

SEQ ID NO: 1471 - DNA, 21 bp, Artificial Sequence
  Description of Artificial Sequence: Synthetic oligonucleotide
  Description of Combined DNA/RNA Molecule: Synthetic oligonucleotide
  misc_feature (20)..(21): Deoxythymidine dinucleotide
uguaaucuuaaaaguguactt

SEQ ID NO: 1472 - DNA, 21 bp, Artificial Sequence
  Description of Artificial Sequence: Synthetic oligonucleotide
  Description of Combined DNA/RNA Molecule: Synthetic oligonucleotide
  misc_feature (20)..(21): Deoxythymidine dinucleotide
guaaucuuaaaaguguaactt

SEQ ID NO: 1473 - DNA, 21 bp, Artificial Sequence
  Description of Artificial Sequence: Synthetic oligonucleotide
  Description of Combined DNA/RNA Molecule: Synthetic oligonucleotide
  misc_feature (20)..(21): Deoxythymidine dinucleotide
cuuaaaaguguaauugugctt

SEQ ID NO: 1474 - DNA, 21 bp, Artificial Sequence
  Description of Artificial Sequence: Synthetic oligonucleotide
  Description of Combined DNA/RNA Molecule: Synthetic oligonucleotide
  misc_feature (20)..(21): Deoxythymidine dinucleotide
uaccuguagugagaaacuctt

SEQ ID NO: 1475 - DNA, 21 bp, Artificial Sequence
  Description of Artificial Sequence: Synthetic oligonucleotide
  Description of Combined DNA/RNA Molecule: Synthetic oligonucleotide
  misc_feature (20)..(21): Deoxythymidine dinucleotide
uuaugaucacuuggaagactt

SEQ ID NO: 1476 - DNA, 21 bp, Artificial Sequence
  Description of Artificial Sequence: Synthetic oligonucleotide
  Description of Combined DNA/RNA Molecule: Synthetic oligonucleotide
  misc_feature (20)..(21): Deoxythymidine dinucleotide
augaucacuuggaagauuctt

SEQ ID NO: 1477 - DNA, 21 bp, Artificial Sequence
  Description of Artificial Sequence: Synthetic oligonucleotide
  Description of Combined DNA/RNA Molecule: Synthetic oligonucleotide
  misc_feature (20)..(21): Deoxythymidine dinucleotide
aucacuuggaagauuuguctt

SEQ ID NO: 1478 - DNA, 21 bp, Artificial Sequence
  Description of Artificial Sequence: Synthetic oligonucleotide
  Description of Combined DNA/RNA Molecule: Synthetic oligonucleotide
  misc_feature (20)..(21): Deoxythymidine dinucleotide
uggaagauuuguauaguuctt

SEQ ID NO: 1479 - DNA, 21 bp, Artificial Sequence
  Description of Artificial Sequence: Synthetic oligonucleotide
  Description of Combined DNA/RNA Molecule: Synthetic oligonucleotide
  misc_feature (20)..(21): Deoxythymidine dinucleotide
uauaaaacucaguuaaaactt

SEQ ID NO: 1480 - DNA, 21 bp, Artificial Sequence
  Description of Artificial Sequence: Synthetic oligonucleotide
  Description of Combined DNA/RNA Molecule: Synthetic oligonucleotide
  misc_feature (20)..(21): Deoxythymidine dinucleotide
aaacucaguuaaaaugucctt

SEQ ID NO: 1481 - DNA, 21 bp, Artificial Sequence
  Description of Artificial Sequence: Synthetic oligonucleotide
  Description of Combined DNA/RNA Molecule: Synthetic oligonucleotide
  misc_feature (20)..(21): Deoxythymidine dinucleotide
gucuguuucaaugaccugctt

SEQ ID NO: 1482 - DNA, 21 bp, Artificial Sequence
  Description of Artificial Sequence: Synthetic oligonucleotide
  Description of Combined DNA/RNA Molecule: Synthetic oligonucleotide
  misc_feature (20)..(21): Deoxythymidine dinucleotide
augaccuguauuuugccactt

SEQ ID NO: 1483 - DNA, 21 bp, Artificial Sequence
  Description of Artificial Sequence: Synthetic oligonucleotide
  Description of Combined DNA/RNA Molecule: Synthetic oligonucleotide
  misc_feature (20)..(21): Deoxythymidine dinucleotide
accuguauuuugccagacctt

SEQ ID NO: 1484 - DNA, 21 bp, Artificial Sequence
  Description of Artificial Sequence: Synthetic oligonucleotide
  Description of Combined DNA/RNA Molecule: Synthetic oligonucleotide
  misc_feature (20)..(21): Deoxythymidine dinucleotide
ccuguauuuugccagacuctt

SEQ ID NO: 1485 - DNA, 21 bp, Artificial Sequence
  Description of Artificial Sequence: Synthetic oligonucleotide
  Description of Combined DNA/RNA Molecule: Synthetic oligonucleotide
  misc_feature (20)..(21): Deoxythymidine dinucleotide
uaaaucacagauggguauctt

SEQ ID NO: 1486 - DNA, 21 bp, Artificial Sequence
  Description of Artificial Sequence: Synthetic oligonucleotide
  Description of Combined DNA/RNA Molecule: Synthetic oligonucleotide
  misc_feature (20)..(21): Deoxythymidine dinucleotide
aucacagauggguauuaactt

SEQ ID NO: 1487 - DNA, 21 bp, Artificial Sequence
  Description of Artificial Sequence: Synthetic oligonucleotide
  Description of Combined DNA/RNA Molecule: Synthetic oligonucleotide
  misc_feature (20)..(21): Deoxythymidine dinucleotide
ucacagauggguauuaaactt

SEQ ID NO: 1488 - DNA, 21 bp, Artificial Sequence
  Description of Artificial Sequence: Synthetic oligonucleotide
  Description of Combined DNA/RNA Molecule: Synthetic oligonucleotide
  misc_feature (20)..(21): Deoxythymidine dinucleotide
acagauggguauuaaacuctt

SEQ ID NO: 1489 - DNA, 21 bp, Artificial Sequence
  Description of Artificial Sequence: Synthetic oligonucleotide
  Description of Combined DNA/RNA Molecule: Synthetic oligonucleotide
  misc_feature (20)..(21): Deoxythymidine dinucleotide
cagauggguauuaaacuuctt

SEQ ID NO: 1490 - DNA, 21 bp, Artificial Sequence
  Description of Artificial Sequence: Synthetic oligonucleotide
  Description of Combined DNA/RNA Molecule: Synthetic oligonucleotide
  misc_feature (20)..(21): Deoxythymidine dinucleotide
agauggguauuaaacuugctt

SEQ ID NO: 1491 - DNA, 21 bp, Artificial Sequence
  Description of Artificial Sequence: Synthetic oligonucleotide
  Description of Combined DNA/RNA Molecule: Synthetic oligonucleotide
  misc_feature (20)..(21): Deoxythymidine dinucleotide
auggguauuaaacuugucctt

SEQ ID NO: 1492 - DNA, 21 bp, Artificial Sequence
  Description of Artificial Sequence: Synthetic oligonucleotide
  Description of Combined DNA/RNA Molecule: Synthetic oligonucleotide
  misc_feature (20)..(21): Deoxythymidine dinucleotide
uaaacuugucagaauuucctt

SEQ ID NO: 1493 - DNA, 21 bp, Artificial Sequence
  Description of Artificial Sequence: Synthetic oligonucleotide
  Description of Combined DNA/RNA Molecule: Synthetic oligonucleotide
  misc_feature (20)..(21): Deoxythymidine dinucleotide
ucauucaagccugugaauctt

SEQ ID NO: 1494 - DNA, 21 bp, Artificial Sequence
  Description of Artificial Sequence: Synthetic oligonucleotide
  Description of Combined DNA/RNA Molecule: Synthetic oligonucleotide
  misc_feature (20)..(21): Deoxythymidine dinucleotide
cauucaagccugugaauactt

SEQ ID NO: 1495 - DNA, 21 bp, Artificial Sequence
  Description of Artificial Sequence: Synthetic oligonucleotide
  Description of Combined DNA/RNA Molecule: Synthetic oligonucleotide
  misc_feature (20)..(21): Deoxythymidine dinucleotide
aauaaaaacccuguauggctt

SEQ ID NO: 1496 - DNA, 21 bp, Artificial Sequence
  Description of Artificial Sequence: Synthetic oligonucleotide
  Description of Combined DNA/RNA Molecule: Synthetic oligonucleotide
  misc_feature (20)..(21): Deoxythymidine dinucleotide
auaaaaacccuguauggcctt

SEQ ID NO: 1497 - DNA, 21 bp, Artificial Sequence
  Description of Artificial Sequence: Synthetic oligonucleotide
  Description of Combined DNA/RNA Molecule: Synthetic oligonucleotide
  misc_feature (20)..(21): Deoxythymidine dinucleotide
aacccuguauggcacuuactt

SEQ ID NO: 1498 - DNA, 21 bp, Artificial Sequence
  Description of Artificial Sequence: Synthetic oligonucleotide
  Description of Combined DNA/RNA Molecule: Synthetic oligonucleotide
  misc_feature (20)..(21): Deoxythymidine dinucleotide
acccuguauggcacuuauctt

SEQ ID NO: 1499 - DNA, 21 bp, Artificial Sequence
  Description of Artificial Sequence: Synthetic oligonucleotide
  Description of Combined DNA/RNA Molecule: Synthetic oligonucleotide
  misc_feature (20)..(21): Deoxythymidine dinucleotide
gaggcuauuaaaagaaucctt

SEQ ID NO: 1500 - DNA, 21 bp, Artificial Sequence
  Description of Artificial Sequence: Synthetic oligonucleotide
  Description of Combined DNA/RNA Molecule: Synthetic oligonucleotide
  misc_feature (20)..(21): Deoxythymidine dinucleotide
aaagaauccaaauucaaactt

SEQ ID NO: 1501 - DNA, 21 bp, Artificial Sequence
  Description of Artificial Sequence: Synthetic oligonucleotide
  Description of Combined DNA/RNA Molecule: Synthetic oligonucleotide
  misc_feature (20)..(21): Deoxythymidine dinucleotide
gaauccaaauucaaacuactt

SEQ ID NO: 1502 - DNA, 981 bp, Homo sapiens
gtttggggccagagtgggcgaggcgcggaggtctggcctataaagtagtcgcggagacggggtgctggtttgcgtcgtagtctcctgcagcgtctggggtttccgttgcagtcctcggaaccaggacctcggcgtggcctagcgagttatggcgacgaaggccgtgtgcgtgctgaagggcgacggcccagtgcagggcatcatcaatttcgagcagaaggaaagtaatggaccagtgaaggtgtggggaagcattaaaggactgactgaaggcctgcatggattccatgttcatgagtttggagataatacagcaggctgtaccagtgcaggtcctcactttaatcctctatccagaaaacacggtgggccaaaggatgaagagaggcatgttggagacttgggcaatgtgactgctgacaaagatggtgtggccgatgtgtctattgaagattctgtgatctcactctcaggagaccattgcatcattggccgcacactggtggtccatgaaaaagcagatgacttgggcaaaggtggaaatgaagaaagtacaaagacaggaaacgctggaagtcgtttggcttgtggtgtaattgggatcgcccaataaacattcccttggatgtagtctgaggccccttaactcatctgttatcctgctagctgtagaaatgtatcctgataaacattaaacactgtaatcttaaaagtgtaattgtgtgactttttcagagttgctttaaagtacctgtagtgagaaactgatttatgatcacttggaagatttgtatagttttataaaactcagttaaaatgtctgtttcaatgacctgtattttgccagacttaaatcacagatgggtattaaacttgtcagaatttctttgtcattcaagcctgtgaataaaaaccctgtatggcacttattatgaggctattaaaagaatccaaattcaaactaaaaaaaaaaaaaaaaaa

SEQ ID NO: 1503 - DNA, 54 bp, Artificial Sequence
  Description of Artificial Sequence: Synthetic oligonucleotide
gtgctgggcggggggcggcgggccctcccgcagaacaccatgcgctccacggaa

SEQ ID NO: 1504 - DNA, 54 bp, Artificial Sequence
  Description of Artificial Sequence: Synthetic oligonucleotide
gtgctgggcggggggcggcgggccctcccgcagaacaccatgcgctcttcggaa

SEQ ID NO: 1505 - DNA, 100 bp, Artificial Sequence
  Description of Artificial Sequence: Synthetic oligonucleotide
gaagcaaagaaggggcagagggagcccgtgagctgagtgggccagggactgggagaaggagtgaggaggcagggccggcatgcctctgctgctggccaga

SEQ ID NO: 1506 - DNA, 35 bp, Artificial Sequence
  Description of Artificial Sequence: Synthetic oligonucleotide
gggccctcccgcagaacaccatgcgctccacggaa

SEQ ID NO: 1507 - DNA, 30 bp, Artificial Sequence
  Description of Artificial Sequence: Synthetic oligonucleotide
ctcccgcagaacaccatgcgctccacggaa

SEQ ID NO: 1508 - DNA, 55 bp, Artificial Sequence
  Description of Artificial Sequence: Synthetic oligonucleotide
gtgctgggcggggggcggcgggccctcccgcagaacaccatgcgctccacggaag

SEQ ID NO: 1509 - DNA, 54 bp, Artificial Sequence
  Description of Artificial Sequence: Synthetic oligonucleotide
gtgctgggcggggggcggcgggccctcccgcagaacaccatgcgctcctcggaa

SEQ ID NO: 1510 - DNA, 15 bp, Artificial Sequence
  Description of Artificial Sequence: Synthetic oligonucleotide
gtggccactgagaag

SEQ ID NO: 1511 - DNA, 10 bp, Artificial Sequence
  Description of Artificial Sequence: Synthetic oligonucleotide
tgtgacctgg

SEQ ID NO: 1512 - DNA, 10 bp, Artificial Sequence
  Description of Artificial Sequence: Synthetic oligonucleotide
tgtgatttgg

SEQ ID NO: 1513 - DNA, 18 bp, Artificial Sequence
  Description of Artificial Sequence: Synthetic oligonucleotide
gtctgcacctgtcactag

SEQ ID NO: 1514 - DNA, 10 bp, Artificial Sequence
  Description of Artificial Sequence: Synthetic oligonucleotide
gtgacccaag

SEQ ID NO: 1515 - DNA, 10 bp, Artificial Sequence
  Description of Artificial Sequence: Synthetic oligonucleotide
gtgacccaat

SEQ ID NO: 1516 - DNA, 10 bp, Artificial Sequence
  Description of Artificial Sequence: Synthetic oligonucleotide
gtgacccaac

SEQ ID NO: 1517 - DNA, 15 bp, Artificial Sequence
  Description of Artificial Sequence: Synthetic oligonucleotide
gtggccactgagaaa

SEQ ID NO: 1518 - DNA, 52 bp, Artificial Sequence
  Description of Artificial Sequence: Synthetic oligonucleotide
ctgaggagcgccttgacagcagccatgggagggccgccccctacctcagtga

SEQ ID NO: 1519 - DNA, 52 bp, Artificial Sequence
  Description of Artificial Sequence: Synthetic oligonucleotide
ctgtggagcgccttgacagcagccatgggagggccgccccctacctcagtga

SEQ ID NO: 1520 - DNA, 100 bp, Artificial Sequence
  Description of Artificial Sequence: Synthetic oligonucleotide
tggccgtgtagtgctacccagcgctggctgcctcctcagcattgcaattcctctcccatctgggcaccagtcagctaccctggtgggaatctgggtagcc

SEQ ID NO: 1521 - DNA, 35 bp, Artificial Sequence
  Description of Artificial Sequence: Synthetic oligonucleotide
ctgaggagcgccttgacagcagccatgggagggcc

SEQ ID NO: 1522 - DNA, 52 bp, Artificial Sequence
  Description of Artificial Sequence: Synthetic oligonucleotide
ctgcggagcgccttgacagcagccatgggagggccgccccctacctcagtga

SEQ ID NO: 1523 - DNA, 158 bp, Artificial Sequence
  Description of Artificial Sequence: Synthetic oligonucleotide
gtgctgggcggggggcggcgggccctcccgcagaacaccatgcgctcttcggaatccaggtttatgaactgaccctgtgacctggttcagttcataaacctggattctgaggagcgccttgacagcagccatgggagggccgccccctacctcagtga

SEQ ID NO: 1524 - DNA, 158 bp, Artificial Sequence
  Description of Artificial Sequence: Synthetic oligonucleotide
gtgctgggcggggggcggcgggccctcccgcagaacaccatgcgctcttcggaatccaggtttatgaactgagcctgtgacctggttcagttcataaacctggattctgaggagcgccttgacagcagccatgggagggccgccccctacctcagtga

SEQ ID NO: 1525 - DNA, 158 bp, Artificial Sequence
  Description of Artificial Sequence: Synthetic oligonucleotide
gtgctgggcggggggcggcgggccctcccgcagaacaccatgcgctcttcggaatccaggtttatgaactgaacctgtgatttggttcagttcataaacctggattctgaggagcgccttgacagcagccatgggagggccgccccctacctcagtga

SEQ ID NO: 1526 - DNA, 158 bp, Artificial Sequence
  Description of Artificial Sequence: Synthetic oligonucleotide
gtgctgggcggggggcggcgggccctcccgcagaacaccatgcgctcttcggaatccaggtttttgaactgaacctgtgacctggttcagttcataaacctggattctgtggagcgccttgacagcagccatgggagggccgccccctacctcagtga

SEQ ID NO: 1527 - DNA, 158 bp, Artificial Sequence
  Description of Artificial Sequence: Synthetic oligonucleotide
gtgctgggcggggggcggcgggccctcccgcagaacaccatgcgctcttcggaatccaggtttatgaactgaacctgtgacctggttcagttcataaacctggattctgtggagcgccttgacagcagccatgggagggccgccccctacctcagtga

SEQ ID NO: 1528 - DNA, 260 bp, Artificial Sequence
  Description of Artificial Sequence: Synthetic oligonucleotide
gaagcaaagaaggggcagagggagcccgtgagctgagtgggccagggactgggagaaggagtgaggaggcagggccggcatgcctctgctgctggccagatccaggtttatgaactgaaccgtctgcacctgtcactagtgtcggtaccgtctaacactttggccgtgtagtgctacccagcgctggctgcctcctcagcattgcaattcctctcccatctgggcaccagtcagctaccctggtgggaatctgggtagcc

SEQ ID NO: 1529 - DNA, 158 bp, Artificial Sequence
  Description of Artificial Sequence: Synthetic oligonucleotide
gtgctgggcggggggcggcgggccctcccgcagaacaccatgcgctcttcggaaggtttatgaactgacgttccctgtgacctggtaacgtcagttcataaaccttctgaggagcgccttgacagcagccatgggagggccgccccctacctcagtga

SEQ ID NO: 1530 - DNA, 158 bp, Artificial Sequence
  Description of Artificial Sequence: Synthetic oligonucleotide
gtgctgggcggggggcggcgggccctcccgcagaacaccatgcgctcttcggaaggtttatgaactgacgttgcctgtgacctggtaacgtcagttcataaaccttctgaggagcgccttgacagcagccatgggagggccgccccctacctcagtga

SEQ ID NO: 1531 - DNA, 158 bp, Artificial Sequence
  Description of Artificial Sequence: Synthetic oligonucleotide
gtgctgggcggggggcggcgggccctcccgcagaacaccatgcgctcttcggaaggtttatgaactgacgttacctgtgatttggtaacgtcagttcataaaccttctgaggagcgccttgacagcagccatgggagggccgccccctacctcagtga

SEQ ID NO: 1532 - DNA, 158 bp, Artificial Sequence
  Description of Artificial Sequence: Synthetic oligonucleotide
gtgctgggcggggggcggcgggccctcccgcagaacaccatgcgctcttcggaaggtttatgatctgacgttacctgtgacctggtaacgtcagttcataaaccttctgtggagcgccttgacagcagccatgggagggccgccccctacctcagtga

SEQ ID NO: 1533 - DNA, 158 bp, Artificial Sequence
  Description of Artificial Sequence: Synthetic oligonucleotide
gtgctgggcggggggcggcgggccctcccgcagaacaccatgcgctcttcggaaggtttatgaactgacgttacctgtgacctggtaacgtcagttcataaaccttctgtggagcgccttgacagcagccatgggagggccgccccctacctcagtga

SEQ ID NO: 1534 - DNA, 260 bp, Artificial Sequence
  Description of Artificial Sequence: Synthetic oligonucleotide
gaagcaaagaaggggcagagggagcccgtgagctgagtgggccagggactgggagaaggagtgaggaggcagggccggcatgcctctgctgctggccagaggtttatgaactgacgttaccgtctgcacctgtcactagtaacgtcagttcataaacctttggccgtgtagtgctacccagcgctggctgcctcctcagcattgcaattcctctcccatctgggcaccagtcagctaccctggtgggaatctgggtagcc

SEQ ID NO: 1535 - DNA, 158 bp, Artificial Sequence
  Description of Artificial Sequence: Synthetic oligonucleotide
gtgctgggcggggggcggcgggccctcccgcagaacaccatgcgctcttcggaagtttatgaactgatcttaccctgtgacctggttaacgtcagttcataaacttctgaggagcgccttgacagcagccatgggagggccgccccctacctcagtga

SEQ ID NO: 1536 - DNA, 158 bp, Artificial Sequence
  Description of Artificial Sequence: Synthetic oligonucleotide
gtgctgggcggggggcggcgggccctcccgcagaacaccatgcgctcttcggaagtttatgaactgatcttagcctgtgacctggttaacgtcagttcataaacttctgaggagcgccttgacagcagccatgggagggccgccccctacctcagtga

SEQ ID NO: 1537 - DNA, 158 bp, Artificial Sequence
  Description of Artificial Sequence: Synthetic oligonucleotide
gtgctgggcggggggcggcgggccctcccgcagaacaccatgcgctcttcggaagtttatgaactgatcttaccctgtgatttggttaacgtcagttcataaacttctgaggagcgccttgacagcagccatgggagggccgccccctacctcagtga

SEQ ID NO: 1538 - DNA, 158 bp, Artificial Sequence
  Description of Artificial Sequence: Synthetic oligonucleotide
gtgctgggcggggggcggcgggccctcccgcagaacaccatgcgctcttcggaagtttatgaagtgatcttaacctgtgacctggttaacgtcagttcataaacttctgtggagcgccttgacagcagccatgggagggccgccccctacctcagtga

SEQ ID NO: 1539 - DNA, 158 bp, Artificial Sequence
  Description of Artificial Sequence: Synthetic oligonucleotide
gtgctgggcggggggcggcgggccctcccgcagaacaccatgcgctcttcggaagtttatgaactgatcttaacctgtgacctggttaacgtcagttcataaacttctgtggagcgccttgacagcagccatgggagggccgccccctacctcagtga

SEQ ID NO: 1540 - DNA, 260 bp, Artificial Sequence
  Description of Artificial Sequence: Synthetic oligonucleotide
gaagcaaagaaggggcagagggagcccgtgagctgagtgggccagggactgggagaaggagtgaggaggcagggccggcatgcctctgctgctggccagagtttatgaactgatcttacccgtctgcacctgtcactagttaacgtcagttcataaactttggccgtgtagtgctacccagcgctggctgcctcctcagcattgcaattcctctcccatctgggcaccagtcagctaccctggtgggaatctgggtagcc

SEQ ID NO: 1541 - DNA, 158 bp, Artificial Sequence
  Description of Artificial Sequence: Synthetic oligonucleotide
gtgctgggcggggggcggcgggccctcccgcagaacaccatgcgctcttcggaagtttatgaactgatcttgccctgtgacctggttaacgtcagttcataaacttctgaggagcgccttgacagcagccatgggagggccgccccctacctcagtga

SEQ ID NO: 1542 - DNA, 158 bp, Artificial Sequence
  Description of Artificial Sequence: Synthetic oligonucleotide
gtgctgggcggggggcggcgggccctcccgcagaacaccatgcgctcttcggaagtttatgaactgatcttggcctgtgacctggttaacgtcagttcataaacttctgaggagcgccttgacagcagccatgggagggccgccccctacctcagtga

SEQ ID NO: 1543 - DNA, 158 bp, Artificial Sequence
  Description of Artificial Sequence: Synthetic oligonucleotide
gtgctgggcggggggcggcgggccctcccgcagaacaccatgcgctcttcggaagtttatgaactgatcttgccctgtgatttggttaacgtcagttcataaacttctgaggagcgccttgacagcagccatgggagggccgccccctacctcagtga

SEQ ID NO: 1544 - DNA, 158 bp, Artificial Sequence
  Description of Artificial Sequence: Synthetic oligonucleotide
gtgctgggcggggggcggcgggccctcccgcagaacaccatgcgctcttcggaagtttatgaactgatcttgacctgtgacctggttaacgtcagttcataaacttctgtggagcgccttgacagcagccatgggagggccgccccctacctcagtga

SEQ ID NO: 1545 - DNA, 260 bp, Artificial Sequence
  Description of Artificial Sequence: Synthetic oligonucleotide
gaagcaaagaaggggcagagggagcccgtgagctgagtgggccagggactgggagaaggagtgaggaggcagggccggcatgcctctgctgctggccagagtttatgaactgatcttgcccgtctgcacctgtcactagttaacgtcagttcataaactttggccgtgtagtgctacccagcgctggctgcctcctcagcattgcaattcctctcccatctgggcaccagtcagctaccctggtgggaatctgggtagcc

SEQ ID NO: 1546 - DNA, 158 bp, Artificial Sequence
  Description of Artificial Sequence: Synthetic oligonucleotide
gtgctgggcggggggcggcgggccctcccgcagaacaccatgcgctcttcggaaccacaatgttgtgactggccctgtgacctggtccggtcacaacattgtggttctgaggagcgccttgacagcagccatgggagggccgccccctacctcagtga

SEQ ID NO: 1547 - DNA, 158 bp, Artificial Sequence
  Description of Artificial Sequence: Synthetic oligonucleotide
gtgctgggcggggggcggcgggccctcccgcagaacaccatgcgctcttcggaaccacaatgttgtgactgggcctgtgacctggtccggtcacaacattgtggttctgaggagcgccttgacagcagccatgggagggccgccccctacctcagtga

SEQ ID NO: 1548 - DNA, 158 bp, Artificial Sequence
  Description of Artificial Sequence: Synthetic oligonucleotide
gtgctgggcggggggcggcgggccctcccgcagaacaccatgcgctcttcggaaccacaatgttgtgactggacctgtgatttggtccggtcacaacattgtggttctgaggagcgccttgacagcagccatgggagggccgccccctacctcagtga

SEQ ID NO: 1549 - DNA, 158 bp, Artificial Sequence
  Description of Artificial Sequence: Synthetic oligonucleotide
gtgctgggcggggggcggcgggccctcccgcagaacaccatgcgctcttcggaaccacaatgtagtgactggacctgtgacctggtccggtcacaacattgtggttctgtggagcgccttgacagcagccatgggagggccgccccctacctcagtga

SEQ ID NO: 1550 - DNA, 158 bp, Artificial Sequence
  Description of Artificial Sequence: Synthetic oligonucleotide
gtgctgggcggggggcggcgggccctcccgcagaacaccatgcgctcttcggaaccacaatgttgtgactggacctgtgacctggtccggtcacaacattgtggttctgtggagcgccttgacagcagccatgggagggccgccccctacctcagtga

SEQ ID NO: 1551 - DNA, 260 bp, Artificial Sequence
  Description of Artificial Sequence: Synthetic oligonucleotide
gaagcaaagaaggggcagagggagcccgtgagctgagtgggccagggactgggagaaggagtgaggaggcagggccggcatgcctctgctgctggccagaccacaatgttgtgactggaccgtctgcacctgtcactagtccggtcacaacattgtggtttggccgtgtagtgctacccagcgctggctgcctcctcagcattgcaattcctctcccatctgggcaccagtcagctaccctggtgggaatctgggtagcc

SEQ ID NO: 1552 - DNA, 158 bp, Artificial Sequence
  Description of Artificial Sequence: Synthetic oligonucleotide
gtgctgggcggggggcggcgggccctcccgcagaacaccatgcgctcttcggaagtgttagacggtactgatccctgtgacctggtgtcggtaccgtctaacacttctgaggagcgccttgacagcagccatgggagggccgccccctacctcagtga

SEQ ID NO: 1553 - DNA, 158 bp, Artificial Sequence
  Description of Artificial Sequence: Synthetic oligonucleotide
gtgctgggcggggggcggcgggccctcccgcagaacaccatgcgctcttcggaagtgttagacggtactgatgcctgtgacctggtgtcggtaccgtctaacacttctgaggagcgccttgacagcagccatgggagggccgccccctacctcagtga

SEQ ID NO: 1554 - DNA, 158 bp, Artificial Sequence
  Description of Artificial Sequence: Synthetic oligonucleotide
gtgctgggcggggggcggcgggccctcccgcagaacaccatgcgctcttcggaagtgttagacggtactgatccctgtgatttggtgtcggtaccgtctaacacttctgaggagcgccttgacagcagccatgggagggccgccccctacctcagtga

SEQ ID NO: 1555 - DNA, 158 bp, Artificial Sequence
  Description of Artificial Sequence: Synthetic oligonucleotide
gtgctgggcggggggcggcgggccctcccgcagaacaccatgcgctcttcggaagtgttagaccgtactgatacctgtgacctggtgtcggtaccgtctaacacttctgtggagcgccttgacagcagccatgggagggccgccccctacctcagtga

SEQ ID NO: 1556 - DNA, 158 bp, Artificial Sequence
  Description of Artificial Sequence: Synthetic oligonucleotide
gtgctgggcggggggcggcgggccctcccgcagaacaccatgcgctcttcggaagtgttagacggtactgatacctgtgacctggtgtcggtaccgtctaacacttctgtggagcgccttgacagcagccatgggagggccgccccctacctcagtga

SEQ ID NO: 1557 - DNA, 260 bp, Artificial Sequence
  Description of Artificial Sequence: Synthetic oligonucleotide
gaagcaaagaaggggcagagggagcccgtgagctgagtgggccagggactgggagaaggagtgaggaggcagggccggcatgcctctgctgctggccagagtgttagacggtactgatcccgtctgcacctgtcactagtgtcggtaccgtctaacactttggccgtgtagtgctacccagcgctggctgcctcctcagcattgcaattcctctcccatctgggcaccagtcagctaccctggtgggaatctgggtagcc

SEQ ID NO: 1558 - DNA, 158 bp, Artificial Sequence
  Description of Artificial Sequence: Synthetic oligonucleotide
gtgctgggcggggggcggcgggccctcccgcagaacaccatgcgctcttcggaaccgacaaccagtatttggccctgtgacctggtccaaatactggttgtcggttctgaggagcgccttgacagcagccatgggagggccgccccctacctcagtga

SEQ ID NO: 1559 - DNA, 158 bp, Artificial Sequence
  Description of Artificial Sequence: Synthetic oligonucleotide
gtgctgggcggggggcggcgggccctcccgcagaacaccatgcgctcttcggaaccgacaaccagtatttgggcctgtgacctggtccaaatactggttgtcggttctgaggagcgccttgacagcagccatgggagggccgccccctacctcagtga

SEQ ID NO: 1560 - DNA, 158 bp, Artificial Sequence
  Description of Artificial Sequence: Synthetic oligonucleotide
gtgctgggcggggggcggcgggccctcccgcagaacaccatgcgctcttcggaaccgacaaccagtatttggacctgtgatttggtccaaatactggttgtcggttctgaggagcgccttgacagcagccatgggagggccgccccctacctcagtga

SEQ ID NO: 1561 - DNA, 158 bp, Artificial Sequence
  Description of Artificial Sequence: Synthetic oligonucleotide
gtgctgggcggggggcggcgggccctcccgcagaacaccatgcgctcttcggaaccgacaacctgtatttggacctgtgacctggtccaaatactggttgtcggttctgtggagcgccttgacagcagccatgggagggccgccccctacctcagtga

SEQ ID NO: 1562 - DNA, 158 bp, Artificial Sequence
  Description of Artificial Sequence: Synthetic oligonucleotide
gtgctgggcggggggcggcgggccctcccgcagaacaccatgcgctcttcggaaccgacaaccagtatttggacctgtgacctggtccaaatactggttgtcggttctgtggagcgccttgacagcagccatgggagggccgccccctacctcagtga

SEQ ID NO: 1563 - DNA, 260 bp, Artificial Sequence
  Description of Artificial Sequence: Synthetic oligonucleotide
gaagcaaagaaggggcagagggagcccgtgagctgagtgggccagggactgggagaaggagtgaggaggcagggccggcatgcctctgctgctggccagaccgacaaccagtatttggaccgtctgcacctgtcactagtccaaatactggttgtcggtttggccgtgtagtgctacccagcgctggctgcctcctcagcattgcaattcctctcccatctgggcaccagtcagctaccctggtgggaatctgggtagcc

SEQ ID NO: 1564 - DNA, 158 bp, Artificial Sequence
  Description of Artificial Sequence: Synthetic oligonucleotide
gtgctgggcggggggcggcgggccctcccgcagaacaccatgcgctcttcggaagtcacaaagaaccgtgtaccctgtgacctggttgcacggttctttgtgacttctgaggagcgccttgacagcagccatgggagggccgccccctacctcagtga

SEQ ID NO: 1565 - DNA, 158 bp, Artificial Sequence
  Description of Artificial Sequence: Synthetic oligonucleotide
gtgctgggcggggggcggcgggccctcccgcagaacaccatgcgctcttcggaagtcacaaagaaccgtgtagcctgtgacctggttgcacggttctttgtgacttctgaggagcgccttgacagcagccatgggagggccgccccctacctcagtga

SEQ ID NO: 1566 - DNA, 158 bp, Artificial Sequence
  Description of Artificial Sequence: Synthetic oligonucleotide
gtgctgggcggggggcggcgggccctcccgcagaacaccatgcgctcttcggaagtcacaaagaaccgtgtaacctgtgatttggttgcacggttctttgtgacttctgaggagcgccttgacagcagccatgggagggccgccccctacctcagtga

SEQ ID NO: 1567 - DNA, 158 bp, Artificial Sequence
  Description of Artificial Sequence: Synthetic oligonucleotide
gtgctgggcggggggcggcgggccctcccgcagaacaccatgcgctcttcggaagtcacaaagtaccgtgtaacctgtgacctggttgcacggttctttgtgacttctgtggagcgccttgacagcagccatgggagggccgccccctacctcagtga

SEQ ID NO: 1568 - DNA, 158 bp, Artificial Sequence
  Description of Artificial Sequence: Synthetic oligonucleotide
gtgctgggcggggggcggcgggccctcccgcagaacaccatgcgctcttcggaagtcacaaagaaccgtgtaacctgtgacctggttgcacggttctttgtgacttctgtggagcgccttgacagcagccatgggagggccgccccctacctcagtga

SEQ ID NO: 1569 - DNA, 260 bp, Artificial Sequence
  Description of Artificial Sequence: Synthetic oligonucleotide
gaagcaaagaaggggcagagggagcccgtgagctgagtgggccagggactgggagaaggagtgaggaggcagggccggcatgcctctgctgctggccagagtcacaaagaaccgtgtaaccgtctgcacctgtcactagttgcacggttctttgtgactttggccgtgtagtgctacccagcgctggctgcctcctcagcattgcaattcctctcccatctgggcaccagtcagctaccctggtgggaatctgggtagcc

SEQ ID NO: 1570 - DNA, 158 bp, Artificial Sequence
  Description of Artificial Sequence: Synthetic oligonucleotide
gtgctgggcggggggcggcgggccctcccgcagaacaccatgcgctcttcggaatgaacctcttgttataaaccctgtgacctggttttataacaagaggttcattctgaggagcgccttgacagcagccatgggagggccgccccctacctcagtga

SEQ ID NO: 1571 - DNA, 158 bp, Artificial Sequence
  Description of Artificial Sequence: Synthetic oligonucleotide
gtgctgggcggggggcggcgggccctcccgcagaacaccatgcgctcttcggaatgaacctcttgttataaagcctgtgacctggttttataacaagaggttcattctgaggagcgccttgacagcagccatgggagggccgccccctacctcagtga

SEQ ID NO: 1572 - DNA, 158 bp, Artificial Sequence
  Description of Artificial Sequence: Synthetic oligonucleotide
gtgctgggcggggggcggcgggccctcccgcagaacaccatgcgctcttcggaatgaacctcttgttataaaacctgtgatttggttttataacaagaggttcattctgaggagcgccttgacagcagccatgggagggccgccccctacctcagtga

SEQ ID NO: 1573 - DNA, 158 bp, Artificial Sequence
  Description of Artificial Sequence: Synthetic oligonucleotide
gtgctgggcggggggcggcgggccctcccgcagaacaccatgcgctcttcggaatgaacctctagttataaaacctgtgacctggttttataacaagaggttcattctgtggagcgccttgacagcagccatgggagggccgccccctacctcagtga

SEQ ID NO: 1574 - DNA, 158 bp, Artificial Sequence
  Description of Artificial Sequence: Synthetic oligonucleotide
gtgctgggcggggggcggcgggccctcccgcagaacaccatgcgctcttcggaatgaacctcttgttataaaacctgtgacctggttttataacaagaggttcattctgtggagcgccttgacagcagccatgggagggccgccccctacctcagtga

SEQ ID NO: 1575 - DNA, 260 bp, Artificial Sequence
  Description of Artificial Sequence: Synthetic oligonucleotide
gaagcaaagaaggggcagagggagcccgtgagctgagtgggccagggactgggagaaggagtgaggaggcagggccggcatgcctctgctgctggccagatgaacctcttgttataaaaccgtctgcacctgtcactagttttataacaagaggttcatttggccgtgtagtgctacccagcgctggctgcctcctcagcattgcaattcctctcccatctgggcaccagtcagctaccctggtgggaatctgggtagcc

SEQ ID NO: 1576 - DNA, 158 bp, Artificial Sequence
  Description of Artificial Sequence: Synthetic oligonucleotide
gtgctgggcggggggcggcgggccctcccgcagaacaccatgcgctcttcggaagatcattggaattcctaatcctgtgacctggtttaggaattccaatgatcttctgaggagcgccttgacagcagccatgggagggccgccccctacctcagtga

SEQ ID NO: 1577 - DNA, 158 bp, Artificial Sequence
  Description of Artificial Sequence: Synthetic oligonucleotide
gtgctgggcggggggcggcgggccctcccgcagaacaccatgcgctcttcggaagatcattggaattcctaagcctgtgacctggtttaggaattccaatgatcttctgaggagcgccttgacagcagccatgggagggccgccccctacctcagtga

SEQ ID NO: 1578 - DNA, 158 bp, Artificial Sequence
  Description of Artificial Sequence: Synthetic oligonucleotide
gtgctgggcggggggcggcgggccctcccgcagaacaccatgcgctcttcggaagatcattggaattcctaaacctgtgatttggtttaggaattccaatgatcttctgaggagcgccttgacagcagccatgggagggccgccccctacctcagtga

SEQ ID NO: 1579 - DNA, 158 bp, Artificial Sequence
  Description of Artificial Sequence: Synthetic oligonucleotide
gtgctgggcggggggcggcgggccctcccgcagaacaccatgcgctcttcggaagatcattggtattcctaaacctgtgacctggtttaggaattccaatgatcttctgtggagcgccttgacagcagccatgggagggccgccccctacctcagtga

SEQ ID NO: 1580 - DNA, 158 bp, Artificial Sequence
  Description of Artificial Sequence: Synthetic oligonucleotide
gtgctgggcggggggcggcgggccctcccgcagaacaccatgcgctcttcggaagatcattggaattcctaaacctgtgacctggtttaggaattccaatgatcttctgtggagcgccttgacagcagccatgggagggccgccccctacctcagtga

SEQ ID NO: 1581 - DNA, 260 bp, Artificial Sequence
  Description of Artificial Sequence: Synthetic oligonucleotide
gaagcaaagaaggggcagagggagcccgtgagctgagtgggccagggactgggagaaggagtgaggaggcagggccggcatgcctctgctgctggccagagatcattggaattcctaaaccgtctgcacctgtcactagtttaggaattccaatgatctttggccgtgtagtgctacccagcgctggctgcctcctcagcattgcaattcctctcccatctgggcaccagtcagctaccctggtgggaatctgggtagcc

SEQ ID NO: 1582 - DNA, 158 bp, Artificial Sequence
  Description of Artificial Sequence: Synthetic oligonucleotide
gtgctgggcggggggcggcgggccctcccgcagaacaccatgcgctcttcggaacattggaattcctaaaattcctgtgacctggtattttaggaattccaatgttctgaggagcgccttgacagcagccatgggagggccgccccctacctcagtga

SEQ ID NO: 1583 - DNA, 158 bp, Artificial Sequence
  Description of Artificial Sequence: Synthetic oligonucleotide
gtgctgggcggggggcggcgggccctcccgcagaacaccatgcgctcttcggaacattggaattcctaaaatgcctgtgacctggtattttaggaattccaatgttctgaggagcgccttgacagcagccatgggagggccgccccctacctcagtga

SEQ ID NO: 1584 - DNA, 158 bp, Artificial Sequence
  Description of Artificial Sequence: Synthetic oligonucleotide
gtgctgggcggggggcggcgggccctcccgcagaacaccatgcgctcttcggaacattggaattcctaaaatacctgtgatttggtattttaggaattccaatgttctgaggagcgccttgacagcagccatgggagggccgccccctacctcagtga

SEQ ID NO: 1585 - DNA, 158 bp, Artificial Sequence
  Description of Artificial Sequence: Synthetic oligonucleotide
gtgctgggcggggggcggcgggccctcccgcagaacaccatgcgctcttcggaacattggaatacctaaaatacctgtgacctggtattttaggaattccaatgttctgtggagcgccttgacagcagccatgggagggccgccccctacctcagtga

SEQ ID NO: 1586 - DNA, 158 bp, Artificial Sequence
  Description of Artificial Sequence: Synthetic oligonucleotide
gtgctgggcggggggcggcgggccctcccgcagaacaccatgcgctcttcggaacattggaattcctaaaatacctgtgacctggtattttaggaattccaatgttctgtggagcgccttgacagcagccatgggagggccgccccctacctcagtga

SEQ ID NO: 1587 - DNA, 260 bp, Artificial Sequence
  Description of Artificial Sequence: Synthetic oligonucleotide
gaagcaaagaaggggcagagggagcccgtgagctgagtgggccagggactgggagaaggagtgaggaggcagggccggcatgcctctgctgctggccagacattggaattcctaaaataccgtctgcacctgtcactagtattttaggaattccaatgtttggccgtgtagtgctacccagcgctggctgcctcctcagcattgcaattcctctcccatctgggcaccagtcagctaccctggtgggaatctgggtagcc

SEQ ID NO: 1588 - DNA, 158 bp, Artificial Sequence
  Description of Artificial Sequence: Synthetic oligonucleotide
gtgctgggcggggggcggcgggccctcccgcagaacaccatgcgctcttcggaagcaattcagtctcgttgtccctgtgacctggtacaacgagactgaattgcttctgaggagcgccttgacagcagccatgggagggccgccccctacctcagtga

SEQ ID NO: 1589 - DNA, 158 bp, Artificial Sequence
  Description of Artificial Sequence: Synthetic oligonucleotide
gtgctgggcggggggcggcgggccctcccgcagaacaccatgcgctcttcggaagcaattcagtctcgttgtgcctgtgacctggtacaacgagactgaattgcttctgaggagcgccttgacagcagccatgggagggccgccccctacctcagtga

SEQ ID NO: 1590 - DNA, 158 bp, Artificial Sequence
  Description of Artificial Sequence: Synthetic oligonucleotide
gtgctgggcggggggcggcgggccctcccgcagaacaccatgcgctcttcggaagcaattcagtctcgttgtacctgtgatttggtacaacgagactgaattgcttctgaggagcgccttgacagcagccatgggagggccgccccctacctcagtga

SEQ ID NO: 1591 - DNA, 158 bp, Artificial Sequence
  Description of Artificial Sequence: Synthetic oligonucleotide
gtgctgggcggggggcggcgggccctcccgcagaacaccatgcgctcttcggaagcaattcagactcgttgtacctgtgacctggtacaacgagactgaattgcttctgtggagcgccttgacagcagccatgggagggccgccccctacctcagtga

SEQ ID NO: 1592 - DNA, 158 bp, Artificial Sequence
  Description of Artificial Sequence: Synthetic oligonucleotide
gtgctgggcggggggcggcgggccctcccgcagaacaccatgcgctcttcggaagcaattcagtctcgttgtacctgtgacctggtacaacgagactgaattgcttctgtggagcgccttgacagcagccatgggagggccgccccctacctcagtga

SEQ ID NO: 1593 - DNA, 260 bp, Artificial Sequence
  Description of Artificial Sequence: Synthetic oligonucleotide
gaagcaaagaaggggcagagggagcccgtgagctgagtgggccagggactgggagaaggagtgaggaggcagggccggcatgcctctgctgctggccagagcaattcagtctcgttgtaccgtctgcacctgtcactagtacaacgagactgaattgctttggccgtgtagtgctacccagcgctggctgcctcctcagcattgcaattcctctcccatctgggcaccagtcagctaccctggtgggaatctgggtagcc

SEQ ID NO: 1594 - DNA, 158 bp, Artificial Sequence
  Description of Artificial Sequence: Synthetic oligonucleotide
gtgctgggcggggggcggcgggccctcccgcagaacaccatgcgctcttcggaacctgctagctccatgcttccctgtgacctggtaagcatggagctagcaggttctgaggagcgccttgacagcagccatgggagggccgccccctacctcagtga

SEQ ID NO: 1595 - DNA, 158 bp, Artificial Sequence
  Description of Artificial Sequence: Synthetic oligonucleotide
gtgctgggcggggggcggcgggccctcccgcagaacaccatgcgctcttcggaacctgctagctccatgcttgcctgtgacctggtaagcatggagctagcaggttctgaggagcgccttgacagcagccatgggagggccgccccctacctcagtga

SEQ ID NO: 1596 - DNA, 158 bp, Artificial Sequence
  Description of Artificial Sequence: Synthetic oligonucleotide
gtgctgggcggggggcggcgggccctcccgcagaacaccatgcgctcttcggaacctgctagctccatgcttccctgtgatttggtaagcatggagctagcaggttctgaggagcgccttgacagcagccatgggagggccgccccctacctcagtga

SEQ ID NO: 1597 - DNA, 158 bp, Artificial Sequence
  Description of Artificial Sequence: Synthetic oligonucleotide
gtgctgggcggggggcggcgggccctcccgcagaacaccatgcgctcttcggaacctgctagcaccatgcttacctgtgacctggtaagcatggagctagcaggttctgtggagcgccttgacagcagccatgggagggccgccccctacctcagtga

SEQ ID NO: 1598 - DNA, 158 bp, Artificial Sequence
  Description of Artificial Sequence: Synthetic oligonucleotide
gtgctgggcggggggcggcgggccctcccgcagaacaccatgcgctcttcggaacctgctagctccatgcttacctgtgacctggtaagcatggagctagcaggttctgtggagcgccttgacagcagccatgggagggccgccccctacctcagtga

SEQ ID NO: 1599 - DNA, 260 bp, Artificial Sequence
  Description of Artificial Sequence: Synthetic oligonucleotide
gaagcaaagaaggggcagagggagcccgtgagctgagtgggccagggactgggagaaggagtgaggaggcagggccggcatgcctctgctgctggccagacctgctagctccatgcttcccgtctgcacctgtcactagtaagcatggagctagcaggtttggccgtgtagtgctacccagcgctggctgcctcctcagcattgcaattcctctcccatctgggcaccagtcagctaccctggtgggaatctgggtagcc

SEQ ID NO: 1600 - DNA, 158 bp, Artificial Sequence
  Description of Artificial Sequence: Synthetic oligonucleotide
gtgctgggcggggggcggcgggccctcccgcagaacaccatgcgctcttcggaacctgctagctccatgcttgctgtgacccaagtaagcatggagctagcaggttctgaggagcgccttgacagcagccatgggagggccgccccctacctcagtga

SEQ ID NO: 1601 - DNA, 158 bp, Artificial Sequence
  Description of Artificial Sequence: Synthetic oligonucleotide
gtgctgggcggggggcggcgggccctcccgcagaacaccatgcgctccacggaacctgctagctccatgcttgctgtgacccaagtaagcatggagctagcaggttctgaggagcgccttgacagcagccatgggagggccgccccctacctcagtga

SEQ ID NO: 1602 - DNA, 163 bp, Artificial Sequence
  Description of Artificial Sequence: Synthetic oligonucleotide
gtgctgggcggggggcggcgggccctcccgcagaacaccatgcgctccacggaacctgctagctccatgcttgctgtggccactgagaagtaagcatggagctagcaggttctgaggagcgccttgacagcagccatgggagggccgccccctacctcagtga

SEQ ID NO: 1603 - DNA, 122 bp, Artificial Sequence
  Description of Artificial Sequence: Synthetic oligonucleotide
gggccctcccgcagaacaccatgcgctccacggaacctgctagctccatgcttgctgtgacccaagtaagcatggagctagcaggttctgaggagcgccttgacagcagccatgggagggcc

SEQ ID NO: 1604 - DNA, 117 bp, Artificial Sequence
  Description of Artificial Sequence: Synthetic oligonucleotide
ctcccgcagaacaccatgcgctccacggaacctgctagctccatgcttgctgtgacccaagtaagcatggagctagcaggttctgaggagcgccttgacagcagccatgggagggcc

SEQ ID NO: 1605 - DNA, 160 bp, Artificial Sequence
  Description of Artificial Sequence: Synthetic oligonucleotide
gtgctgggcggggggcggcgggccctcccgcagaacaccatgcgctccacggaagcctgctagctccatgcttgctgtgacccaagtaagcatggagctagcaggcttctgaggagcgccttgacagcagccatgggagggccgccccctacctcagtga

SEQ ID NO: 1606 - DNA, 158 bp, Artificial Sequence
  Description of Artificial Sequence: Synthetic oligonucleotide
gtgctgggcggggggcggcgggccctcccgcagaacaccatgcgctccacggaacctgctagctccatgcttgatgtgacccaattaagcatggagctagcaggttctgaggagcgccttgacagcagccatgggagggccgccccctacctcagtga

SEQ ID NO: 1607 - DNA, 158 bp, Artificial Sequence
  Description of Artificial Sequence: Synthetic oligonucleotide
gtgctgggcggggggcggcgggccctcccgcagaacaccatgcgctcctcggaacctgctagctccatgcttgctgtgacccaagtaagcatggagctagcaggttctgcggagcgccttgacagcagccatgggagggccgccccctacctcagtga

SEQ ID NO: 1608 - DNA, 158 bp, Artificial Sequence; identical to SEQ ID NO: 1582
  Description of Artificial Sequence: Synthetic oligonucleotide

SEQ ID NO: 1609 - DNA, 158 bp, Artificial Sequence; identical to SEQ ID NO: 1576
  Description of Artificial Sequence: Synthetic oligonucleotide

SEQ ID NO: 1610 - DNA, 158 bp, Artificial Sequence; identical to SEQ ID NO: 1583
  Description of Artificial Sequence: Synthetic oligonucleotide

SEQ ID NO: 1611 - DNA, 158 bp, Artificial Sequence; identical to SEQ ID NO: 1577
  Description of Artificial Sequence: Synthetic oligonucleotide

SEQ ID NO: 1612 - DNA, 158 bp, Artificial Sequence; identical to SEQ ID NO: 1584
  Description of Artificial Sequence: Synthetic oligonucleotide

SEQ ID NO: 1613 - DNA, 158 bp, Artificial Sequence; identical to SEQ ID NO: 1578
  Description of Artificial Sequence: Synthetic oligonucleotide

SEQ ID NO: 1614 - DNA, 158 bp, Artificial Sequence; identical to SEQ ID NO: 1585
  Description of Artificial Sequence: Synthetic oligonucleotide

SEQ ID NO: 1615 - DNA, 158 bp, Artificial Sequence; identical to SEQ ID NO: 1579
  Description of Artificial Sequence: Synthetic oligonucleotide

SEQ ID NO: 1616 - DNA, 158 bp, Artificial Sequence; identical to SEQ ID NO: 1586
  Description of Artificial Sequence: Synthetic oligonucleotide

SEQ ID NO: 1617 - DNA, 158 bp, Artificial Sequence; identical to SEQ ID NO: 1580
  Description of Artificial Sequence: Synthetic oligonucleotide

SEQ ID NO: 1618 - DNA, 260 bp, Artificial Sequence; identical to SEQ ID NO: 1587
  Description of Artificial Sequence: Synthetic oligonucleotide

SEQ ID NO: 1619 - DNA, 260 bp, Artificial Sequence; identical to SEQ ID NO: 1581
  Description of Artificial Sequence: Synthetic oligonucleotide

SEQ ID NO: 1620 - DNA, 21 bp, Artificial Sequence
  Description of Artificial Sequence: Synthetic oligonucleotide
gtttatgaactgatcttaccc

SEQ ID NO: 1621 - DNA, 21 bp, Artificial Sequence
  Description of Artificial Sequence: Synthetic oligonucleotide
gtgttagacggtactgatccc

SEQ ID NO: 1622 - DNA, 21 bp, Artificial Sequence
  Description of Artificial Sequence: Synthetic oligonucleotide
cctgctagctccatgcttccc

SEQ ID NO: 1623 - DNA, 21 bp, Artificial Sequence
  Description of Artificial Sequence: Synthetic oligonucleotide
gtttatgaactgatcttagcc

SEQ ID NO: 1624 - DNA, 21 bp, Artificial Sequence
  Description of Artificial Sequence: Synthetic oligonucleotide
gtgttagacggtactgatgcc

SEQ ID NO: 1625 - DNA, 21 bp, Artificial Sequence
  Description of Artificial Sequence: Synthetic oligonucleotide
cctgctagctccatgcttgcc

SEQ ID NO: 1626 - DNA, 21 bp, Artificial Sequence
  Description of Artificial Sequence: Synthetic oligonucleotide
gtttatgaagtgatcttaacc

SEQ ID NO: 1627 - DNA, 21 bp, Artificial Sequence
  Description of Artificial Sequence: Synthetic oligonucleotide
gtgttagaccgtactgatacc

SEQ ID NO: 1628 - DNA, 21 bp, Artificial Sequence
  Description of Artificial Sequence: Synthetic oligonucleotide
cctgctagcaccatgcttacc

SEQ ID NO: 1629 - DNA, 21 bp, Artificial Sequence
  Description of Artificial Sequence: Synthetic oligonucleotide
gtttatgaactgatcttaacc

SEQ ID NO: 1630 - DNA, 21 bp, Artificial Sequence
  Description of Artificial Sequence: Synthetic oligonucleotide
gtgttagacggtactgatacc

SEQ ID NO: 1631 - DNA, 21 bp, Artificial Sequence
  Description of Artificial Sequence: Synthetic oligonucleotide
cctgctagctccatgcttacc

SEQ ID NO: 1632 - DNA, 21 bp, Artificial Sequence
  Description of Artificial Sequence: Synthetic oligonucleotide
gtttatgaactgatcttgccc

SEQ ID NO: 1633 - DNA, 21 bp, Artificial Sequence
  Description of Artificial Sequence: Synthetic oligonucleotide
gtttatgaactgatcttggcc

SEQ ID NO: 1634 - DNA, 21 bp, Artificial Sequence
  Description of Artificial Sequence: Synthetic oligonucleotide
gtttatgaactgatcttgacc

SEQ ID NO: 1635 - DNA, 21 bp, Artificial Sequence
  Description of Artificial Sequence: Synthetic oligonucleotide
gcaattcagtctcgttgtccc

SEQ ID NO: 1636 - DNA, 21 bp, Artificial Sequence
  Description of Artificial Sequence: Synthetic oligonucleotide
tccaggtttatgaactgaccc

SEQ ID NO: 1637 - DNA, 21 bp, Artificial Sequence
  Description of Artificial Sequence: Synthetic oligonucleotide
ggtttatgaactgacgttccc

SEQ ID NO: 1638 - DNA, 21 bp, Artificial Sequence
  Description of Artificial Sequence: Synthetic oligonucleotide
ccacaatgttgtgactggccc

SEQ ID NO: 1639 - DNA, 21 bp, Artificial Sequence
  Description of Artificial Sequence: Synthetic oligonucleotide
gtcacaaagaaccgtgtaccc

SEQ ID NO: 1640 - DNA, 21 bp, Artificial Sequence
  Description of Artificial Sequence: Synthetic oligonucleotide
tgaacctcttgttataaaccc

SEQ ID NO: 1641 - DNA, 21 bp, Artificial Sequence
  Description of Artificial Sequence: Synthetic oligonucleotide
ccgacaaccagtatttggccc

SEQ ID NO: 1642 - DNA, 21 bp, Artificial Sequence
  Description of Artificial Sequence: Synthetic oligonucleotide
gcaattcagtctcgttgtgcc

SEQ ID NO: 1643 - DNA, 21 bp, Artificial Sequence
  Description of Artificial Sequence: Synthetic oligonucleotide
tccaggtttatgaactgagcc

SEQ ID NO: 1644 - DNA, 21 bp, Artificial Sequence
  Description of Artificial Sequence: Synthetic oligonucleotide
ggtttatgaactgacgttgcc

SEQ ID NO: 1645 - DNA, 21 bp, Artificial Sequence
  Description of Artificial Sequence: Synthetic oligonucleotide
ccacaatgttgtgactgggcc

SEQ ID NO: 1646 - DNA, 21 bp, Artificial Sequence
  Description of Artificial Sequence: Synthetic oligonucleotide
gtcacaaagaaccgtgtagcc

SEQ ID NO: 1647 - DNA, 21 bp, Artificial Sequence
  Description of Artificial Sequence: Synthetic oligonucleotide
tgaacctcttgttataaagcc

SEQ ID NO: 1648 - DNA, 21 bp, Artificial Sequence
  Description of Artificial Sequence: Synthetic oligonucleotide
ccgacaaccagtatttgggcc

SEQ ID NO: 1649 - DNA, 21 bp, Artificial Sequence
  Description of Artificial Sequence: Synthetic oligonucleotide
gcaattcagtctcgttgtacc

SEQ ID NO: 1650 - DNA, 21 bp, Artificial Sequence
  Description of Artificial Sequence: Synthetic oligonucleotide
tccaggtttatgaactgaacc

SEQ ID NO: 1651 - DNA, 21 bp, Artificial Sequence
  Description of Artificial Sequence: Synthetic oligonucleotide
ggtttatgaactgacgttacc

SEQ ID NO: 1652 - DNA, 21 bp, Artificial Sequence
  Description of Artificial Sequence: Synthetic oligonucleotide
ccacaatgttgtgactggacc

SEQ ID NO: 1653 - DNA, 21 bp, Artificial Sequence
  Description of Artificial Sequence: Synthetic oligonucleotide
gtcacaaagaaccgtgtaacc

SEQ ID NO: 1654 - DNA, 21 bp, Artificial Sequence
  Description of Artificial Sequence: Synthetic oligonucleotide
tgaacctcttgttataaaacc

SEQ ID NO: 1655 - DNA, 21 bp, Artificial Sequence
  Description of Artificial Sequence: Synthetic oligonucleotide
ccgacaaccagtatttggacc

SEQ ID NO: 1656 - DNA, 21 bp, Artificial Sequence
  Description of Artificial Sequence: Synthetic oligonucleotide
gcaattcagactcgttgtacc

SEQ ID NO: 1657 - DNA, 21 bp, Artificial Sequence
  Description of Artificial Sequence: Synthetic oligonucleotide
tccaggtttttgaactgaacc

SEQ ID NO: 1658 - DNA, 21 bp, Artificial Sequence
  Description of Artificial Sequence: Synthetic oligonucleotide
ggtttatgatctgacgttacc

SEQ ID NO: 1659 - DNA, 21 bp, Artificial Sequence
  Description of Artificial Sequence: Synthetic oligonucleotide
ccacaatgtagtgactggacc

SEQ ID NO: 1660 - DNA, 21 bp, Artificial Sequence
  Description of Artificial Sequence: Synthetic oligonucleotide
gtcacaaagtaccgtgtaacc

SEQ ID NO: 1661 - DNA, 21 bp, Artificial Sequence
  Description of Artificial Sequence: Synthetic oligonucleotide
tgaacctctagttataaaacc

SEQ ID NO: 1662 - DNA, 21 bp, Artificial Sequence
  Description of Artificial Sequence: Synthetic oligonucleotide
ccgacaacctgtatttggacc

SEQ ID NO: 1663 - DNA, 21 bp, Artificial Sequence
  Description of Artificial Sequence: Synthetic oligonucleotide
cattggaattcctaaaattcc

SEQ ID NO: 1664 - DNA, 21 bp, Artificial Sequence
  Description of Artificial Sequence: Synthetic oligonucleotide
gatcattggaattcctaatcc

SEQ ID NO: 1665 - DNA, 21 bp, Artificial Sequence
  Description of Artificial Sequence: Synthetic oligonucleotide
cattggaattcctaaaatgcc

SEQ ID NO: 1666 - DNA, 21 bp, Artificial Sequence
  Description of Artificial Sequence: Synthetic oligonucleotide
gatcattggaattcctaagcc

SEQ ID NO: 1667 - DNA, 21 bp, Artificial Sequence
  Description of Artificial Sequence: Synthetic oligonucleotide
cattggaattcctaaaatacc

SEQ ID NO: 1668 - DNA, 21 bp, Artificial Sequence
  Description of Artificial Sequence: Synthetic oligonucleotide
gatcattggaattcctaaacc

SEQ ID NO: 1669 - DNA, 21 bp, Artificial Sequence
  Description of Artificial Sequence: Synthetic oligonucleotide
cattggaatacctaaaatacc

SEQ ID NO: 1670 - DNA, 21 bp, Artificial Sequence
  Description of Artificial Sequence: Synthetic oligonucleotide
gatcattggtattcctaaacc

SEQ ID NO: 1671 - DNA, 21 bp, Artificial Sequence
  Description of Artificial Sequence: Synthetic oligonucleotide
cctgctagctccatgcttgct

SEQ ID NO: 1672 - DNA, 21 bp, Artificial Sequence
  Description of Artificial Sequence: Synthetic oligonucleotide
cctgctagctccatgcttgat

SEQ ID NO: 1673 - DNA, 21 bp, Artificial Sequence
  Description of Artificial Sequence: Synthetic oligonucleotide
ttaacgtcagttcataaactt

SEQ ID NO: 1674 - DNA, 21 bp, Artificial Sequence
  Description of Artificial Sequence: Synthetic oligonucleotide
tgtcggtaccgtctaacactt

SEQ ID NO: 1675 - DNA, 21 bp, Artificial Sequence
  Description of Artificial Sequence: Synthetic oligonucleotide
taagcatggagctagcaggtt

SEQ ID NO: 1676 - DNA, 21 bp, Artificial Sequence
  Description of Artificial Sequence: Synthetic oligonucleotide
tacaacgagactgaattgctt

SEQ ID NO: 1677 - DNA, 21 bp, Artificial Sequence
  Description of Artificial Sequence: Synthetic oligonucleotide
ttcagttcataaacctggatt

SEQ ID NO: 1678 - DNA, 21 bp, Artificial Sequence
  Description of Artificial Sequence: Synthetic oligonucleotide
taacgtcagttcataaacctt

SEQ ID NO: 1679 - DNA, 21 bp, Artificial Sequence
  Description of Artificial Sequence: Synthetic oligonucleotide
tccggtcacaacattgtggtt

SEQ ID NO: 1680 - DNA, 21 bp, Artificial Sequence
  Description of Artificial Sequence: Synthetic oligonucleotide
ttgcacggttctttgtgactt

SEQ ID NO: 1681 - DNA, 21 bp, Artificial Sequence
  Description of Artificial Sequence: Synthetic oligonucleotide
ttttataacaagaggttcatt

SEQ ID NO: 1682 - DNA, 21 bp, Artificial Sequence
  Description of Artificial Sequence: Synthetic oligonucleotide
tccaaatactggttgtcggtt

SEQ ID NO: 1683 - DNA, 21 bp, Artificial Sequence
  Description of Artificial Sequence: Synthetic oligonucleotide
tattttaggaattccaatgtt

SEQ ID NO: 1684 - DNA, 21 bp, Artificial Sequence
  Description of Artificial Sequence: Synthetic oligonucleotide
tttaggaattccaatgatctt

SEQ ID NO: 1685 - DNA, 22 bp, Artificial Sequence
  Description of Artificial Sequence: Synthetic oligonucleotide
taagcatggagctagcaggctt

SEQ ID NO: 1686 - DNA, 158 bp, Artificial Sequence
  Description of Artificial Sequence: Synthetic oligonucleotide
gtgctgggcggggggcggcgggccctcccgcagaacaccatgcgctccacggaataagcatggagctagcagggtgtgacccaaccctgctagctccatgcttattctgaggagcgccttgacagcagccatgggagggccgccccctacctcagtga

SEQ ID NO: 1687 - DNA, 163 bp, Artificial Sequence
  Description of Artificial Sequence: Synthetic oligonucleotide
gtgctgggcggggggcggcgggccctcccgcagaacaccatgcgctcctcggaataagcatggagctagcaggttgtggccactgagaaacctgctagctccatgcttgttctgcggagcgccttgacagcagccatgggagggccgccccctacctcagtga

SEQ ID NO: 1688 - DNA, 21 bp, Artificial Sequence
  Description of Artificial Sequence: Synthetic oligonucleotide
cctgctagctccatgcttatt

SEQ ID NO: 1689 - DNA, 21 bp, Artificial Sequence
  Description of Artificial Sequence: Synthetic oligonucleotide
cctgctagctccatgcttgtt

SEQ ID NO: 1690 - DNA, 21 bp, Artificial Sequence
  Description of Artificial Sequence: Synthetic oligonucleotide
taagcatggagctagcagggt

SEQ ID NO: 1691 - DNA, 21 bp, Artificial Sequence
  Description of Artificial Sequence: Synthetic oligonucleotide
taagcatggagctagcaggtt

SEQ ID NO: 1692 - DNA, 50 bp, Artificial Sequence
  Description of Artificial Sequence: Synthetic oligonucleotide
tttatgcctcatcctctgagtgctgaaggcttgctgtaggctgtatgctg

SEQ ID NO: 1693 - DNA, 10 bp, Artificial Sequence
  Description of Artificial Sequence: Synthetic oligonucleotide
tataatttgg

SEQ ID NO: 1694 - DNA, 11 bp, Artificial Sequence
  Description of Artificial Sequence: Synthetic oligonucleotide
cctgacccagt

SEQ ID NO: 1695 - DNA, 50 bp, Artificial Sequence
  Description of Artificial Sequence: Synthetic oligonucleotide
agtgtatgatgcctgttactagcattcacatggaacaaattgctgccgtg

SEQ ID NO: 1696 - DNA, 152 bp, Artificial Sequence
  Description of Artificial Sequence: Synthetic oligonucleotide
tttatgcctcatcctctgagtgctgaaggcttgctgtaggctgtatgctgcaatgtgactgctgacaaccctgtgacctggtttgtcagcagtcacattgttagtgtatgatgcctgttactagcattcacatggaacaaattgctgccgtg

SEQ ID NO: 1697 - DNA, 158 bp, Artificial Sequence
  Description of Artificial Sequence: Synthetic oligonucleotide
gtgctgggcggggggcggcgggccctcccgcagaacaccatgcgctcttcggaacaatgtgactgctgacaaccctgtgacctggtttgtcagcagtcacattgttctgaggagcgccttgacagcagccatgggagggccgccccctacctcagtga

SEQ ID NO: 1698 - DNA, 158 bp, Artificial Sequence
  Description of Artificial Sequence: Synthetic oligonucleotide
gtgctgggcggggggcggcgggccctcccgcagaacaccatgcgctcttcggaacaatgtgactgctgacaatcctgtgacctggtttgtcagcagtcacattgttctgaggagcgccttgacagcagccatgggagggccgccccctacctcagtga

SEQ ID NO: 1699 - DNA, 158 bp, Artificial Sequence
  Description of Artificial Sequence: Synthetic oligonucleotide
gtgctgggcggggggcggcgggccctcccgcagaacaccatgcgctcttcggaacaatgtgactgctgacaagcctgtgacctggtttgtcagcagtcacattgttctgaggagcgccttgacagcagccatgggagggccgccccctacctcagtga

SEQ ID NO: 1700 - DNA, 158 bp, Artificial Sequence
  Description of Artificial Sequence: Synthetic oligonucleotide
gtgctgggcggggggcggcgggccctcccgcagaacaccatgcgctcttcggaacaatgtgactgctgacaaacctgtgacctggtttgtcagcagtcacattgttctgaggagcgccttgacagcagccatgggagggccgccccctacctcagtga

SEQ ID NO: 1701 - DNA, 158 bp, Artificial Sequence
  Description of Artificial Sequence: Synthetic oligonucleotide
gtgctgggcggggggcggcgggccctcccgcagaacaccatgcgctcttcggaacaatgtgacagctgacaaacctgtgacctggtttgtcagcagtcacattgttctgaggagcgccttgacagcagccatgggagggccgccccctacctcagtga

SEQ ID NO: 1702 - DNA, 157 bp, Artificial Sequence
  Description of Artificial Sequence: Synthetic oligonucleotide
gtgctgggcggggggcggcgggccctcccgcagaacaccatgcgctcttcggaacaatgtgactgctgacaacctgtgacctggtttgtcagcagtcacattgttctgaggagcgccttgacagcagccatgggagggccgccccctacctcagtga

SEQ ID NO: 1703 - DNA, 159 bp, Artificial Sequence
  Description of Artificial Sequence: Synthetic oligonucleotide
gtgctgggcggggggcggcgggccctcccgcagaacaccatgcgctcttcggaacaatgtgactgctgacaatccctgtgacctggtttgtcagcagtcacattgttctgaggagcgccttgacagcagccatgggagggccgccccctacctcagtga

SEQ ID NO: 1704 - DNA, 158 bp, Artificial Sequence
  Description of Artificial Sequence: Synthetic oligonucleotide
gtgctgggcggggggcggcgggccctcccgcagaacaccatgcgctcttcggaacaatgtgactgctgacaaccctgtgatttggtttgtcagcagtcacattgttctgaggagcgccttgacagcagccatgggagggccgccccctacctcagtga

SEQ ID NO: 1705 - DNA, 158 bp, Artificial Sequence
  Description of Artificial Sequence: Synthetic oligonucleotide
gtgctgggcggggggcggcgggccctcccgcagaacaccatgcgctcttcggaacaatgtgactgctgacaaccctataatttggtttgtcagcagtcacattgttctgaggagcgccttgacagcagccatgggagggccgccccctacctcagtga

SEQ ID NO: 1706 - DNA, 159 bp, Artificial Sequence
  Description of Artificial Sequence: Synthetic oligonucleotide
gtgctgggcggggggcggcgggccctcccgcagaacaccatgcgctcttcggaacaatgtgactgctgacaacaccctgacccagttttgtcagcagtcacattgttctgaggagcgccttgacagcagccatgggagggccgccccctacctcagtga

SEQ ID NO: 1707 - DNA, 158 bp, Artificial Sequence
  Description of Artificial Sequence: Synthetic oligonucleotide
gtgctgggcggggggcggcgggccctcccgcagaacaccatgcgctcttcggaacaatgtgactgctgacaaccctgtgacctggtttgtcagcagtcacattgttctgtggagcgccttgacagcagccatgggagggccgccccctacctcagtga

SEQ ID NO: 1708 - DNA, 158 bp, Artificial Sequence
  Description of Artificial Sequence: Synthetic oligonucleotide
gtgctgggcggggggcggcgggccctcccgcagaacaccatgcgctcttcggaacaatgtgactgctgacaatcctgtgacctggtttgtcagcagtcacattgttctgtggagcgccttgacagcagccatgggagggccgccccctacctcagtga

SEQ ID NO: 1709 - DNA, 158 bp, Artificial Sequence
  Description of Artificial Sequence: Synthetic oligonucleotide
gtgctgggcggggggcggcgggccctcccgcagaacaccatgcgctcttcggaacaatgtgacagctgacaaacctgtgacctggtttgtcagcagtcacattgttctgtggagcgccttgacagcagccatgggagggccgccccctacctcagtga

SEQ ID NO: 1710 - DNA, 159 bp, Artificial Sequence
  Description of Artificial Sequence: Synthetic oligonucleotide
gtgctgggcggggggcggcgggccctcccgcagaacaccatgcgctcttcggaacaatgtgactgctgacaacaccctgacccagttttgtcagcagtcacattgttctgtggagcgccttgacagcagccatgggagggccgccccctacctcagtga

SEQ ID NO: 1711 - DNA, 158 bp, Artificial Sequence
  Description of Artificial Sequence: Synthetic oligonucleotide
gtgctgggcggggggcggcgggccctcccgcagaacaccatgcgctcttcggaacaatgtgactgctgacaagcctgtgacctggtttgtcagcagtcacattgttctgtggagcgccttgacagcagccatgggagggccgccccctacctcagtga

SEQ ID NO: 1712 - DNA, 158 bp, Artificial Sequence
  Description of Artificial Sequence: Synthetic oligonucleotide
gtgctgggcggggggcggcgggccctcccgcagaacaccatgcgctcttcggaacgacgaaggccgtgtgcgccctgtgacctggtcgcacacggccttcgtcgttctgaggagcgccttgacagcagccatgggagggccgccccctacctcagtga

SEQ ID NO: 1713 - DNA, 158 bp, Artificial Sequence
  Description of Artificial Sequence: Synthetic oligonucleotide
gtgctgggcggggggcggcgggccctcccgcagaacaccatgcgctcttcggaatgacttgggcaaaggtggccctgtgacctggtccacctttgcccaagtcattctgaggagcgccttgacagcagccatgggagggccgccccctacctcagtga

SEQ ID NO: 1714 - DNA, 158 bp, Artificial Sequence
  Description of Artificial Sequence: Synthetic oligonucleotide
gtgctgggcggggggcggcgggccctcccgcagaacaccatgcgctcttcggaaaactcatctgttatcctgccctgtgacctggtcaggataacagatgagttttctgaggagcgccttgacagcagccatgggagggccgccccctacctcagtga

SEQ ID NO: 1715 - DNA, 260 bp, Artificial Sequence
  Description of Artificial Sequence: Synthetic oligonucleotide
gaagcaaagaaggggcagagggagcccgtgagctgagtgggccagggactgggagaaggagtgaggaggcagggccggcatgcctctgctgctggccagacaatgtgactgctgacaacccgtctgcacctgtcactagtttgtcagcagtcacattgtttggccgtgtagtgctacccagcgctggctgcctcctcagcattgcaattcctctcccatctgggcaccagtcagctaccctggtgggaatctgggtagcc

SEQ ID NO: 1716 - DNA, 158 bp, Artificial Sequence
  Description of Artificial Sequence: Synthetic oligonucleotide
gtgctgggcggggggcggcgggccctcccgcagaacaccatgcgctcttcggaaccccttaactcatctgttccctgtgacctggtaacagatgagttaaggggttctgaggagcgccttgacagcagccatgggagggccgccccctacctcagtga

SEQ ID NO: 1717 - DNA, 158 bp, Artificial Sequence
  Description of Artificial Sequence: Synthetic oligonucleotide
gtgctgggcggggggcggcgggccctcccgcagaacaccatgcgctcttcggaacccttaactcatctgttaccctgtgacctggttaacagatgagttaagggttctgaggagcgccttgacagcagccatgggagggccgccccctacctcagtga

SEQ ID NO: 1718 - DNA, 158 bp, Artificial Sequence
  Description of Artificial Sequence: Synthetic oligonucleotide
gtgctgggcggggggcggcgggccctcccgcagaacaccatgcgctcttcggaaaactcatctgttatcttgccctgtgacctggtcaggataacagatgagttttctgaggagcgccttgacagcagccatgggagggccgccccctacctcagtga

SEQ ID NO: 1719 - DNA, 158 bp, Artificial Sequence
  Description of Artificial Sequence: Synthetic oligonucleotide
gtgctgggcggggggcggcgggccctcccgcagaacaccatgcgctcttcggaagctgtggaaatgtatcttccctgtgacctggtaggatacatttctacagcttctgaggagcgccttgacagcagccatgggagggccgccccctacctcagtga

SEQ ID NO: 1720 - DNA, 158 bp, Artificial Sequence
  Description of Artificial Sequence: Synthetic oligonucleotide
gtgctgggcggggggcggcgggccctcccgcagaacaccatgcgctcttcggaatgacttgggcaaaggtgagcctgtgacctggtccacctttgcccaagtcattctgaggagcgccttgacagcagccatgggagggccgccccctacctcagtga

SEQ ID NO: 1721 - DNA, 158 bp, Artificial Sequence
  Description of Artificial Sequence: Synthetic oligonucleotide
gtgctgggcggggggcggcgggccctcccgcagaacaccatgcgctcttcggaaccccttaactcatctgttgcctgtgacctggtaacagatgagttaaggggttctgaggagcgccttgacagcagccatgggagggccgccccctacctcagtga

SEQ ID NO: 1722 - DNA, 158 bp, Artificial Sequence
  Description of Artificial Sequence: Synthetic oligonucleotide
gtgctgggcggggggcggcgggccctcccgcagaacaccatgcgctcttcggaacccttaactcatctgttagcctgtgacctggttaacagatgagttaagggttctgaggagcgccttgacagcagccatgggagggccgccccctacctcagtga

SEQ ID NO: 1723 - DNA, 158 bp, Artificial Sequence
  Description of Artificial Sequence: Synthetic oligonucleotide
gtgctgggcggggggcggcgggccctcccgcagaacaccatgcgctcttcggaaaactcatctgttatcttagcctgtgacctggtcaggataacagatgagttttctgaggagcgccttgacagcagccatgggagggccgccccctacctcagtga

SEQ ID NO: 1724 - DNA, 158 bp, Artificial Sequence
  Description of Artificial Sequence: Synthetic oligonucleotide
gtgctgggcggggggcggcgggccctcccgcagaacaccatgcgctcttcggaagctgtggaaatgtatcttgcctgtgacctggtaggatacatttctacagcttctgaggagcgccttgacagcagccatgggagggccgccccctacctcagtga

SEQ ID NO: 1725 - DNA, 158 bp, Artificial Sequence
  Description of Artificial Sequence: Synthetic oligonucleotide
gtgctgggcggggggcggcgggccctcccgcagaacaccatgcgctcttcggaatgacttgggcaaaggtaggcctgtgacctggtccacctttgcccaagtcattctgaggagcgccttgacagcagccatgggagggccgccccctacctcagtga

SEQ ID NO: 1726 - DNA, 158 bp, Artificial Sequence
  Description of Artificial Sequence: Synthetic oligonucleotide
gtgctgggcggggggcggcgggccctcccgcagaacaccatgcgctcttcggaaccccttaactcatctgttccctgtgatttggtaacagatgagttaaggggttctgaggagcgccttgacagcagccatgggagggccgccccctacctcagtga

SEQ ID NO: 1727 - DNA, 158 bp, Artificial Sequence
  Description of Artificial Sequence: Synthetic oligonucleotide
gtgctgggcggggggcggcgggccctcccgcagaacaccatgcgctcttcggaacccttaactcatctgttaccctgtgatttggttaacagatgagttaagggttctgaggagcgccttgacagcagccatgggagggccgccccctacctcagtga

SEQ ID NO: 1728 - DNA, 158 bp, Artificial Sequence
  Description of Artificial Sequence: Synthetic oligonucleotide
gtgctgggcggggggcggcgggccctcccgcagaacaccatgcgctcttcggaaaactcatctgttatcttgccctgtgatttggtcaggataacagatgagttttctgaggagcgccttgacagcagccatgggagggccgccccctacctcagtga

SEQ ID NO: 1729 - DNA, 158 bp, Artificial Sequence
  Description of Artificial Sequence: Synthetic oligonucleotide
gtgctgggcggggggcggcgggccctcccgcagaacaccatgcgctcttcggaagctgtggaaatgtatcttccctgtgatttggtaggatacatttctacagcttctgaggagcgccttgacagcagccatgggagggccgccccctacctcagtga

SEQ ID NO: 1730 - DNA, 158 bp, Artificial Sequence
  Description of Artificial Sequence: Synthetic oligonucleotide
gtgctgggcggggggcggcgggccctcccgcagaacaccatgcgctcttcggaatgacttgggcaaaggtgagcctgtgatttggtccacctttgcccaagtcattctgaggagcgccttgacagcagccatgggagggccgccccctacctcagtga

SEQ ID NO: 1731 - DNA, 158 bp, Artificial Sequence
  Description of Artificial Sequence: Synthetic oligonucleotide
gtgctgggcggggggcggcgggccctcccgcagaacaccatgcgctcttcggaaccccttaacacatctgttacctgtgacctggtaacagatgagttaaggggttctgtggagcgccttgacagcagccatgggagggccgccccctacctcagtga

SEQ ID NO: 1732 - DNA, 158 bp, Artificial Sequence
  Description of Artificial Sequence: Synthetic oligonucleotide
gtgctgggcggggggcggcgggccctcccgcagaacaccatgcgctcttcggaacccttaactgatctgttaacctgtgacctggttaacagatgagttaagggttctgtggagcgccttgacagcagccatgggagggccgccccctacctcagtga

SEQ ID NO: 1733 - DNA, 158 bp, Artificial Sequence
  Description of Artificial Sequence: Synthetic oligonucleotide
gtgctgggcggggggcggcgggccctcccgcagaacaccatgcgctcttcggaaaactcatctcttatcttgccctgtgacctggtcaggataacagatgagttttctgtggagcgccttgacagcagccatgggagggccgccccctacctcagtga

SEQ ID NO: 1734 - DNA, 158 bp, Artificial Sequence
  Description of Artificial Sequence: Synthetic oligonucleotide
gtgctgggcggggggcggcgggccctcccgcagaacaccatgcgctcttcggaagctgtggaattgtatcttgcctgtgacctggtaggatacatttctacagcttctgtggagcgccttgacagcagccatgggagggccgccccctacctcagtga

SEQ ID NO: 1735 - DNA, 158 bp, Artificial Sequence
  Description of Artificial Sequence: Synthetic oligonucleotide
gtgctgggcggggggcggcgggccctcccgcagaacaccatgcgctcttcggaatgacttggggaaaggtgagcctgtgacctggtccacctttgcccaagtcattctgtggagcgccttgacagcagccatgggagggccgccccctacctcagtga

SEQ ID NO: 1736 - DNA, 158 bp, Artificial Sequence
  Description of Artificial Sequence: Synthetic oligonucleotide
gtgctgggcggggggcggcgggccctcccgcagaacaccatgcgctcttcggaaccccttaactcatctgttgcctgtgacctggtaacagatgagttaaggggttctgtggagcgccttgacagcagccatgggagggccgccccctacctcagtga

SEQ ID NO: 1737 - DNA, 158 bp, Artificial Sequence
  Description of Artificial Sequence: Synthetic oligonucleotide
gtgctgggcggggggcggcgggccctcccgcagaacaccatgcgctcttcggaacccttaactcatctgttagcctgtgacctggttaacagatgagttaagggttctgtggagcgccttgacagcagccatgggagggccgccccctacctcagtga

SEQ ID NO: 1738 - DNA, 158 bp, Artificial Sequence
  Description of Artificial Sequence: Synthetic oligonucleotide
gtgctgggcggggggcggcgggccctcccgcagaacaccatgcgctcttcggaaaactcatctgttatcttggcctgtgacctggtcaggataacagatgagttttctgtggagcgccttgacagcagccatgggagggccgccccctacctcagtga

SEQ ID NO: 1739 - DNA, 158 bp, Artificial Sequence
  Description of Artificial Sequence: Synthetic oligonucleotide
gtgctgggcggggggcggcgggccctcccgcagaacaccatgcgctcttcggaagctgtggaaatgtatcttgcctgtgacctggtaggatacatttctacagcttctgtggagcgccttgacagcagccatgggagggccgccccctacctcagtga

SEQ ID NO: 1740 - DNA, 158 bp, Artificial Sequence
  Description of Artificial Sequence: Synthetic oligonucleotide
gtgctgggcggggggcggcgggccctcccgcagaacaccatgcgctcttcggaatgacttgggcaaaggtaggcctgtgacctggtccacctttgcccaagtcattctgtggagcgccttgacagcagccatgggagggccgccccctacctcagtga

SEQ ID NO: 1741 - DNA, 260 bp, Artificial Sequence
  Description of Artificial Sequence: Synthetic oligonucleotide
gaagcaaagaaggggcagagggagcccgtgagctgagtgggccagggactgggagaaggagtgaggaggcagggccggcatgcctctgctgctggccagaccccttaactcatttgttcccgtctgcacctgtcactagtaacagatgagttaaggggtttggccgtgtagtgctacccagcgctggctgcctcctcagcattgcaattcctctcccatctgggcaccagtcagctaccctggtgggaatctgggtagcc

SEQ ID NO: 1742 - DNA, 260 bp, Artificial Sequence
  Description of Artificial Sequence: Synthetic oligonucleotide
gaagcaaagaaggggcagagggagcccgtgagctgagtgggccagggactgggagaaggagtgaggaggcagggccggcatgcctctgctgctggccagacccttaactcatctgttacccgtctgcacctgtcactagttaacagatgagttaagggtttggccgtgtagtgctacccagcgctggctgcctcctcagcattgcaattcctctcccatctgggcaccagtcagctaccctggtgggaatctgggtagcc

SEQ ID NO: 1743 - DNA, 260 bp, Artificial Sequence
  Description of Artificial Sequence: Synthetic oligonucleotide
gaagcaaagaaggggcagagggagcccgtgagctgagtgggccagggactgggagaaggagtgaggaggcagggccggcatgcctctgctgctggccagaaactcatctgttatcttgcccgtctgcacctgtcactagtcaggataacagatgagtttttggccgtgtagtgctacccagcgctggctgcctcctcagcattgcaattcctctcccatctgggcaccagtcagctaccctggtgggaatctgggtagcc

SEQ ID NO: 1744 - DNA, 260 bp, Artificial Sequence
  Description of Artificial Sequence: Synthetic oligonucleotide
gaagcaaagaaggggcagagggagcccgtgagctgagtgggccagggactgggagaaggagtgaggaggcagggccggcatgcctctgctgctggccagagctgtggaaatgtatcttcccgtctgcacctgtcactagtaggatacatttctacagctttggccgtgtagtgctacccagcgctggctgcctcctcagcattgcaattcctctcccatctgggcaccagtcagctaccctggtgggaatctgggtagcc

SEQ ID NO: 1745 - DNA, 260 bp, Artificial Sequence
  Description of Artificial Sequence: Synthetic oligonucleotide
gaagcaaagaaggggcagagggagcccgtgagctgagtgggccagggactgggagaaggagtgaggaggcagggccggcatgcctctgctgctggccagatgacttgggcaaaggtagcccgtctgcacctgtcactagtccacctttgcccaagtcatttggccgtgtagtgctacccagcgctggctgcctcctcagcattgcaattcctctcccatctgggcaccagtcagctaccctggtgggaatctgggtagcc

SEQ ID NO: 1746 - DNA, 21 bp, Artificial Sequence
  Description of Artificial Sequence: Synthetic oligonucleotide
caatgtgactgctgacaaccc

SEQ ID NO: 1747 - DNA, 21 bp, Artificial Sequence
  Description of Artificial Sequence: Synthetic oligonucleotide
tttgtcagcagtcacattgtt

SEQ ID NO: 1748 - DNA, 21 bp, Artificial Sequence
  Description of Artificial Sequence: Synthetic oligonucleotide
caatgtgactgctgacaatcc

SEQ ID NO: 1749 - DNA, 21 bp, Artificial Sequence
  Description of Artificial Sequence: Synthetic oligonucleotide
caatgtgactgctgacaagcc

SEQ ID NO: 1750 - DNA, 21 bp, Artificial Sequence
  Description of Artificial Sequence: Synthetic oligonucleotide
caatgtgactgctgacaaacc

SEQ ID NO: 1751 - DNA, 21 bp, Artificial Sequence
  Description of Artificial Sequence: Synthetic oligonucleotide
caatgtgacagctgacaaacc

SEQ ID NO: 1752 - DNA, 20 bp, Artificial Sequence
  Description of Artificial Sequence: Synthetic oligonucleotide
caatgtgactgctgacaacc

SEQ ID NO: 1753 - DNA, 21 bp, Artificial Sequence
  Description of Artificial Sequence: Synthetic oligonucleotide
caatgtgactgctgacaacac

SEQ ID NO: 1754 - DNA, 22 bp, Artificial Sequence
  Description of Artificial Sequence: Synthetic oligonucleotide
caatgtgactgctgacaatccc

SEQ ID NO: 1755 - DNA, 21 bp, Artificial Sequence
  Description of Artificial Sequence: Synthetic oligonucleotide
cgacgaaggccgtgtgcgccc

SEQ ID NO: 1756 - DNA, 21 bp, Artificial Sequence
  Description of Artificial Sequence: Synthetic oligonucleotide
tcgcacacggccttcgtcgtt

SEQ ID NO: 1757 - DNA, 21 bp, Artificial Sequence
  Description of Artificial Sequence: Synthetic oligonucleotide
tgacttgggcaaaggtggccc

SEQ ID NO: 1758 - DNA, 21 bp, Artificial Sequence
  Description of Artificial Sequence: Synthetic oligonucleotide
tccacctttgcccaagtcatt

SEQ ID NO: 1759 - DNA, 21 bp, Artificial Sequence
  Description of Artificial Sequence: Synthetic oligonucleotide
aactcatctgttatcctgccc

SEQ ID NO: 1760 - DNA, 21 bp, Artificial Sequence
  Description of Artificial Sequence: Synthetic oligonucleotide
tcaggataacagatgagtttt

SEQ ID NO: 1761 - DNA, 21 bp, Artificial Sequence
  Description of Artificial Sequence: Synthetic oligonucleotide
ccccttaactcatctgttccc

SEQ ID NO: 1762 - DNA, 21 bp, Artificial Sequence
  Description of Artificial Sequence: Synthetic oligonucleotide
taacagatgagttaaggggtt

SEQ ID NO: 1763 - DNA, 21 bp, Artificial Sequence
  Description of Artificial Sequence: Synthetic oligonucleotide
cccttaactcatctgttaccc

SEQ ID NO: 1764 - DNA, 21 bp, Artificial Sequence
  Description of Artificial Sequence: Synthetic oligonucleotide
ttaacagatgagttaagggtt

SEQ ID NO: 1765 - DNA, 21 bp, Artificial Sequence
  Description of Artificial Sequence: Synthetic oligonucleotide
aactcatctgttatcttgccc

SEQ ID NO: 1766 - DNA, 21 bp, Artificial Sequence
  Description of Artificial Sequence: Synthetic oligonucleotide
gctgtggaaatgtatcttccc

SEQ ID NO: 1767 - DNA, 21 bp, Artificial Sequence
  Description of Artificial Sequence: Synthetic oligonucleotide
taggatacatttctacagctt

SEQ ID NO: 1768 - DNA, 21 bp, Artificial Sequence
  Description of Artificial Sequence: Synthetic oligonucleotide
tgacttgggcaaaggtgagcc

SEQ ID NO: 1769 - DNA, 21 bp, Artificial Sequence
  Description of Artificial Sequence: Synthetic oligonucleotide
ccccttaactcatctgttgcc

SEQ ID NO: 1770 - DNA, 21 bp, Artificial Sequence
  Description of Artificial Sequence: Synthetic oligonucleotide
cccttaactcatctgttagcc

SEQ ID NO: 1771 - DNA, 21 bp, Artificial Sequence
  Description of Artificial Sequence: Synthetic oligonucleotide
aactcatctgttatcttagcc

SEQ ID NO: 1772 - DNA, 21 bp, Artificial Sequence
  Description of Artificial Sequence: Synthetic oligonucleotide
gctgtggaaatgtatcttgcc

SEQ ID NO: 1773 - DNA, 21 bp, Artificial Sequence
  Description of Artificial Sequence: Synthetic oligonucleotide
tgacttgggcaaaggtaggcc

SEQ ID NO: 1774 - DNA, 21 bp, Artificial Sequence
  Description of Artificial Sequence: Synthetic oligonucleotide
ccccttaacacatctgttacc

SEQ ID NO: 1775 - DNA, 21 bp, Artificial Sequence
  Description of Artificial Sequence: Synthetic oligonucleotide
cccttaactgatctgttaacc

SEQ ID NO: 1776 - DNA, 21 bp, Artificial Sequence
  Description of Artificial Sequence: Synthetic oligonucleotide
aactcatctcttatcttgccc

SEQ ID NO: 1777 - DNA, 21 bp, Artificial Sequence
  Description of Artificial Sequence: Synthetic oligonucleotide
gctgtggaattgtatcttgcc

SEQ ID NO: 1778 - DNA, 21 bp, Artificial Sequence
  Description of Artificial Sequence: Synthetic oligonucleotide
tgacttggggaaaggtgagcc

SEQ ID NO: 1779 - DNA, 21 bp, Artificial Sequence
  Description of Artificial Sequence: Synthetic oligonucleotide
aactcatctgttatcttggcc

SEQ ID NO: 1780 - DNA, 21 bp, Artificial Sequence
  Description of Artificial Sequence: Synthetic oligonucleotide
ccccttaactcatttgttccc

SEQ ID NO: 1781 - DNA, 21 bp, Artificial Sequence
  Description of Artificial Sequence: Synthetic oligonucleotide
tgacttgggcaaaggtagccc

SEQ ID NO: 1782 - DNA, 54 bp, Artificial Sequence
  Description of Artificial Sequence: Synthetic oligonucleotide
gtgctgggcggggggcggcgggccctcccgcagaacaccatgcgctcttcggga

SEQ ID NO: 1783 - DNA, 54 bp, Artificial Sequence
  Description of Artificial Sequence: Synthetic oligonucleotide
tcctgaggagcgccttgacagcagccatgggagggccgccccctacctcagtga

SEQ ID NO: 1784 - DNA, 158 bp, Artificial Sequence
  Description of Artificial Sequence: Synthetic oligonucleotide
gtgctgggcggggggcggcgggccctcccgcagaacaccatgcgctcttcgggatttgtcagcagtcacattgtctgtgacctggcaatgtgactgctgacaaatcctgaggagcgccttgacagcagccatgggagggccgccccctacctcagtga

SEQ ID NO: 1785 - DNA, 21 bp, Artificial Sequence
  Description of Artificial Sequence: Synthetic oligonucleotide
tttgtcagcagtcacattgtc

SEQ ID NO: 1786 - DNA, 19 bp, Artificial Sequence
  Description of Artificial Sequence: Synthetic oligonucleotide
caatgtgactgctgacaaa

SEQ ID NO: 1787 - DNA, 141 bp, Artificial Sequence
  Description of Artificial Sequence: Synthetic oligonucleotide
cctgcaggcagctgcgcgctcgctcgctcactgaggccgcccgggcaaagcccgggcgtcgggcgacctttggtcgcccggcctcagtgagcgagcgagcgcgcagagagggagtggccaactccatcactaggggttcct

SEQ ID NO: 1788 - DNA, 105 bp, Artificial Sequence
  Description of Artificial Sequence: Synthetic oligonucleotide
ctgcgcgctcgctcgctcactgaggccgcccgggcaaagcccgggcgtcgggcgacctttggtcgcccggcctcagtgagcgagcgagcgcgcagagagggagtg

SEQ ID NO: 1789 - DNA, 141 bp, Artificial Sequence
  Description of Artificial Sequence: Synthetic oligonucleotide
aggaacccctagtgatggagttggccactccctctctgcgcgctcgctcgctcactgaggccgggcgaccaaaggtcgcccgacgcccgggctttgcccgggcggcctcagtgagcgagcgagcgcgcagctgcctgcagg

SEQ ID NO: 1790 - DNA, 130 bp, Artificial Sequence
  Description of Artificial Sequence: Synthetic oligonucleotide
aggaacccctagtgatggagttggccactccctctctgcgcgctcgctcgctcactgaggccgggcgaccaaaggtcgcccgacgcccgggctttgcccgggcggcctcagtgagcgagcgagcgcgcag

SEQ ID NO: 1791 - DNA, 10 bp, Artificial Sequence
  Description of Artificial Sequence: Synthetic oligonucleotide
gtcgacataa

SEQ ID NO: 1792 - DNA, 121 bp, Artificial Sequence
  Description of Artificial Sequence: Synthetic oligonucleotide
gtcgacataacgcgtaattcgcccttgggcctaggcaattggatccgccggcagagaaaacatcccagggatttacagatcacatgcaggcagggaccagctcaacccttctacgcgtata

SEQ ID NO: 1793 - DNA, 73 bp, Artificial Sequence
  Description of Artificial Sequence: Synthetic oligonucleotide
gtcgacataacgcgtaattcgcccttgggcctaggcaattggatccgccggcagagaaaacatcacgcgtata

SEQ ID NO: 1794 - DNA, 18 bp, Artificial Sequence
  Description of Artificial Sequence: Synthetic oligonucleotide
gtcgacataacgcgtata

SEQ ID NO: 1795 - DNA, 14 bp, Artificial Sequence
  Description of Artificial Sequence: Synthetic oligonucleotide
ctcgagagatctac

SEQ ID NO: 1796 - DNA, 3013 bp, Artificial Sequence
  Description of Artificial Sequence: Synthetic oligonucleotide
aattcgcccttgggcctaggcaattggatccgccggcagagaaaacatcccagggatttacagatcacatgcaggcagggaccagctcaacccttctttaatgtcatccagggagggggccagggatggaggggaggggttgaggagcgagaggcagttatttttgggtgggattcaccacttttcccatgaagaggggagacttggtattttgttcaatcattaagaagacaaagggtttgttgaacttgacctcgggggggatagacatgggtatggcctctaaaaacatggccccagcagcttcagtccctttctcgtcgatggtcagcacagccttatgcacggcctggaggggagagaagcagagacacgttgtaaggctgatcccaggcctcgagcaaggctcacgtggacacctcccaggaagcgctcactccccctggacggccctggccctgcacatcctctccctccctgtcacataggccttgctcctcctcaaggctttggctgatggggctggctcccctctgtccatcttcctgacaagcgcctctccccctgctcaggtgcacccacaactcagaacagggaagagcatcgtcactccacgtctgcctccagggctctctcctttctagtacacggcttgaagctccttgaggacacggaccctggcagtgaccttcacagtgcccagaccccaagataatgcagccattcatggaactgcaggttgttcattggtcgcctttagttttccaaaataagtgtcactttagctgaaatcattcattaattcagacaccaaatctcacagatcgaaggagtcagaaattcctttgaaacaacttagcccaaacctttctgtgtcagtatggataaatcaaggcccaatgtctagaaggtcttgggcaaagttgaaattcagggtcagtgacacaacctcaagggaggccccgaaagtgccagctgcacagcagcccctgcctggctttgctgtttgcccaccgtcccgtgtcagtgaatcacgggcatcttcaggagctcagcctgggtcttcatttgtttccctcggccccttcctcagcctcaggacagtgctgcagcccccacacattcttccctacagataccatggtgcaacaaggtcgtcagggtgatctcaccttggagagcttcaggggtgcctcctctgtgaccccggagaggtcagccccattgctgaagaccttagtgatgcccagttgacccaggacgctcttcagatcataggttccagtaatggacagtttgggtaaatgtaagctggcagacctgtcgtgcagaaaagaaattcaaggcatggcacagcattcctcttgttcttctgggacccaccacagtgcaagtgttttcttttctgattatttctgccacttactcctgtgtcctccacccacactaagatgggaactcggctttggtttgttctacttttagctcttctacattgagtcaaagaatgttaacatcgaatgaatcacaaaagcttgaaatgccacctcctctgatattctaggtgtcctggaagcctgtctcatcttgccctgtagtgttgggtcacctggcccccagcctgtaacatccccagggccctacacccagagaaacacggggctggtggcagtgcccagtgacaaccgtttagtggataagagaagagtgaccacaccaggctgagtgctcctctctggttttccatggggagacaatgccaccctgagcagggtctggtgtgagcggcagctggctctgggctctctgatccgttaccctctcagcctctttgttctttctcaacccctggagcagagacctcaggaggtgctggcatggaacagagaaattccagcctcgattcctattatgaacccgacaccttttgtattttcatcttggttttacagtgtacaaaacgaactagatcagcagggcatgggcataatcacgaatgcacacacatacactaatgtgtggctcatgtttaagtatcacttactacaggacacccaatctaacagcaccgataaagtgacagagaaacgcaagccttctgcgaacatggcctggctgttccaattccgaaccttgcttttctgggccttgccacacaggctcttcccccgtccccccagggacattctacccttgaactccacactccactgctgcctttgccaggaagcccatctgttcctttttggttctgccagaacgtgtggtggtgctgctgtccctgccttgggcactggatattgggaagggacagtgtccacactggagtgggaagttcccagggacgagacctttacctcctcaccctgggtactgttctcctcatggagcatggacggcgctgcctgaactcagtggtggcctcattctggaagccaagtttatacagagtagcagtgacccagggatgtggggttcaccctcctcagccctctggccagtcctgatgggcctcagtcccaacatggctaagaggtgtgggcagcttcttggtcaccctcaggttggggaatcaccttctgtcttcattttccaggaacttggtgatgatatcgtgggtgagttcatttaccaggtgctgtagtttcccctcatcaggcaggaagaagatggcggtggcattgcccaggtatttcatcagcagcacccagctggacagcttcttacagtgctggatgttaaacatgcctaaacgcttcatcataggcaccttcacggtggtcacctggtccacgtggaagtcctcttcctcggtgtccttgacttcaaagggtctctcccatttgcctggagagaggggaaggtgggcatcaccaggggtgagtgaaggtttggaagagtgtagcagaataagaaaccatgagtcccctccctgagaagccctgagcccccttgacgacacacatccctcgaggctcagcttcatcatctgtaaaaggtgctgaaactgacc

SEQ ID NO: 1797 - DNA, 712 bp, Artificial Sequence
  Description of Artificial Sequence: Synthetic oligonucleotide
aattcgcccttgggcctaggcaattggatccgccggcagagaaaacatcccagggatttacagatcacatgcaggcagggaccagctcaacccttctttaatgtcatccagggagggggccagggatggaggggaggggttgaggagcgagaggcagttatttttgggtgggattcaccacttttcccatgaagaggggagacttggtattttgttcaatcattaagaagacaaagggtttgttgaacttgacctcgggggggatagacatgggtatggcctctaaaaacatggccccagcagcttcagtccctttctcgtcgatggtcagcacagccttatgcacggcctggaggggagagaagcagagacacgttgtaaggctgatcccaggcctcgagcaaggctcacgtggacacctcccaggaagcgctcactccccctggacggccctggccctgcacatcctctccctccctgtcacataggccttgctcctcctcaaggctttggctgatggggctggctcccctctgtccatcttcctgacaagcgcctctccccctgctcaggtgcacccacaactcagaacagggaagagcatcgtcactccacgtctgcctccagggctctctcctttctagtacacggcttgaagctccttgaggacacggaccctggcagtgaccttcacagtgcccagaccacgcgt

SEQ ID NO: 1798 - DNA, 2405 bp, Artificial Sequence
  Description of Artificial Sequence: Synthetic oligonucleotide
aattcgcccttgggcctaggcaattggatccgccggcagagaaaacatcccagggatttacagatcacatgcaggcagggaccagctcaacccttctttaatgtcatccagggagggggccagggatggaggggaggggttgaggagcgagaggcagttatttttgggtgggattcaccacttttcccatgaagaggggagacttggtattttgttcaatcattaagaagacaaagggtttgttgaacttgacctcgggggggatagacatgggtatggcctctaaaaacatggccccagcagcttcagtccctttctcgtcgatggtcagcacagccttatgcacggcctggaggggagagaagcagagacacgttgtaaggctgatcccaggcctcgagcaaggctcacgtggacacctcccaggaagcgctcactccccctggacggccctggccctgcacatcctctccctccctgtcacataggccttgctcctcctcaaggctttggctgatggggctggctcccctctgtccatcttcctgacaagcgcctctccccctgctcaggtgcacccacaactcagaacagggaagagcatcgtcactccacgtctgcctccagggctctctcctttctagtacacggcttgaagctccttgaggacacggaccctggcagtgaccttcacagtgcccagaccccaagataatgcagccattcatggaactgcagttgttcattggtcgcctttagttttccaaaataagtgtcatctttagctgaaatcattcattaattcagacaccaaatctcacagatcgaaggagtcagaaattcctttgaaacaacttagcccaaacctttctgtgtcagtatggataaatcaaggcccaatgtctagaaggtcttgggcaaagttgaaattcagggtcagtgacacaacctcaagggaggccccgaaagtgccagctgcacagcagtcccctgcctggctttgctgtttgaccacgtcccgtgtcagtgaatcacgggcatcttcaggagctcagcctgggtcttcatttgtttccctcggccccttcctcagcctcaggacagagctgcagcccccacacattcttccctacagataccagggtgcaacaaggtcgtcagggtgatctcaccttggagagcttcaggggtgcctcctctgtgaccccggagaggtcagccccattgctgaagaccttagtgatgcccagttgacccaggacgctcttcagatcataggttccagtaatggacagtttgggtaaatgtaagctggcagacctgtcgtgcagaaaagaaattcaaggcatggcacagcattcctcttgttcttctgggacccaccacagtgcaagtgttttcttttctgattatttctgccacttactcctgtgtcctccacccacactaagatgggaactcggctttggtttgttctacttttagctcttctacattgagtcaaagaatgttaacatcgaatgaatcacaaaagcttgaaatgccacctcctctgatattctaggtgtcctggaagcctgtctcatcttgccctgtagtgttgggtcacctggcccccagcctgtaacatccccagggccctacacccagagaaacacggggctggtggcagtgcccagtgacaaccgtttagtggataagagaagagtgaccacaccaggctgagtgctcctctctggttttccatgggggagacaatgccaccctgagcagggtctggtgtgagcgggcagcttggctctgggctctctgatccgttaccctctcagcctctttgttctttctcaacccctggagcagagacctcaggaggtgctggcatggaacagagaaattccagcctcgattcctattatgaacccgacaccttttgtattttcatcttggttttacagtgtacaaaacgaactagatcagcagggcatgggcataatcacgaatgcacacacatacactaatgtgtggctcatgtttaagtatcacttactacaggacacccaatctaacagcaccgataaagtgacagagaaacgcaagccttctgcgaacatggcctggctgttccaattccgaaccttgcttttctgggccttgccacacaggctcttcccccgtccccccagggacattctacccttgaactccacactccactgctgcctttgccaggaagcccatctgttcctttttggttctgccagaacgtgtggtggtgctgctgtccctgccctgggcactggatattgggaagggacagtgtccacactggagtgggaagtccccagggacgagacctttacctcctcacccctgggtactgttctcctcatggagcatggacgcgt

SEQ ID NO: 1799 - DNA, 1203 bp, Artificial Sequence
  Description of Artificial Sequence: Synthetic oligonucleotide
aattcgcccttgggcctaggcaattggatccgccggcagagaaaacatcccagggatttacagatcacatgcaggcagggaccagctcaacccttctttaatgtcatccagggagggggccagggatggaggggaggggttgaggagcgagaggcagttatttttgggtgggattcaccacttttcccatgaagaggggagacttggtattttgttcaatcattaagaagacaaagggtttgttgaacttgacctcgggggggatagacatgggtatggcctctaaaaacatggccccagcagcttcagtccctttctcgtcgatggtcagcacagccttatgcacggcctggaggggagagaagcagagacacgttgtaaggctgatcccaggcctcgagcaaggctcacgtggacacctcccaggaagcgctcactccccctggacggccctggccctgcacatcctctccctccctgtcacataggccttgctcctcctcaaggctttggctgatggggctggctcccctctgtccatcttcctgacaagcgcctctccccctgctcaggtgcacccacaactcagaacagggaagagcatcgtcactccacgtctgcctccagggctctctcctttctagtacacggcttgaagctccttgaggacacggaccctggcagtgaccttcacagtgcccagaccccaagataatgcagccattcatggaactgcagttgttcattggtcgcctttagttttccaaaataagtgtcatctttagctgaaatcattcattaattcagacaccaaatctcacagatcgaaggagtcagaaattcctttgaaacaacttagcccaaacctttctgtgtcagtatggataaatcaaggcccaatgtctagaaggtcttgggcaaagttgaaattcagggtcagtgacacaacctcaagggaggccccgaaagtgccagctgcacagcagtcccctgcctggctttgctgtttgaccacgtcccgtgtcagtgaatcacgggcatcttcaggagctcagcctgggtcttcatttgtttccctcggccccttcctcagcctcaggacagagctgcagcccccacacattcttccctacagataccagggtgcaacaaggtcgtcagggtgatctcaccttggagagcttcaggggtgcctccacgcgt

SEQ ID NO: 1800 - DNA, 103 bp, Artificial Sequence
  Description of Artificial Sequence: Synthetic oligonucleotide
aattcgcccttgggcctaggcaattggatccgccggcagagaaaacatcccagggatttacagatcacatgcaggcagggaccagctcaacccttctacgcgt

SEQ ID NO: 1801 - DNA, 55 bp, Artificial Sequence
  Description of Artificial Sequence: Synthetic oligonucleotide
aattcgcccttgggcctaggcaattggatccgccggcagagaaaacatcacgcgt

SEQ ID NO: 1802 - DNA, 1512 bp, Artificial Sequence
  Description of Artificial Sequence: Synthetic oligonucleotide
cgcgtaattcgcccttgggcctaggcaattggatccgccggcagagaaaacatcccagggatttacagatcacatgcaggcagggaccagctcaacccttctttaatgtcatccagggagggggccagggatggaggggaggggttgaggagcgagaggcagttatttttgggtgggattcaccacttttcccatgaagaggggagacttggtattttgttcaatcattaagaagacaaagggtttgttgaacttgacctcgggggggatagacatgggtatggcctctaaaaacatggccccagcagcttcagtccctttctcgtcgatggtcagcacagccttatgcacggcctggaggggagagaagcagagacacgttgtaaggctgatcccaggcctcgagcaaggctcacgtggacacctcccaggaagcgctcactccccctggacggccctggccctgcacatcctctccctccctgtcacataggccttgctcctcctcaaggctttggctgatggggctggctcccctctgtccatcttcctgacaagcgcctctccccctgctcaggtgcacccacaactcagaacagggaagagcatcgtcactccacgtctgcctccagggctctctcctttctagtacacggcttgaagctccttgaggacacggaccctggcagtgaccttcacagtgcccagaccccaagataatgcagccattcatggaactgcagttgttcattggtcgcctttagttttccaaaataagtgtcatctttagctgaaatcattcattaattcagacaccaaatctcacagatcgaaggagtcagaaattcctttgaaacaacttagcccaaacctttctgtgtcagtatggataaatcaaggcccaatgtctagaaggtcttgggcaaagttgaaattcagggtcagtgacacaacctcaagggaggccccgaaagtgccagctgcacagcagtcccctgcctggctttgctgtttgaccacgtcccgtgtcagtgaatcacgggcatcttcaggagctcagcctgggtcttcatttgtttccctcggccccttcctcagcctcaggacagagctgcagcccccacacattcttccctacagataccatggtgcaacaaggtcgtcagggtgatctcaccttggagagcttcaggggtgcctcctctgtgaccccggagaggtcagccccattgctgaagaccttagtgatgcccagttgacccaggacgctcttcagatcataggttccagtaatggacagtttgggtaaatgtaagctggcagacctgtcgtgcagaaaagaaattcaaggcatggcacagcattcctcttgttcttctgggacccaccacagtgcaagtgttttcttttctgattatttctgccacttactcctgtgtcctccacccacactaagatgggaactcggctttggtttgttctacttttagctcttctacattgagtcaaaga

SEQ ID NO: 1803 - DNA, 363 bp, Artificial Sequence
  Description of Artificial Sequence: Synthetic oligonucleotide
aattcgcccttgggcctaggcaattggatccgccggcagagaaaacatcccagggatttacagatcacatgcaggcagggaccagctcaacccttctttaatgtcatccagggagggggccagggatggaggggaggggttgaggagcgagaggcagttatttttgggtgggattcaccacttttcccatgaagaggggagacttggtattttgttcaatcattaagaagacaaagggtttgttgaacttgacctcgggggggatagacatgggtatggcctctaaaaacatggccccagcagcttcagtccctttctcgtcgatggtcagcacagccttatgcacggcctggagggacgcgt

SEQ ID NO: 1804 - DNA, 2395 bp, Artificial Sequence
  Description of Artificial Sequence: Synthetic oligonucleotide
aattcgcccttgggcctaggcaattggatccgccggcagagaaaacatcccagggatttacagatcacatgcaggcagggaccagctcaacccttctttaatgtcatccagggagggggccagggatggaggggaggggttgaggagcgagaggcagttatttttgggtgggattcaccacttttcccatgaagaggggagacttggtattttgttcaatcattaagaagacaaagggtttgttgaacttgacctcgggggggatagacatgggtatggcctctaaaaacatggccccagcagcttcagtccctttctcgtcgatggtcagcacagccttatgcacggcctggaggggagagaagcagagacacgttgtaaggctgatcccaggcctcgagcaaggctcacgtggacacctcccaggaagcgctcactccccctggacggccctggccctgcacatcctctccctccctgtcacataggccttgctcctcctcaaggctttggctgatggggctggctcccctctgtccatcttcctgacaagcgcctctccccctgctcaggtgcacccacaactcagaacagggaagagcatcgtcactccacgtctgcctccagggctctctcctttctagtacacggcttgaagctccttgaggacacggaccctggcagtgaccttcacagtgcccagaccccaagataatgcagccattcatggaactgcaggttgttcattggtcgcctttagttttccaaaataagtgtcactttagctgaaatcattcattaattcagacaccaaatctcacagatcgaaggagtcagaaattcctttgaaacaacttagcccaaacctttctgtgtcagtatggataaatcaaggcccaatgtctagaaggtcttgggcaaagttgaaattcagggtcagtgacacaacctcaagggaggccccgaaagtgccagctgcacagcagcccctgcctggctttgctgtttgcccaccgtcccgtgtcagtgaatcacgggcatcttcaggagctcagcctgggtcttcatttgtttccctcggccccttcctcagcctcaggacagtgctgcagcccccacacattcttccctacagataccatggtgcaacaaggtcgtcagggtgatctcaccttggagagcttcaggggtgcctcctctgtgaccccggagaggtcagccccattgctgaagaccttagtgatgcccagttgacccaggacgctcttcagatcataggttccagtaatggacagtttgggtaaatgtaagctggcagacctgtcgtgcagaaaagaaattcaaggcatggcacagcattcctcttgttcttctgggacccaccacagtgcaagtgttttcttttctgattatttctgccacttactcctgtgtcctccacccacactaagatgggaactcggctttggtttgttctacttttagctcttctacattgagtcaaagaatgttaacatcgaatgaatcacaaaagcttgaaatgccacctcctctgatattctaggtgtcctggaagcctgtctcatcttgccctgtagtgttgggtcacctggcccccagcctgtaacatccccagggccctacacccagagaaacacggggctggtggcagtgcccagtgacaaccgtttagtggataagagaagagtgaccacaccaggctgagtgctcctctctggttttccatggggagacaatgccaccctgagcagggtctggtgtgagcggcagctggctctgggctctctgatccgttaccctctcagcctctttgttctttctcaacccctggagcagagacctcaggaggtgctggcatggaacagagaaattccagcctcgattcctattatgaacccgacaccttttgtattttcatcttggttttacagtgtacaaaacgaactagatcagcagggcatgggcataatcacgaatgcacacacatacactaatgtgtggctcatgtttaagtatcacttactacaggacacccaatctaacagcaccgataaagtgacagagaaacgcaagccttctgcgaacatggcctggctgttccaattccgaaccttgcttttctgggccttgccacacaggctcttcccccgtccccccagggacattctacccttgaactccacactccactgctgcctttgccaggaagcccatctgttcctttttggttctgccagaacgtgtggtggtgctgctgtccctgccttgggcactggatattgggaagggacagtgtccacactggagtgggaagttcccagggacgagacctttacctcctcaccctgggtactgttctcctcatggagcatgg

SEQ ID NO: 1805 - DNA, 97 bp, Artificial Sequence
  Description of Artificial Sequence: Synthetic oligonucleotide
aattcgcccttgggcctaggcaattggatccgccggcagagaaaacatcccagggatttacagatcacatgcaggcagggaccagctcaacccttct

SEQ ID NO: 1806 - DNA, 714 bp, Artificial Sequence
  Description of Artificial Sequence: Synthetic oligonucleotide
aattcgcccttgggcctaggcaattggatccgccggcagagaaaacatcccagggatttacagatcacatgcaggcagggaccagctcaacccttctttaatgtcatccagggagggggccagggatggaggggaggggttgaggagcgagaggcagttatttttgggtgggattcaccacttttcccatgaagaggggagacttggtattttgttcaatcattaagaagacaaagggtttgttgaacttgacctcgggggggatagacatgggtatggcctctaaaaacatggccccagcagcttcagtccctttctcgtcgatggtcagcacagccttatgcacggcctggaggggagagaagcagagacacgttgtaaggctgatcccaggcctcgagcaaggctcacgtggacacctcccaggaagcgctcactccccctggacggccctggccctgcacatcctctccctccctgtcacataggccttgctcctcctcaaggctttggctgatggggctggctcccctctgtccatcttcctgacaagcgcctctccccctgctcaggtgcacccacaactcagaacagggaagagcatcgtcactccacgtctgcctccagggctctctcctttctagtacacggcttgaagctccttgaggacacggaccctggcagtgaccttcacagtgcccagaccatttaaat

SEQ ID NO: 1807 - DNA, 3021 bp, Artificial Sequence
  Description of Artificial Sequence: Synthetic oligonucleotide
aattcgcccttgggcctaggcaattggatccgccggcagagaaaacatcccagggatttacagatcacatgcaggcagggaccagctcaacccttctttaatgtcatccagggagggggccagggatggaggggaggggttgaggagcgagaggcagttatttttgggtgggattcaccacttttcccatgaagaggggagacttggtattttgttcaatcattaagaagacaaagggtttgttgaacttgacctcgggggggatagacatgggtatggcctctaaaaacatggccccagcagcttcagtccctttctcgtcgatggtcagcacagccttatgcacggcctggaggggagagaagcagagacacgttgtaaggctgatcccaggcctcgagcaaggctcacgtggacacctcccaggaagcgctcactccccctggacggccctggccctgcacatcctctccctccctgtcacataggccttgctcctcctcaaggctttggctgatggggctggctcccctctgtccatcttcctgacaagcgcctctccccctgctcaggtgcacccacaactcagaacagggaagagcatcgtcactccacgtctgcctccagggctctctcctttctagtacacggcttgaagctccttgaggacacggaccctggcagtgaccttcacagtgcccagaccccaagataatgcagccattcatggaactgcaggttgttcattggtcgcctttagttttccaaaataagtgtcactttagctgaaatcattcattaattcagacaccaaatctcacagatcgaaggagtcagaaattcctttgaaacaacttagcccaaacctttctgtgtcagtatggataaatcaaggcccaatgtctagaaggtcttgggcaaagttgaaattcagggtcagtgacacaacctcaagggaggccccgaaagtgccagctgcacagcagcccctgcctggctttgctgtttgcccaccgtcccgtgtcagtgaatcacgggcatcttcaggagctcagcctgggtcttcatttgtttccctcggccccttcctcagcctcaggacagtgctgcagcccccacacattcttccctacagataccatggtgcaacaaggtcgtcagggtgatctcaccttggagagcttcaggggtgcctcctctgtgaccccggagaggtcagccccattgctgaagaccttagtgatgcccagttgacccaggacgctcttcagatcataggttccagtaatggacagtttgggtaaatgtaagctggcagacctgtcgtgcagaaaagaaattcaaggcatggcacagcattcctcttgttcttctgggacccaccacagtgcaagtgttttcttttctgattatttctgccacttactcctgtgtcctccacccacactaagatgggaactcggctttggtttgttctacttttagctcttctacattgagtcaaagaatgttaacatcgaatgaatcacaaaagcttgaaatgccacctcctctgatattctaggtgtcctggaagcctgtctcatcttgccctgtagtgttgggtcacctggcccccagcctgtaacatccccagggccctacacccagagaaacacggggctggtggcagtgcccagtgacaaccgtttagtggataagagaagagtgaccacaccaggctgagtgctcctctctggttttccatggggagacaatgccaccctgagcagggtctggtgtgagcggcagctggctctgggctctctgatccgttaccctctcagcctctttgttctttctcaacccctggagcagagacctcaggaggtgctggcatggaacagagaaattccagcctcgattcctattatgaacccgacaccttttgtattttcatcttggttttacagtgtacaaaacgaactagatcagcagggcatgggcataatcacgaatgcacacacatacactaatgtgtggctcatgtttaagtatcacttactacaggacacccaatctaacagcaccgataaagtgacagagaaacgcaagccttctgcgaacatggcctggctgttccaattccgaaccttgcttttctgggccttgccacacaggctcttcccccgtccccccagggacattctacccttgaactccacactccactgctgcctttgccaggaagcccatctgttcctttttggttctgccagaacgtgtggtggtgctgctgtccctgccttgggcactggatattgggaagggacagtgtccacactggagtgggaagttcccagggacgagacctttacctcctcaccctgggtactgttctcctcatggagcatggacggcgctgcctgaactcagtggtggcctcattctggaagccaagtttatacagagtagcagtgacccagggatgtggggttcaccctcctcagccctctggccagtcctgatgggcctcagtcccaacatggctaagaggtgtgggcagcttcttggtcaccctcaggttggggaatcaccttctgtcttcattttccaggaacttggtgatgatatcgtgggtgagttcatttaccaggtgctgtagtttcccctcatcaggcaggaagaagatggcggtggcattgcccaggtatttcatcagcagcacccagctggacagcttcttacagtgctggatgttaaacatgcctaaacgcttcatcataggcaccttcacggtggtcacctggtccacgtggaagtcctcttcctcggtgtccttgacttcaaagggtctctcccatttgcctggagagaggggaaggtgggcatcaccaggggtgagtgaaggtttggaagagtgtagcagaataagaaaccatgagtcccctccctgagaagccctgagcccccttgacgacacacatccctcgaggctcagcttcatcatctgtaaaaggtgctgaaactgaccatttaaat

SEQ ID NO: 1808 - DNA, 1209 bp, Artificial Sequence
  Description of Artificial Sequence: Synthetic oligonucleotide
tctgtgaccccggagaggtcagccccattgctgaagaccttagtgatgcccagttgacccaggacgctcttcagatcataggttccagtaatggacagtttgggtaaatgtaagctggcagacctgtcgtgcagaaaagaaattcaaggcatggcacagcattcctcttgttcttctgggacccaccacagtgcaagtgttttcttttctgattatttctgccacttactcctgtgtcctccacccacactaagatgggaactcggctttggtttgttctacttttagctcttctacattgagtcaaagaatgttaacatcgaatgaatcacaaaagcttgaaatgccacctcctctgatattctaggtgtcctggaagcctgtctcatcttgccctgtagtgttgggtcacctggcccccagcctgtaacatccccagggccctacacccagagaaacacggggctggtggcagtgcccagtgacaaccgtttagtggataagagaagagtgaccacaccaggctgagtgctcctctctggttttccatggggagacaatgccaccctgagcagggtctggtgtgagcgggcagcttggctctgggctctctgatccgttaccctctcagcctctttgttctttctcaacccctggagcagagacctcaggaggtgctggcatggaacagagaaattccagcctcgattcctattatgaacccgacaccttttgtattttcatcttggttttacagtgtacaaaacgaactagatcagcagggcatgggcataatcacgaatgcacacacatacactaatgtgtggctcatgtttaagtatcacttactacaggacacccaatctaacagcaccgataaagtgacagagaaacgcaagccttctgcgaacatggcctggctgttccaattccgaaccttgcttttctgggccttgccacacaggctcttcccccgtccccccagggacattctacccttgaactccacactccactgctgcctttgccaggaagcccatctgttcctttttggttctgccagaacgtgtggtggtgctgctgtccctgccctgggcactggatattgggaagggacagtgtccacactggagtgggaagtccccagggacgagacctttacctcctcacccctgggtactgttctcctcatggagcatggatttaaat

SEQ ID NO: 1809 - DNA, 56 bp, Artificial Sequence
  Description of Artificial Sequence: Synthetic oligonucleotide
ccagggatttacagatcacatgcaggcagggaccagctcaactcttctatttaaat

SEQ ID NO: 1810 - DNA, 1519 bp, Artificial Sequence
  Description of Artificial Sequence: Synthetic oligonucleotide
aatgttaacatcgaatgaatcacaaaagcttgaaatgccacctcctctgatattctaggtgtcctggaagcctgtctcatcttgccctgtagtgttgggtcacctggcccccagcctgtaacatccccagggccctacacccagagaaacacggggctggtggcagtgcccagtgacaaccgtttagtggataagagaagagtgaccacaccaggctgagtgctcctctctggttttccatggggagacaatgccaccctgagcagggtctggtgtgagcgggcagcttggctctgggctctctgatccgttaccctctcagcctctttgttctttctcaacccctggagcagagacctcaggaggtgctggcatggaacagagaaattccagcctcgattcctattatgaacccgacaccttttgtattttcatcttggttttacagtgtacaaaacgaactagatcagcagggcatgggcataatcacgaatgcacacacatacactaatgtgtggctcatgtttaagtatcacttactacaggacacccaatctaacagcaccgataaagtgacagagaaacgcaagccttctgcgaacatggcctggctgttccaattccgaaccttgcttttctgggccttgccacacaggctcttcccccgtccccccagggacattctacccttgaactccacactccactgctgcctttgccaggaagcccatctgttcctttttggttctgccagaacgtgtggtggtgctgctgtccctgccctgggcactggatattgggaagggacagtgtccacactggagtgggaagtccccagggacgagacctttacctcctcacccctgggtactgtcctcctcatggagcatggatggcgctgcctgaactcagtggtggcctcattctggaagccaagtttatacagagtagcagtgacccagggatgtggggttcaccctcctcagccctctggccagtcctgatgggcctcagtcccaacatggctaagaggtgtgggcagcttcttggtcaccctcaggttggggaatcaccttctgtcttcattttccaggaacttggtgatgatatcgtgggtgagttcattttccaggtgctgtagtttcccctcatcaggcaggaagaagatggcggtggcattgcccaggtatttcatcagcagcacccagctggacagcttcttacagtgctggatgttaaacatgcctaaacgcttcatcataggcaccttcacggtggtcacctggtccacgtggaagtcctcttcctcggtgtccttgacttcaaagggtctctcccatttgcctggagagaggggaaggtgggcatcaccaggggtgagtgaaggtttggaagagtgtagcagaataaagaaaccatgagtcccctccctgagaagccctgagcccccttgacgacacacatccctcgaggctcagcttcatcatctgtaaaaggtgctgaaactgaccatttaaat

SEQ ID NO: 1811 - DNA, 357 bp, Artificial Sequence
  Description of Artificial Sequence: Synthetic oligonucleotide
gagagaagcagagacacgttgtaaggctgatcccaggcctcgagcaaggctcacgtggacacctcccaggaagcgctcactccccctggacggccctggccctgcacatcctctccctccctgtcacataggccttgctcctcctcaaggctttggctgatggggctggctcccctctgtccatcttcctgacaagcgcctctccccctgctcaggtgcacccacaactcagaacagggaagagcatcgtcactccacgtctgcctccagggctctctcctttctagtacacggcttgaagctccttgaggacacggaccctggcagtgaccttcacagtgcccagaccatttaaat

SEQ ID NO: 1812 - DNA, 2403 bp, Artificial Sequence
  Description of Artificial Sequence: Synthetic oligonucleotide
aattcgcccttgggcctaggcaattggatccgccggcagagaaaacatcccagggatttacagatcacatgcaggcagggaccagctcaacccttctttaatgtcatccagggagggggccagggatggaggggaggggttgaggagcgagaggcagttatttttgggtgggattcaccacttttcccatgaagaggggagacttggtattttgttcaatcattaagaagacaaagggtttgttgaacttgacctcgggggggatagacatgggtatggcctctaaaaacatggccccagcagcttcagtccctttctcgtcgatggtcagcacagccttatgcacggcctggaggggagagaagcagagacacgttgtaaggctgatcccaggcctcgagcaaggctcacgtggacacctcccaggaagcgctcactccccctggacggccctggccctgcacatcctctccctccctgtcacataggccttgctcctcctcaaggctttggctgatggggctggctcccctctgtccatcttcctgacaagcgcctctccccctgctcaggtgcacccacaactcagaacagggaagagcatcgtcactccacgtctgcctccagggctctctcctttctagtacacggcttgaagctccttgaggacacggaccctggcagtgaccttcacagtgcccagaccccaagataatgcagccattcatggaactgcaggttgttcattggtcgcctttagttttccaaaataagtgtcactttagctgaaatcattcattaattcagacaccaaatctcacagatcgaaggagtcagaaattcctttgaaacaacttagcccaaacctttctgtgtcagtatggataaatcaaggcccaatgtctagaaggtcttgggcaaagttgaaattcagggtcagtgacacaacctcaagggaggccccgaaagtgccagctgcacagcagcccctgcctggctttgctgtttgcccaccgtcccgtgtcagtgaatcacgggcatcttcaggagctcagcctgggtcttcatttgtttccctcggccccttcctcagcctcaggacagtgctgcagcccccacacattcttccctacagataccatggtgcaacaaggtcgtcagggtgatctcaccttggagagcttcaggggtgcctcctctgtgaccccggagaggtcagccccattgctgaagaccttagtgatgcccagttgacccaggacgctcttcagatcataggttccagtaatggacagtttgggtaaatgtaagctggcagacctgtcgtgcagaaaagaaattcaaggcatggcacagcattcctcttgttcttctgggacccaccacagtgcaagtgttttcttttctgattatttctgccacttactcctgtgtcctccacccacactaagatgggaactcggctttggtttgttctacttttagctcttctacattgagtcaaagaatgttaacatcgaatgaatcacaaaagcttgaaatgccacctcctctgatattctaggtgtcctggaagcctgtctcatcttgccctgtagtgttgggtcacctggcccccagcctgtaacatccccagggccctacacccagagaaacacggggctggtggcagtgcccagtgacaaccgtttagtggataagagaagagtgaccacaccaggctgagtgctcctctctggttttccatggggagacaatgccaccctgagcagggtctggtgtgagcggcagctggctctgggctctctgatccgttaccctctcagcctctttgttctttctcaacccctggagcagagacctcaggaggtgctggcatggaacagagaaattccagcctcgattcctattatgaacccgacaccttttgtattttcatcttggttttacagtgtacaaaacgaactagatcagcagggcatgggcataatcacgaatgcacacacatacactaatgtgtggctcatgtttaagtatcacttactacaggacacccaatctaacagcaccgataaagtgacagagaaacgcaagccttctgcgaacatggcctggctgttccaattccgaaccttgcttttctgggccttgccacacaggctcttcccccgtccccccagggacattctacccttgaactccacactccactgctgcctttgccaggaagcccatctgttcctttttggttctgccagaacgtgtggtggtgctgctgtccctgccttgggcactggatattgggaagggacagtgtccacactggagtgggaagttcccagggacgagacctttacctcctcaccctgggtactgttctcctcatggagcatggatttaaat

SEQ ID NO: 1813 - DNA, 105 bp, Artificial Sequence
  Description of Artificial Sequence: Synthetic oligonucleotide
aattcgcccttgggcctaggcaattggatccgccggcagagaaaacatcccagggatttacagatcacatgcaggcagggaccagctcaacccttctatttaaat

SEQ ID NO: 1814 - DNA, 382 bp, Artificial Sequence
  Description of Artificial Sequence: Synthetic oligonucleotide
cgcgtcgacattgattattgactagttattaatagtaatcaattacggggtcattagttcatagcccatatatggagttccgcgttacataacttacggtaaatggcccgcctggctgaccgcccaacgacccccgcccattgacgtcaataatgacgtatgttcccatagtaacgccaatagggactttccattgacgtcaatgggtggagtatttacggtaaactgcccacttggcagtacatcaagtgtatcatatgccaagtacgccccctattgacgtcaatgacggtaaatggcccgcctggcattatgcccagtacatgaccttatgggactttcctacttggcagtacatctacgtattagtcatcgctattac

SEQ ID NO: 1815 - DNA, 303 bp, Artificial Sequence
  Description of Artificial Sequence: Synthetic oligonucleotide
cgttacataacttacggtaaatggcccgcctggctgaccgcccaacgacccccgcccattgacgtcaataatgacgtatgttcccatagtaacgccaatagggactttccattgacgtcaatgggtggagtatttacggtaaactgcccacttggcagtacatcaagtgtatcatatgccaagtacgccccctattgacgtcaatgacggtaaatggcccgcctggcattatgcccagtacatgaccttatgggactttcctacttggcagtacatctagtattagtcatcgctattaccatg

SEQ ID NO: 1816 - DNA, 260 bp, Artificial Sequence
  Description of Artificial Sequence: Synthetic oligonucleotide
ccacgttctgcttcactctccccatctcccccccctccccacccccaattttgtatttatttattttttaattattttgtgcagcgatgggggcggggggggggggcgcgcgccaggcggggcggggcggggcgaggggcggggcggggcgaggcggagaggtgcggcggcagccaatcagagcggcgcgctccgaaagtttccttttatggcgaggcggcggcggcggcggccctataaaaagcgaagcgcgcggcggg

SEQ ID NO: 1817 - DNA, 588 bp, Artificial Sequence
  Description of Artificial Sequence: Synthetic oligonucleotide
gttgacattgattattgactagttattaatagtaatcaattacggggtcattagttcatagcccatatatggagttccgcgttacataacttacggtaaatggcccgcctggctgaccgcccaacgacccccgcccattgacgtcaataatgacgtatgttcccatagtaacgccaatagggactttccattgacgtcaatgggtggagtatttacggtaaactgcccacttggcagtacatcaagtgtatcatatgccaagtacgccccctattgacgtcaatgacggtaaatggcccgcctggcattatgcccagtacatgaccttatgggactttcctacttggcagtacatctacgtattagtcatcgctattaccatggtgatgcggttttggcagtacatcaatgggcgtggatagcggtttgactcacggggatttccaagtctccaccccattgacgtcaatgggagtttgttttggcaccaaaatcaacgggactttccaaaatgtcgtaacaactccgccccattgacgcaaatgggcggtaggcgtgtacggtgggaggtctatataagcagagctc

SEQ ID NO: 1818 - DNA, 204 bp, Artificial Sequence
  Description of Artificial Sequence: Synthetic oligonucleotide
gtgatgcggttttggcagtacatcaatgggcgtggatagcggtttgactcacggggatttccaagtctccaccccattgacgtcaatgggagtttgttttggcaccaaaatcaacgggactttccaaaatgtcgtaacaactccgccccattgacgcaaatgggcggtaggcgtgtacggtgggaggtctatataagcagagct

SEQ ID NO: 1819 - DNA, 219 bp, Artificial Sequence
  Description of Artificial Sequence: Synthetic oligonucleotide
aattcgaacgctgacgtcatcaacccgctccaaggaatcgcgggcccagtgtcactaggcgggaacacccagcgcgcgtgcgccctggcaggaagatggctgtgagggacagggagtggcgccctgcaatatttgcatgtcgctatgtgttctgggaaatcaccataaacgtgaaatgtctttggatttgggaatcttataagttctgtatgagaccac

SEQ ID NO: 1820 - DNA, 17 bp, Artificial Sequence
  Description of Artificial Sequence: Synthetic oligonucleotide
taatacgactcactata

SEQ ID NO: 1821 - DNA, 134 bp, Artificial Sequence
  Description of Artificial Sequence: Synthetic oligonucleotide
tcagatcgcctggagacgccatccacgctgttttgacctccatagaagacaccgggaccgatccagcctccgcggattcgaatcccggccgggaacggtgcattggaacgcggattccccgtgccaagagtgac

SEQ ID NO: 1822 - DNA, 53 bp, Artificial Sequence
  Description of Artificial Sequence: Synthetic oligonucleotide
ctcctgggcaacgtgctggtctgtgtgctggcccatcactttggcaaagaatt

SEQ ID NO: 1823 - DNA, 172 bp, Artificial Sequence
  Description of Artificial Sequence: Synthetic oligonucleotide
gaactgaaaaaccagaaagttaactggtaagtttagtctttttgtcttttatttcaggtcccggatccggtggtggtgcaaatcaaagaactgctcctcagtggatgttgcctttacttctaggcctgtacggaagtgttacttctgctctaaaagctgcggaattgtaccc

SEQ ID NO: 1824 - DNA, 32 bp, Artificial Sequence
  Description of Artificial Sequence: Synthetic oligonucleotide
gtaagtaccgcctatagagtctataggcccac

SEQ ID NO: 1825 - DNA, 347 bp, Artificial Sequence
  Description of Artificial Sequence: Synthetic oligonucleotide
aaaaaatgctttcttcttttaatatacttttttgtttatcttatttctaatactttccctaatctctttctttcagggcaataatgatacaatgtatcatgcctctttgcaccattctaaagaataacagtgataatttctgggttaaggcaatagcaatatttctgcatataaatatttctgcatataaattgtaactgatgtaagaggtttcatattgctaatagcagctacaatccagctaccattctgcttttattttatggttgggataaggctggattattctgagtccaagctaggcccttttgctaatcatgttcatacctcttatcttcctcccacag

SEQ ID NO: 1826 - DNA, 201 bp, Artificial Sequence
  Description of Artificial Sequence: Synthetic oligonucleotide
gaactgaaaaaccagaaagttaactggtaagtttagtctttttgtcttttatttcaggtcccggatccggtggtggtgcaaatcaaagaactgctcctcagtggatgttgcctttacttctaggcctgtacggaagtgttacttctgctctaaaagctgcggaattgtacccgcggccgatccaccggtaaacttaagctt

SEQ ID NO: 1827 - DNA, 127 bp, Artificial Sequence
  Description of Artificial Sequence: Synthetic oligonucleotide
gatctttttccctctgccaaaaattatggggacatcatgaagccccttgagcatctgacttctggctaataaaggaaatttattttcattgcaatagtgtgttggaattttttgtgtctctcactcg

SEQ ID NO: 1828 - DNA, 225 bp, Artificial Sequence
  Description of Artificial Sequence: Synthetic oligonucleotide
ctgtgccttctagttgccagccatctgttgtttgcccctcccccgtgccttccttgaccctggaaggtgccactcccactgtcctttcctaataaaatgaggaaattgcatcgcattgtctgagtaggtgtcattctattctggggggtggggtggggcaggacagcaagggggaggattgggaagacaatagcaggcatgctggggatgcggtgggctctatgg

SEQ ID NO: 1829 - DNA, 477 bp, Artificial Sequence
  Description of Artificial Sequence: Synthetic oligonucleotide
gggtggcatccctgtgacccctccccagtgcctctcctggccctggaagttgccactccagtgcccaccagccttgtcctaataaaattaagttgcatcattttgtctgactaggtgtccttctataatattatggggtggaggggggtggtatggagcaaggggcaagttgggaagacaacctgtagggcctgcggggtctattgggaaccaagctggagtgcagtggcacaatcttggctcactgcaatctccgcctcctgggttcaagcgattctcctgcctcagcctcccgagttgttgggattccaggcatgcatgaccaggctcagctaatttttgtttttttggtagagacggggtttcaccatattggccaggctggtctccaactcctaatctcaggtgatctacccaccttggcctcccaaattgctgggattacaggcgtgaaccactgctcccttccctgtcctt

SEQ ID NO: 1830 - DNA, 476 bp, Artificial Sequence
  Description of Artificial Sequence: Synthetic oligonucleotide
gggtggcatccctgtgacccctccccagtgcctctcctggccctggaagttgccactccagtgcccaccagccttgtcctaataaaattaagttgcatcattttgtctgactaggtgtccttctataatattatggggtggaggggggtggtatggagcaaggggcaagttgggaagacaacctgtagggcctgcggggtctattgggaaccaagctggagtgcagtggcacaatcttggctcactgcaatctccgcctcctgggttcaagcgattctcctgcctcagcctcccgagttgttgggattccaggcatgcatgaccaggctcagctaatttttgtttttttggtagagacggggtttcaccatattggccaggctggtctccaactcctaatctcaggtgatctacccaccttggcctcccaaattgctgggattacaggcgtgaaccactgctcccttccctgtcct

SEQ ID NO: 1831 - DNA, 1676 bp, Artificial Sequence
  Description of Artificial Sequence: Synthetic oligonucleotide
ctgcgcgctcgctcgctcactgaggccgcccgggcaaagcccgggcgtcgggcgacctttggtcgcccggcctcagtgagcgagcgagcgcgcagagagggagtgtagccatgctctaggaagatcaattcaattcacgcgtcgacattgattattgactagttattaatagtaatcaattacggggtcattagttcatagcccatatatggagttccgcgttacataacttacggtaaatggcccgcctggctgaccgcccaacgacccccgcccattgacgtcaataatgacgtatgttcccatagtaacgccaatagggactttccattgacgtcaatgggtggagtatttacggtaaactgcccacttggcagtacatcaagtgtatcatatgccaagtacgccccctattgacgtcaatgacggtaaatggcccgcctggcattatgcccagtacatgaccttatgggactttcctacttggcagtacatctacgtattagtcatcgctattaccatgtcgaggccacgttctgcttcactctccccatctcccccccctccccacccccaattttgtatttatttattttttaattattttgtgcagcgatgggggcggggggggggggcgcgcgccaggcggggcggggcggggcgaggggcggggcggggcgaggcggagaggtgcggcggcagccaatcagagcggcgcgctccgaaagtttccttttatggcgaggcggcggcggcggcggccctataaaaagcgaagcgcgcggcgggcgggagcaagcttgaactgaaaaaccagaaagttaactggtaagtttagtctttttgtcttttatttcaggtcccggatccggtggtggtgcaaatcaaagaactgctcctcagtggatgttgcctttacttctaggcctgtacggaagtgttacttctgctctaaaagctgcggaattgtacccgcggccgatccaccggtaaacttaagcttggtaccgagctcgtcgacgtgctgggcggggggcggcgggccctcccgcagaacaccatgcgctcttcggaacctgctagctccatgcttgcctgtgacctggtaagcatggagctagcaggttctgaggagcgccttgacagcagccatgggagggccgccccctacctcagtgactcgacgtgctgggcggggggcggcgggccctcccgcagaacaccatgcgctcttcggaacctgctagctccatgcttgcctgtgacctggtaagcatggagctagcaggttctgaggagcgccttgacagcagccatgggagggccgccccctacctcagtgactcgaggacggggtgaactacgcctgaggatccgatctttttccctctgccaaaaattatggggacatcatgaagccccttgagcatctgacttctggctaataaaggaaatttattttcattgcaatagtgtgttggaattttttgtgtctctcactcggcctaggtagataagtagcatggcgggttaatcattaactacaaggaacccctagtgatggagttggccactccctctctgcgcgctcgctcgctcactgaggccgggcgaccaaaggtcgcccgacgcccgggctttgcccgggcggcctcagtgagcgagcgagcgcgcag

SEQ ID NO: 1832 - DNA, 1676 bp, Artificial Sequence
  Description of Artificial Sequence: Synthetic oligonucleotide
ctgcgcgctcgctcgctcactgaggccgcccgggcaaagcccgggcgtcgggcgacctttggtcgcccggcctcagtgagcgagcgagcgcgcagagagggagtgtagccatgctctaggaagatcaattcaattcacgcgtcgacattgattattgactagttattaatagtaatcaattacggggtcattagttcatagcccatatatggagttccgcgttacataacttacggtaaatggcccgcctggctgaccgcccaacgacccccgcccattgacgtcaataatgacgtatgttcccatagtaacgccaatagggactttccattgacgtcaatgggtggagtatttacggtaaactgcccacttggcagtacatcaagtgtatcatatgccaagtacgccccctattgacgtcaatgacggtaaatggcccgcctggcattatgcccagtacatgaccttatgggactttcctacttggcagtacatctacgtattagtcatcgctattaccatgtcgaggccacgttctgcttcactctccccatctcccccccctccccacccccaattttgtatttatttattttttaattattttgtgcagcgatgggggcggggggggggggcgcgcgccaggcggggcggggcggggcgaggggcggggcggggcgaggcggagaggtgcggcggcagccaatcagagcggcgcgctccgaaagtttccttttatggcgaggcggcggcggcggcggccctataaaaagcgaagcgcgcggcgggcgggagcaagcttgaactgaaaaaccagaaagttaactggtaagtttagtctttttgtcttttatttcaggtcccggatccggtggtggtgcaaatcaaagaactgctcctcagtggatgttgcctttacttctaggcctgtacggaagtgttacttctgctctaaaagctgcggaattgtacccgcggccgatccaccggtaaacttaagcttggtaccgagctcgtcgacgtgctgggcggggggcggcgggccctcccgcagaacaccatgcgctcttcggaagcaattcagtctcgttgtgcctgtgacctggtacaacgagactgaattgcttctgaggagcgccttgacagcagccatgggagggccgccccctacctcagtgactcgacgtgctgggcggggggcggcgggccctcccgcagaacaccatgcgctcttcggaagcaattcagtctcgttgtgcctgtgacctggtacaacgagactgaattgcttctgaggagcgccttgacagcagccatgggagggccgccccctacctcagtgactcgaggacggggtgaactacgcctgaggatccgatctttttccctctgccaaaaattatggggacatcatgaagccccttgagcatctgacttctggctaataaaggaaatttattttcattgcaatagtgtgttggaattttttgtgtctctcactcggcctaggtagataagtagcatggcgggttaatcattaactacaaggaacccctagtgatggagttggccactccctctctgcgcgctcgctcgctcactgaggccgggcgaccaaaggtcgcccgacgcccgggctttgcccgggcggcctcagtgagcgagcgagcgcgcag

SEQ ID NO: 1833 - DNA, 1778 bp, Artificial Sequence
  Description of Artificial Sequence: Synthetic oligonucleotide
ctgcgcgctcgctcgctcactgaggccgcccgggcaaagcccgggcgtcgggcgacctttggtcgcccggcctcagtgagcgagcgagcgcgcagagagggagtgtagccatgctctaggaagatcaattcaattcacgcgtcgacattgattattgactagttattaatagtaatcaattacggggtcattagttcatagcccatatatggagttccgcgttacataacttacggtaaatggcccgcctggctgaccgcccaacgacccccgcccattgacgtcaataatgacgtatgttcccatagtaacgccaatagggactttccattgacgtcaatgggtggagtatttacggtaaactgcccacttggcagtacatcaagtgtatcatatgccaagtacgccccctattgacgtcaatgacggtaaatggcccgcctggcattatgcccagtacatgaccttatgggactttcctacttggcagtacatctacgtattagtcatcgctattaccatgtcgaggccacgttctgcttcactctccccatctcccccccctccccacccccaattttgtatttatttattttttaattattttgtgcagcgatgggggcggggggggggggcgcgcgccaggcggggcggggcggggcgaggggcggggcggggcgaggcggagaggtgcggcggcagccaatcagagcggcgcgctccgaaagtttccttttatggcgaggcggcggcggcggcggccctataaaaagcgaagcgcgcggcgggcgggagcaagcttgaactgaaaaaccagaaagttaactggtaagtttagtctttttgtcttttatttcaggtcccggatccggtggtggtgcaaatcaaagaactgctcctcagtggatgttgcctttacttctaggcctgtacggaagtgttacttctgctctaaaagctgcggaattgtacccgcggccgatccaccggtaaacttaagcttggtaccgagctcgtcgacgaagcaaagaaggggcagagggagcccgtgagctgagtgggccagggactgggagaaggagtgaggaggcagggccggcatgcctctgctgctggccagacctgctagctccatgcttcccgtctgcacctgtcactagtaagcatggagctagcaggtttggccgtgtagtgctacccagcgctggctgcctcctcagcattgcaattcctctcccatctgggcaccagtcagctaccctggtgggaatctgggtagccctcgacgtgctgggcggggggcggcgggccctcccgcagaacaccatgcgctcttcggaagcaattcagtctcgttgtgcctgtgacctggtacaacgagactgaattgcttctgaggagcgccttgacagcagccatgggagggccgccccctacctcagtgactcgaggacggggtgaactacgcctgaggatccgatctttttccctctgccaaaaattatggggacatcatgaagccccttgagcatctgacttctggctaataaaggaaatttattttcattgcaatagtgtgttggaattttttgtgtctctcactcggcctaggtagataagtagcatggcgggttaatcattaactacaaggaacccctagtgatggagttggccactccctctctgcgcgctcgctcgctcactgaggccgggcgaccaaaggtcgcccgacgcccgggctttgcccgggcggcctcagtgagcgagcgagcgcgcag

SEQ ID NO: 1834 - DNA, 1778 bp, Artificial Sequence
  Description of Artificial Sequence: Synthetic oligonucleotide
ctgcgcgctcgctcgctcactgaggccgcccgggcaaagcccgggcgtcgggcgacctttggtcgcccggcctcagtgagcgagcgagcgcgcagagagggagtgtagccatgctctaggaagatcaattcaattcacgcgtcgacattgattattgactagttattaatagtaatcaattacggggtcattagttcatagcccatatatggagttccgcgttacataacttacggtaaatggcccgcctggctgaccgcccaacgacccccgcccattgacgtcaataatgacgtatgttcccatagtaacgccaatagggactttccattgacgtcaatgggtggagtatttacggtaaactgcccacttggcagtacatcaagtgtatcatatgccaagtacgccccctattgacgtcaatgacggtaaatggcccgcctggcattatgcccagtacatgaccttatgggactttcctacttggcagtacatctacgtattagtcatcgctattaccatgtcgaggccacgttctgcttcactctccccatctcccccccctccccacccccaattttgtatttatttattttttaattattttgtgcagcgatgggggcggggggggggggcgcgcgccaggcggggcggggcggggcgaggggcggggcggggcgaggcggagaggtgcggcggcagccaatcagagcggcgcgctccgaaagtttccttttatggcgaggcggcggcggcggcggccctataaaaagcgaagcgcgcggcgggcgggagcaagcttgaactgaaaaaccagaaagttaactggtaagtttagtctttttgtcttttatttcaggtcccggatccggtggtggtgcaaatcaaagaactgctcctcagtggatgttgcctttacttctaggcctgtacggaagtgttacttctgctctaaaagctgcggaattgtacccgcggccgatccaccggtaaacttaagcttggtaccgagctcgtcgacgtgctgggcggggggcggcgggccctcccgcagaacaccatgcgctcttcggaagcaattcagtctcgttgtgcctgtgacctggtacaacgagactgaattgcttctgaggagcgccttgacagcagccatgggagggccgccccctacctcagtgactcgacgaagcaaagaaggggcagagggagcccgtgagctgagtgggccagggactgggagaaggagtgaggaggcagggccggcatgcctctgctgctggccagacctgctagctccatgcttcccgtctgcacctgtcactagtaagcatggagctagcaggtttggccgtgtagtgctacccagcgctggctgcctcctcagcattgcaattcctctcccatctgggcaccagtcagctaccctggtgggaatctgggtagccctcgaggacggggtgaactacgcctgaggatccgatctttttccctctgccaaaaattatggggacatcatgaagccccttgagcatctgacttctggctaataaaggaaatttattttcattgcaatagtgtgttggaattttttgtgtctctcactcggcctaggtagataagtagcatggcgggttaatcattaactacaaggaacccctagtgatggagttggccactccctctctgcgcgctcgctcgctcactgaggccgggcgaccaaaggtcgcccgacgcccgggctttgcccgggcggcctcagtgagcgagcgagcgcgcag

SEQ ID NO: 1835 - DNA, 1880 bp, Artificial Sequence
  Description of Artificial Sequence: Synthetic oligonucleotide
ctgcgcgctcgctcgctcactgaggccgcccgggcaaagcccgggcgtcgggcgacctttggtcgcccggcctcagtgagcgagcgagcgcgcagagagggagtgtagccatgctctaggaagatcaattcaattcacgcgtcgacattgattattgactagttattaatagtaatcaattacggggtcattagttcatagcccatatatggagttccgcgttacataacttacggtaaatggcccgcctggctgaccgcccaacgacccccgcccattgacgtcaataatgacgtatgttcccatagtaacgccaatagggactttccattgacgtcaatgggtggagtatttacggtaaactgcccacttggcagtacatcaagtgtatcatatgccaagtacgccccctattgacgtcaatgacggtaaatggcccgcctggcattatgcccagtacatgaccttatgggactttcctacttggcagtacatctacgtattagtcatcgctattaccatgtcgaggccacgttctgcttcactctccccatctcccccccctccccacccccaattttgtatttatttattttttaattattttgtgcagcgatgggggcggggggggggggcgcgcgccaggcggggcggggcggggcgaggggcggggcggggcgaggcggagaggtgcggcggcagccaatcagagcggcgcgctccgaaagtttccttttatggcgaggcggcggcggcggcggccctataaaaagcgaagcgcgcggcgggcgggagcaagcttgaactgaaaaaccagaaagttaactggtaagtttagtctttttgtcttttatttcaggtcccggatccggtggtggtgcaaatcaaagaactgctcctcagtggatgttgcctttacttctaggcctgtacggaagtgttacttctgctctaaaagctgcggaattgtacccgcggccgatccaccggtaaacttaagcttggtaccgagctcgtcgacgaagcaaagaaggggcagagggagcccgtgagctgagtgggccagggactgggagaaggagtgaggaggcagggccggcatgcctctgctgctggccagacctgctagctccatgcttcccgtctgcacctgtcactagtaagcatggagctagcaggtttggccgtgtagtgctacccagcgctggctgcctcctcagcattgcaattcctctcccatctgggcaccagtcagctaccctggtgggaatctgggtagccctcgacgaagcaaagaaggggcagagggagcccgtgagctgagtgggccagggactgggagaaggagtgaggaggcagggccggcatgcctctgctgctggccagacctgctagctccatgcttcccgtctgcacctgtcactagtaagcatggagctagcaggtttggccgtgtagtgctacccagcgctggctgcctcctcagcattgcaattcctctcccatctgggcaccagtcagctaccctggtgggaatctgggtagccctcgaggacggggtgaactacgcctgaggatccgatctttttccctctgccaaaaattatggggacatcatgaagccccttgagcatctgacttctggctaataaaggaaatttattttcattgcaatagtgtgttggaattttttgtgtctctcactcggcctaggtagataagtagcatggcgggttaatcattaactacaaggaacccctagtgatggagttggccactccctctctgcgcgctcgctcgctcactgaggccgggcgaccaaaggtcgcccgacgcccgggctttgcccgggcggcctcagtgagcgagcgagcgcgcag

SEQ ID NO: 1836 - DNA, 1880 bp, Artificial Sequence
  Description of Artificial Sequence: Synthetic oligonucleotide
ctgcgcgctcgctcgctcactgaggccgcccgggcaaagcccgggcgtcgggcgacctttggtcgcccggcctcagtgagcgagcgagcgcgcagagagggagtgtagccatgctctaggaagatcaattcaattcacgcgtcgacattgattattgactagttattaatagtaatcaattacggggtcattagttcatagcccatatatggagttccgcgttacataacttacggtaaatggcccgcctggctgaccgcccaacgacccccgcccattgacgtcaataatgacgtatgttcccatagtaacgccaatagggactttccattgacgtcaatgggtggagtatttacggtaaactgcccacttggcagtacatcaagtgtatcatatgccaagtacgccccctattgacgtcaatgacggtaaatggcccgcctggcattatgcccagtacatgaccttatgggactttcctacttggcagtacatctacgtattagtcatcgctattaccatgtcgaggccacgttctgcttcactctccccatctcccccccctccccacccccaattttgtatttatttattttttaattattttgtgcagcgatgggggcggggggggggggcgcgcgccaggcggggcggggcggggcgaggggcggggcggggcgaggcggagaggtgcggcggcagccaatcagagcggcgcgctccgaaagtttccttttatggcgaggcggcggcggcggcggccctataaaaagcgaagcgcgcggcgggcgggagcaagcttgaactgaaaaaccagaaagttaactggtaagtttagtctttttgtcttttatttcaggtcccggatccggtggtggtgcaaatcaaagaactgctcctcagtggatgttgcctttacttctaggcctgtacggaagtgttacttctgctctaaaagctgcggaattgtacccgcggccgatccaccggtaaacttaagcttggtaccgagctcgtcgacgaagcaaagaaggggcagagggagcccgtgagctgagtgggccagggactgggagaaggagtgaggaggcagggccggcatgcctctgctgctggccagagcaattcagtctcgttgtaccgtctgcacctgtcactagtacaacgagactgaattgctttggccgtgtagtgctacccagcgctggctgcctcctcagcattgcaattcctctcccatctgggcaccagtcagctaccctggtgggaatctgggtagccctcgacgaagcaaagaaggggcagagggagcccgtgagctgagtgggccagggactgggagaaggagtgaggaggcagggccggcatgcctctgctgctggccagagcaattcagtctcgttgtaccgtctgcacctgtcactagtacaacgagactgaattgctttggccgtgtagtgctacccagcgctggctgcctcctcagcattgcaattcctctcccatctgggcaccagtcagctaccctggtgggaatctgggtagccctcgaggacggggtgaactacgcctgaggatccgatctttttccctctgccaaaaattatggggacatcatgaagccccttgagcatctgacttctggctaataaaggaaatttattttcattgcaatagtgtgttggaattttttgtgtctctcactcggcctaggtagataagtagcatggcgggttaatcattaactacaaggaacccctagtgatggagttggccactccctctctgcgcgctcgctcgctcactgaggccgggcgaccaaaggtcgcccgacgcccgggctttgcccgggcggcctcagtgagcgagcgagcgcgcag

SEQ ID NO: 1837 - DNA, 1778 bp, Artificial Sequence
  Description of Artificial Sequence: Synthetic oligonucleotide
ctgcgcgctcgctcgctcactgaggccgcccgggcaaagcccgggcgtcgggcgacctttggtcgcccggcctcagtgagcgagcgagcgcgcagagagggagtgtagccatgctctaggaagatcaattcaattcacgcgtcgacattgattattgactagttattaatagtaatcaattacggggtcattagttcatagcccatatatggagttccgcgttacataacttacggtaaatggcccgcctggctgaccgcccaacgacccccgcccattgacgtcaataatgacgtatgttcccatagtaacgccaatagggactttccattgacgtcaatgggtggagtatttacggtaaactgcccacttggcagtacatcaagtgtatcatatgccaagtacgccccctattgacgtcaatgacggtaaatggcccgcctggcattatgcccagtacatgaccttatgggactttcctacttggcagtacatctacgtattagtcatcgctattaccatgtcgaggccacgttctgcttcactctccccatctcccccccctccccacccccaattttgtatttatttattttttaattattttgtgcagcgatgggggcggggggggggggcgcgcgccaggcggggcggggcggggcgaggggcggggcggggcgaggcggagaggtgcggcggcagccaatcagagcggcgcgctccgaaagtttccttttatggcgaggcggcggcggcggcggccctataaaaagcgaagcgcgcggcgggcgggagcaagcttgaactgaaaaaccagaaagttaactggtaagtttagtctttttgtcttttatttcaggtcccggatccggtggtggtgcaaatcaaagaactgctcctcagtggatgttgcctttacttctaggcctgtacggaagtgttacttctgctctaaaagctgcggaattgtacccgcggccgatccaccggtaaacttaagcttggtaccgagctcgtcgacgtgctgggcggggggcggcgggccctcccgcagaacaccatgcgctcttcggaacctgctagctccatgcttgcctgtgacctggtaagcatggagctagcaggttctgaggagcgccttgacagcagccatgggagggccgccccctacctcagtgactcgacgaagcaaagaaggggcagagggagcccgtgagctgagtgggccagggactgggagaaggagtgaggaggcagggccggcatgcctctgctgctggccagagcaattcagtctcgttgtaccgtctgcacctgtcactagtacaacgagactgaattgctttggccgtgtagtgctacccagcgctggctgcctcctcagcattgcaattcctctcccatctgggcaccagtcagctaccctggtgggaatctgggtagccctcgaggacggggtgaactacgcctgaggatccgatctttttccctctgccaaaaattatggggacatcatgaagccccttgagcatctgacttctggctaataaaggaaatttattttcattgcaatagtgtgttggaattttttgtgtctctcactcggcctaggtagataagtagcatggcgggttaatcattaactacaaggaacccctagtgatggagttggccactccctctctgcgcgctcgctcgctcactgaggccgggcgaccaaaggtcgcccgacgcccgggctttgcccgggcggcctcagtgagcgagcgagcgcgcag

SEQ ID NO: 1838 - DNA, 1778 bp, Artificial Sequence
  Description of Artificial Sequence: Synthetic oligonucleotide
ctgcgcgctcgctcgctcactgaggccgcccgggcaaagcccgggcgtcgggcgacctttggtcgcccggcctcagtgagcgagcgagcgcgcagagagggagtgtagccatgctctaggaagatcaattcaattcacgcgtcgacattgattattgactagttattaatagtaatcaattacggggtcattagttcatagcccatatatggagttccgcgttacataacttacggtaaatggcccgcctggctgaccgcccaacgacccccgcccattgacgtcaataatgacgtatgttcccatagtaacgccaatagggactttccattgacgtcaatgggtggagtatttacggtaaactgcccacttggcagtacatcaagtgtatcatatgccaagtacgccccctattgacgtcaatgacggtaaatggcccgcctggcattatgcccagtacatgaccttatgggactttcctacttggcagtacatctacgtattagtcatcgctattaccatgtcgaggccacgttctgcttcactctccccatctcccccccctccccacccccaattttgtatttatttattttttaattattttgtgcagcgatgggggcggggggggggggcgcgcgccaggcggggcggggcggggcgaggggcggggcggggcgaggcggagaggtgcggcggcagccaatcagagcggcgcgctccgaaagtttccttttatggcgaggcggcggcggcggcggccctataaaaagcgaagcgcgcggcgggcgggagcaagcttgaactgaaaaaccagaaagttaactggtaagtttagtctttttgtcttttatttcaggtcccggatccggtggtggtgcaaatcaaagaactgctcctcagtggatgttgcctttacttctaggcctgtacggaagtgttacttctgctctaaaagctgcggaattgtacccgcggccgatccaccggtaaacttaagcttggtaccgagctcgtcgacgaagcaaagaaggggcagagggagcccgtgagctgagtgggccagggactgggagaaggagtgaggaggcagggccggcatgcctctgctgctggccagagcaattcagtctcgttgtaccgtctgcacctgtcactagtacaacgagactgaattgctttggccgtgtagtgctacccagcgctggctgcctcctcagcattgcaattcctctcccatctgggcaccagtcagctaccctggtgggaatctgggtagccctcgacgtgctgggcggggggcggcgggccctcccgcagaacaccatgcgctcttcggaacctgctagctccatgcttgcctgtgacctggtaagcatggagctagcaggttctgaggagcgccttgacagcagccatgggagggccgccccctacctcagtgactcgaggacggggtgaactacgcctgaggatccgatctttttccctctgccaaaaattatggggacatcatgaagccccttgagcatctgacttctggctaataaaggaaatttattttcattgcaatagtgtgttggaattttttgtgtctctcactcggcctaggtagataagtagcatggcgggttaatcattaactacaaggaacccctagtgatggagttggccactccctctctgcgcgctcgctcgctcactgaggccgggcgaccaaaggtcgcccgacgcccgggctttgcccgggcggcctcagtgagcgagcgagcgcgcag

SEQ ID NO: 1839 - DNA, 1165 bp, Artificial Sequence
  Description of Artificial Sequence: Synthetic oligonucleotide
ctgcgcgctcgctcgctcactgaggccgcccgggcaaagcccgggcgtcgggcgacctttggtcgcccggcctcagtgagcgagcgagcgcgcagagagggagtgtagccatgctctaggaagatcaattcaattcacgcgttgacgtacgaaattcgaacgctgacgtcatcaacccgctccaaggaatcgcgggcccagtgtcactaggcgggaacacccagcgcgcgtgcgccctggcaggaagatggctgtgagggacagggagtggcgccctgcaatatttgcatgtcgctatgtgttctgggaaatcaccataaacgtgaaatgtctttggatttgggaatcttataagttctgtatgagaccacaccggtgtgctgggcggggggcggcgggccctcccgcagaacaccatgcgctcttcggaagcaattcagtctcgttgtgcctgtgacctggtacaacgagactgaattgcttctgaggagcgccttgacagcagccatgggagggccgccccctacctcagtgactcgagatagcggccgcccccgagatctttttatgtacgaaattcgaacgctgacgtcatcaacccgctccaaggaatcgcgggcccagtgtcactaggcgggaacacccagcgcgcgtgcgccctggcaggaagatggctgtgagggacagggagtggcgccctgcaatatttgcatgtcgctatgtgttctgggaaatcaccataaacgtgaaatgtctttggatttgggaatcttataagttctgtatgagaccacaccggtgtgctgggcggggggcggcgggccctcccgcagaacaccatgcgctcttcggaagcaattcagtctcgttgtgcctgtgacctggtacaacgagactgaattgcttctgaggagcgccttgacagcagccatgggagggccgccccctacctcagtgactcgagatagcggccgcccccgagatctttttatgtacatctagataagtagcatggcgggttaatcattaactacaaggaacccctagtgatggagttggccactccctctctgcgcgctcgctcgctcactgaggccgggcgaccaaaggtcgcccgacgcccgggctttgcccgggcggcctcagtgagcgagcgagcgcgcag

SEQ ID NO: 1840 - DNA, 1369 bp, Artificial Sequence
  Description of Artificial Sequence: Synthetic oligonucleotide
ctgcgcgctcgctcgctcactgaggccgcccgggcaaagcccgggcgtcgggcgacctttggtcgcccggcctcagtgagcgagcgagcgcgcagagagggagtgtagccatgctctaggaagatcaattcaattcacgcgttgacgtacgaaattcgaacgctgacgtcatcaacccgctccaaggaatcgcgggcccagtgtcactaggcgggaacacccagcgcgcgtgcgccctggcaggaagatggctgtgagggacagggagtggcgccctgcaatatttgcatgtcgctatgtgttctgggaaatcaccataaacgtgaaatgtctttggatttgggaatcttataagttctgtatgagaccacaccggtgaagcaaagaaggggcagagggagcccgtgagctgagtgggccagggactgggagaaggagtgaggaggcagggccggcatgcctctgctgctggccagacctgctagctccatgcttcccgtctgcacctgtcactagtaagcatggagctagcaggtttggccgtgtagtgctacccagcgctggctgcctcctcagcattgcaattcctctcccatctgggcaccagtcagctaccctggtgggaatctgggtagccctcgagatagcggccgcccccgagatctttttatgtacgaaattcgaacgctgacgtcatcaacccgctccaaggaatcgcgggcccagtgtcactaggcgggaacacccagcgcgcgtgcgccctggcaggaagatggctgtgagggacagggagtggcgccctgcaatatttgcatgtcgctatgtgttctgggaaatcaccataaacgtgaaatgtctttggatttgggaatcttataagttctgtatgagaccacaccggtgaagcaaagaaggggcagagggagcccgtgagctgagtgggccagggactgggagaaggagtgaggaggcagggccggcatgcctctgctgctggccagacctgctagctccatgcttcccgtctgcacctgtcactagtaagcatggagctagcaggtttggccgtgtagtgctacccagcgctggctgcctcctcagcattgcaattcctctcccatctgggcaccagtcagctaccctggtgggaatctgggtagccctcgagatagcggccgcccccgagatctttttatgtacatctagataagtagcatggcgggttaatcattaactacaaggaacccctagtgatggagttggccactccctctctgcgcgctcgctcgctcactgaggccgggcgaccaaaggtcgcccgacgcccgggctttgcccgggcggcctcagtgagcgagcgagcgcgcag

SEQ ID NO: 1841 - DNA, 1267 bp, Artificial Sequence
  Description of Artificial Sequence: Synthetic oligonucleotide
ctgcgcgctcgctcgctcactgaggccgcccgggcaaagcccgggcgtcgggcgacctttggtcgcccggcctcagtgagcgagcgagcgcgcagagagggagtgtagccatgctctaggaagatcaattcaattcacgcgttgacgtacgaaattcgaacgctgacgtcatcaacccgctccaaggaatcgcgggcccagtgtcactaggcgggaacacccagcgcgcgtgcgccctggcaggaagatggctgtgagggacagggagtggcgccctgcaatatttgcatgtcgctatgtgttctgggaaatcaccataaacgtgaaatgtctttggatttgggaatcttataagttctgtatgagaccacaccggtgaagcaaagaaggggcagagggagcccgtgagctgagtgggccagggactgggagaaggagtgaggaggcagggccggcatgcctctgctgctggccagacctgctagctccatgcttcccgtctgcacctgtcactagtaagcatggagctagcaggtttggccgtgtagtgctacccagcgctggctgcctcctcagcattgcaattcctctcccatctgggcaccagtcagctaccctggtgggaatctgggtagccctcgagatagcggccgcccccgagatctttttatgtacgaaattcgaacgctgacgtcatcaacccgctccaaggaatcgcgggcccagtgtcactaggcgggaacacccagcgcgcgtgcgccctggcaggaagatggctgtgagggacagggagtggcgccctgcaatatttgcatgtcgctatgtgttctgggaaatcaccataaacgtgaaatgtctttggatttgggaatcttataagttctgtatgagaccacaccggtgtgctgggcggggggcggcgggccctcccgcagaacaccatgcgctcttcggaagcaattcagtctcgttgtgcctgtgacctggtacaacgagactgaattgcttctgaggagcgccttgacagcagccatgggagggccgccccctacctcagtgactcgagatagcggccgcccccgagatctttttatgtacatctagataagtagcatggcgggttaatcattaactacaaggaacccctagtgatggagttggccactccctctctgcgcgctcgctcgctcactgaggccgggcgaccaaaggtcgcccgacgcccgggctttgcccgggcggcctcagtgagcgagcgagcgcgcag

SEQ ID NO: 1842 - DNA, 1267 bp, Artificial Sequence
  Description of Artificial Sequence: Synthetic oligonucleotide
ctgcgcgctcgctcgctcactgaggccgcccgggcaaagcccgggcgtcgggcgacctttggtcgcccggcctcagtgagcgagcgagcgcgcagagagggagtgtagccatgctctaggaagatcaattcaattcacgcgttgacgtacgaaattcgaacgctgacgtcatcaacccgctccaaggaatcgcgggcccagtgtcactaggcgggaacacccagcgcgcgtgcgccctggcaggaagatggctgtgagggacagggagtggcgccctgcaatatttgcatgtcgctatgtgttctgggaaatcaccataaacgtgaaatgtctttggatttgggaatcttataagttctgtatgagaccacaccggtgtgctgggcggggggcggcgggccctcccgcagaacaccatgcgctcttcggaagcaattcagtctcgttgtgcctgtgacctggtacaacgagactgaattgcttctgaggagcgccttgacagcagccatgggagggccgccccctacctcagtgactcgagatagcggccgcccccgagatctttttatgtacgaaattcgaacgctgacgtcatcaacccgctccaaggaatcgcgggcccagtgtcactaggcgggaacacccagcgcgcgtgcgccctggcaggaagatggctgtgagggacagggagtggcgccctgcaatatttgcatgtcgctatgtgttctgggaaatcaccataaacgtgaaatgtctttggatttgggaatcttataagttctgtatgagaccacaccggtgaagcaaagaaggggcagagggagcccgtgagctgagtgggccagggactgggagaaggagtgaggaggcagggccggcatgcctctgctgctggccagacctgctagctccatgcttcccgtctgcacctgtcactagtaagcatggagctagcaggtttggccgtgtagtgctacccagcgctggctgcctcctcagcattgcaattcctctcccatctgggcaccagtcagctaccctggtgggaatctgggtagccctcgagatagcggccgcccccgagatctttttatgtacatctagataagtagcatggcgggttaatcattaactacaaggaacccctagtgatggagttggccactccctctctgcgcgctcgctcgctcactgaggccgggcgaccaaaggtcgcccgacgcccgggctttgcccgggcggcctcagtgagcgagcgagcgcgcag

SEQ ID NO: 1843 - DNA, 1942 bp, Artificial Sequence
  Description of Artificial Sequence: Synthetic oligonucleotide
ctgcgcgctcgctcgctcactgaggccgcccgggcaaagcccgggcgtcgggcgacctttggtcgcccggcctcagtgagcgagcgagcgcgcagagagggagtgtagccatgctctaggaagatcaattcaattcacgcgtcgacattgattattgactagttattaatagtaatcaattacggggtcattagttcatagcccatatatggagttccgcgttacataacttacggtaaatggcccgcctggctgaccgcccaacgacccccgcccattgacgtcaataatgacgtatgttcccatagtaacgccaatagggactttccattgacgtcaatgggtggagtatttacggtaaactgcccacttggcagtacatcaagtgtatcatatgccaagtacgccccctattgacgtcaatgacggtaaatggcccgcctggcattatgcccagtacatgaccttatgggactttcctacttggcagtacatctacgtattagtcatcgctattaccatgtcgaggccacgttctgcttcactctccccatctcccccccctccccacccccaattttgtatttatttattttttaattattttgtgcagcgatgggggcggggggggggggcgcgcgccaggcggggcggggcggggcgaggggcggggcggggcgaggcggagaggtgcggcggcagccaatcagagcggcgcgctccgaaagtttccttttatggcgaggcggcggcggcggcggccctataaaaagcgaagcgcgcggcgggcgggagcaagcttgaactgaaaaaccagaaagttaactggtaagtttagtctttttgtcttttatttcaggtcccggatccggtggtggtgcaaatcaaagaactgctcctcagtggatgttgcctttacttctaggcctgtacggaagtgttacttctgctctaaaagctgcggaattgtacccgcggccgatccaccggtaaacttaagcttggtaccgagctcgtcgacgaagcaaagaaggggcagagggagcccgtgagctgagtgggccagggactgggagaaggagtgaggaggcagggccggcatgcctctgctgctggccagacctgctagctccatgcttcccgtctgcacctgtcactagtaagcatggagctagcaggtttggccgtgtagtgctacccagcgctggctgcctcctcagcattgcaattcctctcccatctgggcaccagtcagctaccctggtgggaatctgggtagccctcgacgtgctgggcggggggcggcgggccctcccgcagaacaccatgcgctcttcggaagcaattcagtctcgttgtgcctgtgacctggtacaacgagactgaattgcttctgaggagcgccttgacagcagccatgggagggccgccccctacctcagtgactcgacgtgctgggcggggggcggcgggccctcccgcagaacaccatgcgctcttcggaagcaattcagtctcgttgtgcctgtgacctggtacaacgagactgaattgcttctgaggagcgccttgacagcagccatgggagggccgccccctacctcagtgactcgaggacggggtgaactacgcctgaggatccgatctttttccctctgccaaaaattatggggacatcatgaagccccttgagcatctgacttctggctaataaaggaaatttattttcattgcaatagtgtgttggaattttttgtgtctctcactcggcctaggtagataagtagcatggcgggttaatcattaactacaaggaacccctagtgatggagttggccactccctctctgcgcgctcgctcgctcactgaggccgggcgaccaaaggtcgcccgacgcccgggctttgcccgggcggcctcagtgagcgagcgagcgcgcag

SEQ ID NO: 1844 - DNA, 2044 bp, Artificial Sequence
  Description of Artificial Sequence: Synthetic oligonucleotide
ctgcgcgctcgctcgctcactgaggccgcccgggcaaagcccgggcgtcgggcgacctttggtcgcccggcctcagtgagcgagcgagcgcgcagagagggagtgtagccatgctctaggaagatcaattcaattcacgcgtcgacattgattattgactagttattaatagtaatcaattacggggtcattagttcatagcccatatatggagttccgcgttacataacttacggtaaatggcccgcctggctgaccgcccaacgacccccgcccattgacgtcaataatgacgtatgttcccatagtaacgccaatagggactttccattgacgtcaatgggtggagtatttacggtaaactgcccacttggcagtacatcaagtgtatcatatgccaagtacgccccctattgacgtcaatgacggtaaatggcccgcctggcattatgcccagtacatgaccttatgggactttcctacttggcagtacatctacgtattagtcatcgctattaccatgtcgaggccacgttctgcttcactctccccatctcccccccctccccacccccaattttgtatttatttattttttaattattttgtgcagcgatgggggcggggggggggggcgcgcgccaggcggggcggggcggggcgaggggcggggcggggcgaggcggagaggtgcggcggcagccaatcagagcggcgcgctccgaaagtttccttttatggcgaggcggcggcggcggcggccctataaaaagcgaagcgcgcggcgggcgggagcaagcttgaactgaaaaaccagaaagttaactggtaagtttagtctttttgtcttttatttcaggtcccggatccggtggtggtgcaaatcaaagaactgctcctcagtggatgttgcctttacttctaggcctgtacggaagtgttacttctgctctaaaagctgcggaattgtacccgcggccgatccaccggtaaacttaagcttggtaccgagctcgtcgacgaagcaaagaaggggcagagggagcccgtgagctgagtgggccagggactgggagaaggagtgaggaggcagggccggcatgcctctgctgctggccagacctgctagctccatgcttcccgtctgcacctgtcactagtaagcatggagctagcaggtttggccgtgtagtgctacccagcgctggctgcctcctcagcattgcaattcctctcccatctgggcaccagtcagctaccctggtgggaatctgggtagccctcgacgtgctgggcggggggcggcgggccctcccgcagaacaccatgcgctcttcggaagcaattcagtctcgttgtgcctgtgacctggtacaacgagactgaattgcttctgaggagcgccttgacagcagccatgggagggccgccccctacctcagtgactcgacgaagcaaagaaggggcagagggagcccgtgagctgagtgggccagggactgggagaaggagtgaggaggcagggccggcatgcctctgctgctggccagacctgctagctccatgcttcccgtctgcacctgtcactagtaagcatggagctagcaggtttggccgtgtagtgctacccagcgctggctgcctcctcagcattgcaattcctctcccatctgggcaccagtcagctaccctggtgggaatctgggtagccctcgaggacggggtgaactacgcctgaggatccgatctttttccctctgccaaaaattatggggacatcatgaagccccttgagcatctgacttctggctaataaaggaaatttattttcattgcaatagtgtgttggaattttttgtgtctctcactcggcctaggtagataagtagcatggcgggttaatcattaactacaaggaacccctagtgatggagttggccactccctctctgcgcgctcgctcgctcactgaggccgggcgaccaaaggtcgcccgacgcccgggctttgcccgggcggcctcagtgagcgagcgagcgcgcag

SEQ ID NO: 1845 - DNA, 1792 bp, Artificial Sequence
  Description of Artificial Sequence: Synthetic oligonucleotide
ctgcgcgctcgctcgctcactgaggccgcccgggcaaagcccgggcgtcgggcgacctttggtcgcccggcctcagtgagcgagcgagcgcgcagagagggagtgtagccatgctctaggaagatcaattcaattcacgcgttgacgtacgaaattcgaacgctgacgtcatcaacccgctccaaggaatcgcgggcccagtgtcactaggcgggaacacccagcgcgcgtgcgccctggcaggaagatggctgtgagggacagggagtggcgccctgcaatatttgcatgtcgctatgtgttctgggaaatcaccataaacgtgaaatgtctttggatttgggaatcttataagttctgtatgagaccacaccggtgaagcaaagaaggggcagagggagcccgtgagctgagtgggccagggactgggagaaggagtgaggaggcagggccggcatgcctctgctgctggccagacctgctagctccatgcttcccgtctgcacctgtcactagtaagcatggagctagcaggtttggccgtgtagtgctacccagcgctggctgcctcctcagcattgcaattcctctcccatctgggcaccagtcagctaccctggtgggaatctgggtagccctcgagatagcggccgcccccgagatctttttatgtacgaaattcgaacgctgacgtcatcaacccgctccaaggaatcgcgggcccagtgtcactaggcgggaacacccagcgcgcgtgcgccctggcaggaagatggctgtgagggacagggagtggcgccctgcaatatttgcatgtcgctatgtgttctgggaaatcaccataaacgtgaaatgtctttggatttgggaatcttataagttctgtatgagaccacaccggtgtgctgggcggggggcggcgggccctcccgcagaacaccatgcgctcttcggaagcaattcagtctcgttgtgcctgtgacctggtacaacgagactgaattgcttctgaggagcgccttgacagcagccatgggagggccgccccctacctcagtgactcgagatagcggccgcccccgagatctttttatgtacgaaattcgaacgctgacgtcatcaacccgctccaaggaatcgcgggcccagtgtcactaggcgggaacacccagcgcgcgtgcgccctggcaggaagatggctgtgagggacagggagtggcgccctgcaatatttgcatgtcgctatgtgttctgggaaatcaccataaacgtgaaatgtctttggatttgggaatcttataagttctgtatgagaccacaccggtgaagcaaagaaggggcagagggagcccgtgagctgagtgggccagggactgggagaaggagtgaggaggcagggccggcatgcctctgctgctggccagacctgctagctccatgcttcccgtctgcacctgtcactagtaagcatggagctagcaggtttggccgtgtagtgctacccagcgctggctgcctcctcagcattgcaattcctctcccatctgggcaccagtcagctaccctggtgggaatctgggtagccctcgagatagcggccgcccccgagatctttttatgtacatctagataagtagcatggcgggttaatcattaactacaaggaacccctagtgatggagttggccactccctctctgcgcgctcgctcgctcactgaggccgggcgaccaaaggtcgcccgacgcccgggctttgcccgggcggcctcagtgagcgagcgagcgcgcag

SEQ ID NO: 1846 - DNA, 1690 bp, Artificial Sequence
  Description of Artificial Sequence: Synthetic oligonucleotide
ctgcgcgctcgctcgctcactgaggccgcccgggcaaagcccgggcgtcgggcgacctttggtcgcccggcctcagtgagcgagcgagcgcgcagagagggagtgtagccatgctctaggaagatcaattcaattcacgcgttgacgtacgaaattcgaacgctgacgtcatcaacccgctccaaggaatcgcgggcccagtgtcactaggcgggaacacccagcgcgcgtgcgccctggcaggaagatggctgtgagggacagggagtggcgccctgcaatatttgcatgtcgctatgtgttctgggaaatcaccataaacgtgaaatgtctttggatttgggaatcttataagttctgtatgagaccacaccggtgtgctgggcggggggcggcgggccctcccgcagaacaccatgcgctcttcggaagcaattcagtctcgttgtgcctgtgacctggtacaacgagactgaattgcttctgaggagcgccttgacagcagccatgggagggccgccccctacctcagtgactcgagatagcggccgcccccgagatctttttatgtacgaaattcgaacgctgacgtcatcaacccgctccaaggaatcgcgggcccagtgtcactaggcgggaacacccagcgcgcgtgcgccctggcaggaagatggctgtgagggacagggagtggcgccctgcaatatttgcatgtcgctatgtgttctgggaaatcaccataaacgtgaaatgtctttggatttgggaatcttataagttctgtatgagaccacaccggtgaagcaaagaaggggcagagggagcccgtgagctgagtgggccagggactgggagaaggagtgaggaggcagggccggcatgcctctgctgctggccagacctgctagctccatgcttcccgtctgcacctgtcactagtaagcatggagctagcaggtttggccgtgtagtgctacccagcgctggctgcctcctcagcattgcaattcctctcccatctgggcaccagtcagctaccctggtgggaatctgggtagccctcgagatagcggccgcccccgagatctttttatgtacgaaattcgaacgctgacgtcatcaacccgctccaaggaatcgcgggcccagtgtcactaggcgggaacacccagcgcgcgtgcgccctggcaggaagatggctgtgagggacagggagtggcgccctgcaatatttgcatgtcgctatgtgttctgggaaatcaccataaacgtgaaatgtctttggatttgggaatcttataagttctgtatgagaccacaccggtgtgctgggcggggggcggcgggccctcccgcagaacaccatgcgctcttcggaagcaattcagtctcgttgtgcctgtgacctggtacaacgagactgaattgcttctgaggagcgccttgacagcagccatgggagggccgccccctacctcagtgactcgagatagcggccgcccccgagatctttttatgtacatctagataagtagcatggcgggttaatcattaactacaaggaacccctagtgatggagttggccactccctctctgcgcgctcgctcgctcactgaggccgggcgaccaaaggtcgcccgacgcccgggctttgcccgggcggcctcagtgagcgagcgagcgcgcag

SEQ ID NO: 1847 - DNA, 1894 bp, Artificial Sequence
  Description of Artificial Sequence: Synthetic oligonucleotide
ctgcgcgctcgctcgctcactgaggccgcccgggcaaagcccgggcgtcgggcgacctttggtcgcccggcctcagtgagcgagcgagcgcgcagagagggagtgtagccatgctctaggaagatcaattcaattcacgcgttgacgtacgaaattcgaacgctgacgtcatcaacccgctccaaggaatcgcgggcccagtgtcactaggcgggaacacccagcgcgcgtgcgccctggcaggaagatggctgtgagggacagggagtggcgccctgcaatatttgcatgtcgctatgtgttctgggaaatcaccataaacgtgaaatgtctttggatttgggaatcttataagttctgtatgagaccacaccggtgaagcaaagaaggggcagagggagcccgtgagctgagtgggccagggactgggagaaggagtgaggaggcagggccggcatgcctctgctgctggccagacctgctagctccatgcttcccgtctgcacctgtcactagtaagcatggagctagcaggtttggccgtgtagtgctacccagcgctggctgcctcctcagcattgcaattcctctcccatctgggcaccagtcagctaccctggtgggaatctgggtagccctcgagatagcggccgcccccgagatctttttatgtacgaaattcgaacgctgacgtcatcaacccgctccaaggaatcgcgggcccagtgtcactaggcgggaacacccagcgcgcgtgcgccctggcaggaagatggctgtgagggacagggagtggcgccctgcaatatttgcatgtcgctatgtgttctgggaaatcaccataaacgtgaaatgtctttggatttgggaatcttataagttctgtatgagaccacaccggtgaagcaaagaaggggcagagggagcccgtgagctgagtgggccagggactgggagaaggagtgaggaggcagggccggcatgcctctgctgctggccagacctgctagctccatgcttcccgtctgcacctgtcactagtaagcatggagctagcaggtttggccgtgtagtgctacccagcgctggctgcctcctcagcattgcaattcctctcccatctgggcaccagtcagctaccctggtgggaatctgggtagccctcgagatagcggccgcccccgagatctttttatgtacgaaattcgaacgctgacgtcatcaacccgctccaaggaatcgcgggcccagtgtcactaggcgggaacacccagcgcgcgtgcgccctggcaggaagatggctgtgagggacagggagtggcgccctgcaatatttgcatgtcgctatgtgttctgggaaatcaccataaacgtgaaatgtctttggatttgggaatcttataagttctgtatgagaccacaccggtgaagcaaagaaggggcagagggagcccgtgagctgagtgggccagggactgggagaaggagtgaggaggcagggccggcatgcctctgctgctggccagacctgctagctccatgcttcccgtctgcacctgtcactagtaagcatggagctagcaggtttggccgtgtagtgctacccagcgctggctgcctcctcagcattgcaattcctctcccatctgggcaccagtcagctaccctggtgggaatctgggtagccctcgagatagcggccgcccccgagatctttttatgtacatctagataagtagcatggcgggttaatcattaactacaaggaacccctagtgatggagttggccactccctctctgcgcgctcgctcgctcactgaggccgggcgaccaaaggtcgcccgacgcccgggctttgcccgggcggcctcagtgagcgagcgagcgcgcag

SEQ ID NO: 1848 - DNA, 1792 bp, Artificial Sequence
  Description of Artificial Sequence: Synthetic oligonucleotide
ctgcgcgctcgctcgctcactgaggccgcccgggcaaagcccgggcgtcgggcgacctttggtcgcccggcctcagtgagcgagcgagcgcgcagagagggagtgtagccatgctctaggaagatcaattcaattcacgcgttgacgtacgaaattcgaacgctgacgtcatcaacccgctccaaggaatcgcgggcccagtgtcactaggcgggaacacccagcgcgcgtgcgccctggcaggaagatggctgtgagggacagggagtggcgccctgcaatatttgcatgtcgctatgtgttctgggaaatcaccataaacgtgaaatgtctttggatttgggaatcttataagttctgtatgagaccacaccggtgaagcaaagaaggggcagagggagcccgtgagctgagtgggccagggactgggagaaggagtgaggaggcagggccggcatgcctctgctgctggccagacctgctagctccatgcttcccgtctgcacctgtcactagtaagcatggagctagcaggtttggccgtgtagtgctacccagcgctggctgcctcctcagcattgcaattcctctcccatctgggcaccagtcagctaccctggtgggaatctgggtagccctcgagatagcggccgcccccgagatctttttatgtacgaaattcgaacgctgacgtcatcaacccgctccaaggaatcgcgggcccagtgtcactaggcgggaacacccagcgcgcgtgcgccctggcaggaagatggctgtgagggacagggagtggcgccctgcaatatttgcatgtcgctatgtgttctgggaaatcaccataaacgtgaaatgtctttggatttgggaatcttataagttctgtatgagaccacaccggtgaagcaaagaaggggcagagggagcccgtgagctgagtgggccagggactgggagaaggagtgaggaggcagggccggcatgcctctgctgctggccagacctgctagctccatgcttcccgtctgcacctgtcactagtaagcatggagctagcaggtttggccgtgtagtgctacccagcgctggctgcctcctcagcattgcaattcctctcccatctgggcaccagtcagctaccctggtgggaatctgggtagccctcgagatagcggccgcccccgagatctttttatgtacgaaattcgaacgctgacgtcatcaacccgctccaaggaatcgcgggcccagtgtcactaggcgggaacacccagcgcgcgtgcgccctggcaggaagatggctgtgagggacagggagtggcgccctgcaatatttgcatgtcgctatgtgttctgggaaatcaccataaacgtgaaatgtctttggatttgggaatcttataagttctgtatgagaccacaccggtgtgctgggcggggggcggcgggccctcccgcagaacaccatgcgctcttcggaagcaattcagtctcgttgtgcctgtgacctggtacaacgagactgaattgcttctgaggagcgccttgacagcagccatgggagggccgccccctacctcagtgactcgagatagcggccgcccccgagatctttttatgtacatctagataagtagcatggcgggttaatcattaactacaaggaacccctagtgatggagttggccactccctctctgcgcgctcgctcgctcactgaggccgggcgaccaaaggtcgcccgacgcccgggctttgcccgggcggcctcagtgagcgagcgagcgcgcag

SEQ ID NO: 1849 - DNA, 1588 bp, Artificial Sequence
  Description of Artificial Sequence: Synthetic oligonucleotide
ctgcgcgctcgctcgctcactgaggccgcccgggcaaagcccgggcgtcgggcgacctttggtcgcccggcctcagtgagcgagcgagcgcgcagagagggagtgtagccatgctctaggaagatcaattcaattcacgcgttgacgtacgaaattcgaacgctgacgtcatcaacccgctccaaggaatcgcgggcccagtgtcactaggcgggaacacccagcgcgcgtgcgccctggcaggaagatggctgtgagggacagggagtggcgccctgcaatatttgcatgtcgctatgtgttctgggaaatcaccataaacgtgaaatgtctttggatttgggaatcttataagttctgtatgagaccacaccggtgtgctgggcggggggcggcgggccctcccgcagaacaccatgcgctcttcggaagcaattcagtctcgttgtgcctgtgacctggtacaacgagactgaattgcttctgaggagcgccttgacagcagccatgggagggccgccccctacctcagtgactcgagatagcggccgcccccgagatctttttatgtacgaaattcgaacgctgacgtcatcaacccgctccaaggaatcgcgggcccagtgtcactaggcgggaacacccagcgcgcgtgcgccctggcaggaagatggctgtgagggacagggagtggcgccctgcaatatttgcatgtcgctatgtgttctgggaaatcaccataaacgtgaaatgtctttggatttgggaatcttataagttctgtatgagaccacaccggtgtgctgggcggggggcggcgggccctcccgcagaacaccatgcgctcttcggaagcaattcagtctcgttgtgcctgtgacctggtacaacgagactgaattgcttctgaggagcgccttgacagcagccatgggagggccgccccctacctcagtgactcgagatagcggccgcccccgagatctttttatgtacgaaattcgaacgctgacgtcatcaacccgctccaaggaatcgcgggcccagtgtcactaggcgggaacacccagcgcgcgtgcgccctggcaggaagatggctgtgagggacagggagtggcgccctgcaatatttgcatgtcgctatgtgttctgggaaatcaccataaacgtgaaatgtctttggatttgggaatcttataagttctgtatgagaccacaccggtgtgctgggcggggggcggcgggccctcccgcagaacaccatgcgctcttcggaagcaattcagtctcgttgtgcctgtgacctggtacaacgagactgaattgcttctgaggagcgccttgacagcagccatgggagggccgccccctacctcagtgactcgagatagcggccgcccccgagatctttttatgtacatctagataagtagcatggcgggttaatcattaactacaaggaacccctagtgatggagttggccactccctctctgcgcgctcgctcgctcactgaggccgggcgaccaaaggtcgcccgacgcccgggctttgcccgggcggcctcagtgagcgagcgagcgcgcag

SEQ ID NO: 1850 - DNA, 1690 bp, Artificial Sequence
  Description of Artificial Sequence: Synthetic oligonucleotide
ctgcgcgctcgctcgctcactgaggccgcccgggcaaagcccgggcgtcgggcgacctttggtcgcccggcctcagtgagcgagcgagcgcgcagagagggagtgtagccatgctctaggaagatcaattcaattcacgcgttgacgtacgaaattcgaacgctgacgtcatcaacccgctccaaggaatcgcgggcccagtgtcactaggcgggaacacccagcgcgcgtgcgccctggcaggaagatggctgtgagggacagggagtggcgccctgcaatatttgcatgtcgctatgtgttctgggaaatcaccataaacgtgaaatgtctttggatttgggaatcttataagttctgtatgagaccacaccggtgtgctgggcggggggcggcgggccctcccgcagaacaccatgcgctcttcggaagcaattcagtctcgttgtgcctgtgacctggtacaacgagactgaattgcttctgaggagcgccttgacagcagccatgggagggccgccccctacctcagtgactcgagatagcggccgcccccgagatctttttatgtacgaaattcgaacgctgacgtcatcaacccgctccaaggaatcgcgggcccagtgtcactaggcgggaacacccagcgcgcgtgcgccctggcaggaagatggctgtgagggacagggagtggcgccctgcaatatttgcatgtcgctatgtgttctgggaaatcaccataaacgtgaaatgtctttggatttgggaatcttataagttctgtatgagaccacaccggtgtgctgggcggggggcggcgggccctcccgcagaacaccatgcgctcttcggaagcaattcagtctcgttgtgcctgtgacctggtacaacgagactgaattgcttctgaggagcgccttgacagcagccatgggagggccgccccctacctcagtgactcgagatagcggccgcccccgagatctttttatgtacgaaattcgaacgctgacgtcatcaacccgctccaaggaatcgcgggcccagtgtcactaggcgggaacacccagcgcgcgtgcgccctggcaggaagatggctgtgagggacagggagtggcgccctgcaatatttgcatgtcgctatgtgttctgggaaatcaccataaacgtgaaatgtctttggatttgggaatcttataagttctgtatgagaccacaccggtgaagcaaagaaggggcagagggagcccgtgagctgagtgggccagggactgggagaaggagtgaggaggcagggccggcatgcctctgctgctggccagacctgctagctccatgcttcccgtctgcacctgtcactagtaagcatggagctagcaggtttggccgtgtagtgctacccagcgctggctgcctcctcagcattgcaattcctctcccatctgggcaccagtcagctaccctggtgggaatctgggtagccctcgagatagcggccgcccccgagatctttttatgtacatctagataagtagcatggcgggttaatcattaactacaaggaacccctagtgatggagttggccactccctctctgcgcgctcgctcgctcactgaggccgggcgaccaaaggtcgcccgacgcccgggctttgcccgggcggcctcagtgagcgagcgagcgcgcag

SEQ ID NO: 1851 - DNA, 2418 bp, Artificial Sequence
  Description of Artificial Sequence: Synthetic oligonucleotide
ctgcgcgctcgctcgctcactgaggccgcccgggcaaagcccgggcgtcgggcgacctttggtcgcccggcctcagtgagcgagcgagcgcgcagagagggagtgtagccatgctctaggaagatcaattcaattcacgcgttgacgtacgaaattcgaacgctgacgtcatcaacccgctccaaggaatcgcgggcccagtgtcactaggcgggaacacccagcgcgcgtgcgccctggcaggaagatggctgtgagggacagggagtggcgccctgcaatatttgcatgtcgctatgtgttctgggaaatcaccataaacgtgaaatgtctttggatttgggaatcttataagttctgtatgagaccacaccggtgaagcaaagaaggggcagagggagcccgtgagctgagtgggccagggactgggagaaggagtgaggaggcagggccggcatgcctctgctgctggccagacctgctagctccatgcttcccgtctgcacctgtcactagtaagcatggagctagcaggtttggccgtgtagtgctacccagcgctggctgcctcctcagcattgcaattcctctcccatctgggcaccagtcagctaccctggtgggaatctgggtagccctcgagatagcggccgcccccgagatctttttatgtacgaaattcgaacgctgacgtcatcaacccgctccaaggaatcgcgggcccagtgtcactaggcgggaacacccagcgcgcgtgcgccctggcaggaagatggctgtgagggacagggagtggcgccctgcaatatttgcatgtcgctatgtgttctgggaaatcaccataaacgtgaaatgtctttggatttgggaatcttataagttctgtatgagaccacaccggtgaagcaaagaaggggcagagggagcccgtgagctgagtgggccagggactgggagaaggagtgaggaggcagggccggcatgcctctgctgctggccagacctgctagctccatgcttcccgtctgcacctgtcactagtaagcatggagctagcaggtttggccgtgtagtgctacccagcgctggctgcctcctcagcattgcaattcctctcccatctgggcaccagtcagctaccctggtgggaatctgggtagccctcgagatagcggccgcccccgagatctttttatgtacaaattcgaacgctgacgtcatcaacccgctccaaggaatcgcgggcccagtgtcactaggcgggaacacccagcgcgcgtgcgccctggcaggaagatggctgtgagggacagggagtggcgccctgcaatatttgcatgtcgctatgtgttctgggaaatcaccataaacgtgaaatgtctttggatttgggaatcttataagttctgtatgagaccacaccggtgaagcaaagaaggggcagagggagcccgtgagctgagtgggccagggactgggagaaggagtgaggaggcagggccggcatgcctctgctgctggccagacctgctagctccatgcttcccgtctgcacctgtcactagtaagcatggagctagcaggtttggccgtgtagtgctacccagcgctggctgcctcctcagcattgcaattcctctcccatctgggcaccagtcagctaccctggtgggaatctgggtagccctcgagatagcggccgcccccgagatctttttatgtacgaaattcgaacgctgacgtcatcaacccgctccaaggaatcgcgggcccagtgtcactaggcgggaacacccagcgcgcgtgcgccctggcaggaagatggctgtgagggacagggagtggcgccctgcaatatttgcatgtcgctatgtgttctgggaaatcaccataaacgtgaaatgtctttggatttgggaatcttataagttctgtatgagaccacaccggtgaagcaaagaaggggcagagggagcccgtgagctgagtgggccagggactgggagaaggagtgaggaggcagggccggcatgcctctgctgctggccagacctgctagctccatgcttcccgtctgcacctgtcactagtaagcatggagctagcaggtttggccgtgtagtgctacccagcgctggctgcctcctcagcattgcaattcctctcccatctgggcaccagtcagctaccctggtgggaatctgggtagccctcgagatagcggccgcccccgagatctttttgtgtacatctagataagtagcatggcgggttaatcattaactacaaggaacccctagtgatggagttggccactccctctctgcgcgctcgctcgctcactgaggccgggcgaccaaaggtcgcccgacgcccgggctttgcccgggcggcctcagtgagcgagcgagcgcgcag

SEQ ID NO: 1852 - DNA, 2215 bp, Artificial Sequence
  Description of Artificial Sequence: Synthetic oligonucleotide
ctgcgcgctcgctcgctcactgaggccgcccgggcaaagcccgggcgtcgggcgacctttggtcgcccggcctcagtgagcgagcgagcgcgcagagagggagtgtagccatgctctaggaagatcaattcaattcacgcgttgacgtacgaaattcgaacgctgacgtcatcaacccgctccaaggaatcgcgggcccagtgtcactaggcgggaacacccagcgcgcgtgcgccctggcaggaagatggctgtgagggacagggagtggcgccctgcaatatttgcatgtcgctatgtgttctgggaaatcaccataaacgtgaaatgtctttggatttgggaatcttataagttctgtatgagaccacaccggtgaagcaaagaaggggcagagggagcccgtgagctgagtgggccagggactgggagaaggagtgaggaggcagggccggcatgcctctgctgctggccagacctgctagctccatgcttcccgtctgcacctgtcactagtaagcatggagctagcaggtttggccgtgtagtgctacccagcgctggctgcctcctcagcattgcaattcctctcccatctgggcaccagtcagctaccctggtgggaatctgggtagccctcgagatagcggccgcccccgagatctttttatgtacgaaattcgaacgctgacgtcatcaacccgctccaaggaatcgcgggcccagtgtcactaggcgggaacacccagcgcgcgtgcgccctggcaggaagatggctgtgagggacagggagtggcgccctgcaatatttgcatgtcgctatgtgttctgggaaatcaccataaacgtgaaatgtctttggatttgggaatcttataagttctgtatgagaccacaccggtgtgctgggcggggggcggcgggccctcccgcagaacaccatgcgctcttcggaagcaattcagtctcgttgtgcctgtgacctggtacaacgagactgaattgcttctgaggagcgccttgacagcagccatgggagggccgccccctacctcagtgactcgagatagcggccgcccccgagatctttttatgtacgaaattcgaacgctgacgtcatcaacccgctccaaggaatcgcgggcccagtgtcactaggcgggaacacccagcgcgcgtgcgccctggcaggaagatggctgtgagggacagggagtggcgccctgcaatatttgcatgtcgctatgtgttctgggaaatcaccataaacgtgaaatgtctttggatttgggaatcttataagttctgtatgagaccacaccggtgaagcaaagaaggggcagagggagcccgtgagctgagtgggccagggactgggagaaggagtgaggaggcagggccggcatgcctctgctgctggccagacctgctagctccatgcttcccgtctgcacctgtcactagtaagcatggagctagcaggtttggccgtgtagtgctacccagcgctggctgcctcctcagcattgcaattcctctcccatctgggcaccagtcagctaccctggtgggaatctgggtagccctcgagatagcggccgcccccgagatctttttatgtacgaaattcgaacgctgacgtcatcaacccgctccaaggaatcgcgggcccagtgtcactaggcgggaacacccagcgcgcgtgcgccctggcaggaagatggctgtgagggacagggagtggcgccctgcaatatttgcatgtcgctatgtgttctgggaaatcaccataaacgtgaaatgtctttggatttgggaatcttataagttctgtatgagaccacaccggtgtgctgggcggggggcggcgggccctcccgcagaacaccatgcgctcttcggaagcaattcagtctcgttgtgcctgtgacctggtacaacgagactgaattgcttctgaggagcgccttgacagcagccatgggagggccgccccctacctcagtgactcgagatagcggccgcccccgagatctttttatgtacatctagataagtagcatggcgggttaatcattaactacaaggaacccctagtgatggagttggccactccctctctgcgcgctcgctcgctcactgaggccgggcgaccaaaggtcgcccgacgcccgggctttgcccgggcggcctcagtgagcgagcgagcgcgcag

SEQ ID NO: 1853 - DNA, 2215 bp, Artificial Sequence
  Description of Artificial Sequence: Synthetic oligonucleotide
ctgcgcgctcgctcgctcactgaggccgcccgggcaaagcccgggcgtcgggcgacctttggtcgcccggcctcagtgagcgagcgagcgcgcagagagggagtgtagccatgctctaggaagatcaattcaattcacgcgttgacgtacgaaattcgaacgctgacgtcatcaacccgctccaaggaatcgcgggcccagtgtcactaggcgggaacacccagcgcgcgtgcgccctggcaggaagatggctgtgagggacagggagtggcgccctgcaatatttgcatgtcgctatgtgttctgggaaatcaccataaacgtgaaatgtctttggatttgggaatcttataagttctgtatgagaccacaccggtgaagcaaagaaggggcagagggagcccgtgagctgagtgggccagggactgggagaaggagtgaggaggcagggccggcatgcctctgctgctggccagacctgctagctccatgcttcccgtctgcacctgtcactagtaagcatggagctagcaggtttggccgtgtagtgctacccagcgctggctgcctcctcagcattgcaattcctctcccatctgggcaccagtcagctaccctggtgggaatctgggtagccctcgagatagcggccgcccccgagatctttttatgtacgaaattcgaacgctgacgtcatcaacccgctccaaggaatcgcgggcccagtgtcactaggcgggaacacccagcgcgcgtgcgccctggcaggaagatggctgtgagggacagggagtggcgccctgcaatatttgcatgtcgctatgtgttctgggaaatcaccataaacgtgaaatgtctttggatttgggaatcttataagttctgtatgagaccacaccggtgtgctgggcggggggcggcgggccctcccgcagaacaccatgcgctcttcggaagcaattcagtctcgttgtgcctgtgacctggtacaacgagactgaattgcttctgaggagcgccttgacagcagccatgggagggccgccccctacctcagtgactcgagatagcggccgcccccgagatctttttatgtacgaaattcgaacgctgacgtcatcaacccgctccaaggaatcgcgggcccagtgtcactaggcgggaacacccagcgcgcgtgcgccctggcaggaagatggctgtgagggacagggagtggcgccctgcaatatttgcatgtcgctatgtgttctgggaaatcaccataaacgtgaaatgtctttggatttgggaatcttataagttctgtatgagaccacaccggtgtgctgggcggggggcggcgggccctcccgcagaacaccatgcgctcttcggaagcaattcagtctcgttgtgcctgtgacctggtacaacgagactgaattgcttctgaggagcgccttgacagcagccatgggagggccgccccctacctcagtgactcgagatagcggccgcccccgagatctttttatgtacgaaattcgaacgctgacgtcatcaacccgctccaaggaatcgcgggcccagtgtcactaggcgggaacacccagcgcgcgtgcgccctggcaggaagatggctgtgagggacagggagtggcgccctgcaatatttgcatgtcgctatgtgttctgggaaatcaccataaacgtgaaatgtctttggatttgggaatcttataagttctgtatgagaccacaccggtgaagcaaagaaggggcagagggagcccgtgagctgagtgggccagggactgggagaaggagtgaggaggcagggccggcatgcctctgctgctggccagacctgctagctccatgcttcccgtctgcacctgtcactagtaagcatggagctagcaggtttggccgtgtagtgctacccagcgctggctgcctcctcagcattgcaattcctctcccatctgggcaccagtcagctaccctggtgggaatctgggtagccctcgagatagcggccgcccccgagatctttttatgtacatctagataagtagcatggcgggttaatcattaactacaaggaacccctagtgatggagttggccactccctctctgcgcgctcgctcgctcactgaggccgggcgaccaaaggtcgcccgacgcccgggctttgcccgggcggcctcagtgagcgagcgagcgcgcag

SEQ ID NO: 1854 - DNA, 2215 bp, Artificial Sequence
  Description of Artificial Sequence: Synthetic oligonucleotide
ctgcgcgctcgctcgctcactgaggccgcccgggcaaagcccgggcgtcgggcgacctttggtcgcccggcctcagtgagcgagcgagcgcgcagagagggagtgtagccatgctctaggaagatcaattcaattcacgcgttgacgtacgaaattcgaacgctgacgtcatcaacccgctccaaggaatcgcgggcccagtgtcactaggcgggaacacccagcgcgcgtgcgccctggcaggaagatggctgtgagggacagggagtggcgccctgcaatatttgcatgtcgctatgtgttctgggaaatcaccataaacgtgaaatgtctttggatttgggaatcttataagttctgtatgagaccacaccggtgtgctgggcggggggcggcgggccctcccgcagaacaccatgcgctcttcggaagcaattcagtctcgttgtgcctgtgacctggtacaacgagactgaattgcttctgaggagcgccttgacagcagccatgggagggccgccccctacctcagtgactcgagatagcggccgcccccgagatctttttatgtacgaaattcgaacgctgacgtcatcaacccgctccaaggaatcgcgggcccagtgtcactaggcgggaacacccagcgcgcgtgcgccctggcaggaagatggctgtgagggacagggagtggcgccctgcaatatttgcatgtcgctatgtgttctgggaaatcaccataaacgtgaaatgtctttggatttgggaatcttataagttctgtatgagaccacaccggtgaagcaaagaaggggcagagggagcccgtgagctgagtgggccagggactgggagaaggagtgaggaggcagggccggcatgcctctgctgctggccagacctgctagctccatgcttcccgtctgcacctgtcactagtaagcatggagctagcaggtttggccgtgtagtgctacccagcgctggctgcctcctcagcattgcaattcctctcccatctgggcaccagtcagctaccctggtgggaatctgggtagccctcgagatagcggccgcccccgagatctttttatgtacgaaattcgaacgctgacgtcatcaacccgctccaaggaatcgcgggcccagtgtcactaggcgggaacacccagcgcgcgtgcgccctggcaggaagatggctgtgagggacagggagtggcgccctgcaatatttgcatgtcgctatgtgttctgggaaatcaccataaacgtgaaatgtctttggatttgggaatcttataagttctgtatgagaccacaccggtgaagcaaagaaggggcagagggagcccgtgagctgagtgggccagggactgggagaaggagtgaggaggcagggccggcatgcctctgctgctggccagacctgctagctccatgcttcccgtctgcacctgtcactagtaagcatggagctagcaggtttggccgtgtagtgctacccagcgctggctgcctcctcagcattgcaattcctctcccatctgggcaccagtcagctaccctggtgggaatctgggtagccctcgagatagcggccgcccccgagatctttttatgtacgaaattcgaacgctgacgtcatcaacccgctccaaggaatcgcgggcccagtgtcactaggcgggaacacccagcgcgcgtgcgccctggcaggaagatggctgtgagggacagggagtggcgccctgcaatatttgcatgtcgctatgtgttctgggaaatcaccataaacgtgaaatgtctttggatttgggaatcttataagttctgtatgagaccacaccggtgtgctgggcggggggcggcgggccctcccgcagaacaccatgcgctcttcggaagcaattcagtctcgttgtgcctgtgacctggtacaacgagactgaattgcttctgaggagcgccttgacagcagccatgggagggccgccccctacctcagtgactcgagatagcggccgcccccgagatctttttatgtacatctagataagtagcatggcgggttaatcattaactacaaggaacccctagtgatggagttggccactccctctctgcgcgctcgctcgctcactgaggccgggcgaccaaaggtcgcccgacgcccgggctttgcccgggcggcctcagtgagcgagcgagcgcgcag

SEQ ID NO: 1855 - DNA, 2011 bp, Artificial Sequence
  Description of Artificial Sequence: Synthetic oligonucleotide
ctgcgcgctcgctcgctcactgaggccgcccgggcaaagcccgggcgtcgggcgacctttggtcgcccggcctcagtgagcgagcgagcgcgcagagagggagtgtagccatgctctaggaagatcaattcaattcacgcgttgacgtacgaaattcgaacgctgacgtcatcaacccgctccaaggaatcgcgggcccagtgtcactaggcgggaacacccagcgcgcgtgcgccctggcaggaagatggctgtgagggacagggagtggcgccctgcaatatttgcatgtcgctatgtgttctgggaaatcaccataaacgtgaaatgtctttggatttgggaatcttataagttctgtatgagaccacaccggtgtgctgggcggggggcggcgggccctcccgcagaacaccatgcgctcttcggaagcaattcagtctcgttgtgcctgtgacctggtacaacgagactgaattgcttctgaggagcgccttgacagcagccatgggagggccgccccctacctcagtgactcgagatagcggccgcccccgagatctttttatgtacgaaattcgaacgctgacgtcatcaacccgctccaaggaatcgcgggcccagtgtcactaggcgggaacacccagcgcgcgtgcgccctggcaggaagatggctgtgagggacagggagtggcgccctgcaatatttgcatgtcgctatgtgttctgggaaatcaccataaacgtgaaatgtctttggatttgggaatcttataagttctgtatgagaccacaccggtgtgctgggcggggggcggcgggccctcccgcagaacaccatgcgctcttcggaagcaattcagtctcgttgtgcctgtgacctggtacaacgagactgaattgcttctgaggagcgccttgacagcagccatgggagggccgccccctacctcagtgactcgagatagcggccgcccccgagatctttttatgtacgaaattcgaacgctgacgtcatcaacccgctccaaggaatcgcgggcccagtgtcactaggcgggaacacccagcgcgcgtgcgccctggcaggaagatggctgtgagggacagggagtggcgccctgcaatatttgcatgtcgctatgtgttctgggaaatcaccataaacgtgaaatgtctttggatttgggaatcttataagttctgtatgagaccacaccggtgtgctgggcggggggcggcgggccctcccgcagaacaccatgcgctcttcggaagcaattcagtctcgttgtgcctgtgacctggtacaacgagactgaattgcttctgaggagcgccttgacagcagccatgggagggccgccccctacctcagtgactcgagatagcggccgcccccgagatctttttatgtacgaaattcgaacgctgacgtcatcaacccgctccaaggaatcgcgggcccagtgtcactaggcgggaacacccagcgcgcgtgcgccctggcaggaagatggctgtgagggacagggagtggcgccctgcaatatttgcatgtcgctatgtgttctgggaaatcaccataaacgtgaaatgtctttggatttgggaatcttataagttctgtatgagaccacaccggtgtgctgggcggggggcggcgggccctcccgcagaacaccatgcgctcttcggaagcaattcagtctcgttgtgcctgtgacctggtacaacgagactgaattgcttctgaggagcgccttgacagcagccatgggagggccgccccctacctcagtgactcgagatagcggccgcccccgagatctttttatgtacatctagataagtagcatggcgggttaatcattaactacaaggaacccctagtgatggagttggccactccctctctgcgcgctcgctcgctcactgaggccgggcgaccaaaggtcgcccgacgcccgggctttgcccgggcggcctcagtgagcgagcgagcgcgcag

SEQ ID NO: 1856 - DNA, 2215 bp, Artificial Sequence
  Description of Artificial Sequence: Synthetic oligonucleotide
ctgcgcgctcgctcgctcactgaggccgcccgggcaaagcccgggcgtcgggcgacctttggtcgcccggcctcagtgagcgagcgagcgcgcagagagggagtgtagccatgctctaggaagatcaattcaattcacgcgttgacgtacgaaattcgaacgctgacgtcatcaacccgctccaaggaatcgcgggcccagtgtcactaggcgggaacacccagcgcgcgtgcgccctggcaggaagatggctgtgagggacagggagtggcgccctgcaatatttgcatgtcgctatgtgttctgggaaatcaccataaacgtgaaatgtctttggatttgggaatcttataagttctgtatgagaccacaccggtgtgctgggcggggggcggcgggccctcccgcagaacaccatgcgctcttcggaagcaattcagtctcgttgtgcctgtgacctggtacaacgagactgaattgcttctgaggagcgccttgacagcagccatgggagggccgccccctacctcagtgactcgagatagcggccgcccccgagatctttttatgtacgaaattcgaacgctgacgtcatcaacccgctccaaggaatcgcgggcccagtgtcactaggcgggaacacccagcgcgcgtgcgccctggcaggaagatggctgtgagggacagggagtggcgccctgcaatatttgcatgtcgctatgtgttctgggaaatcaccataaacgtgaaatgtctttggatttgggaatcttataagttctgtatgagaccacaccggtgaagcaaagaaggggcagagggagcccgtgagctgagtgggccagggactgggagaaggagtgaggaggcagggccggcatgcctctgctgctggccagacctgctagctccatgcttcccgtctgcacctgtcactagtaagcatggagctagcaggtttggccgtgtagtgctacccagcgctggctgcctcctcagcattgcaattcctctcccatctgggcaccagtcagctaccctggtgggaatctgggtagccctcgagatagcggccgcccccgagatctttttatgtacgaaattcgaacgctgacgtcatcaacccgctccaaggaatcgcgggcccagtgtcactaggcgggaacacccagcgcgcgtgcgccctggcaggaagatggctgtgagggacagggagtggcgccctgcaatatttgcatgtcgctatgtgttctgggaaatcaccataaacgtgaaatgtctttggatttgggaatcttataagttctgtatgagaccacaccggtgtgctgggcggggggcggcgggccctcccgcagaacaccatgcgctcttcggaagcaattcagtctcgttgtgcctgtgacctggtacaacgagactgaattgcttctgaggagcgccttgacagcagccatgggagggccgccccctacctcagtgactcgagatagcggccgcccccgagatctttttatgtacgaaattcgaacgctgacgtcatcaacccgctccaaggaatcgcgggcccagtgtcactaggcgggaacacccagcgcgcgtgcgccctggcaggaagatggctgtgagggacagggagtggcgccctgcaatatttgcatgtcgctatgtgttctgggaaatcaccataaacgtgaaatgtctttggatttgggaatcttataagttctgtatgagaccacaccggtgaagcaaagaaggggcagagggagcccgtgagctgagtgggccagggactgggagaaggagtgaggaggcagggccggcatgcctctgctgctggccagacctgctagctccatgcttcccgtctgcacctgtcactagtaagcatggagctagcaggtttggccgtgtagtgctacccagcgctggctgcctcctcagcattgcaattcctctcccatctgggcaccagtcagctaccctggtgggaatctgggtagccctcgagatagcggccgcccccgagatctttttatgtacatctagataagtagcatggcgggttaatcattaactacaaggaacccctagtgatggagttggccactccctctctgcgcgctcgctcgctcactgaggccgggcgaccaaaggtcgcccgacgcccgggctttgcccgggcggcctcagtgagcgagcgagcgcgcag

SEQ ID NO: 1857 - DNA, 2208 bp, Artificial Sequence
  Description of Artificial Sequence: Synthetic oligonucleotide
ctgcgcgctcgctcgctcactgaggccgcccgggcaaagcccgggcgtcgggcgacctttggtcgcccggcctcagtgagcgagcgagcgcgcagagagggagtgtagccatgctctaggaagatcaattcaattcacgcgtcgacattgattattgactagttattaatagtaatcaattacggggtcattagttcatagcccatatatggagttccgcgttacataacttacggtaaatggcccgcctggctgaccgcccaacgacccccgcccattgacgtcaataatgacgtatgttcccatagtaacgccaatagggactttccattgacgtcaatgggtggagtatttacggtaaactgcccacttggcagtacatcaagtgtatcatatgccaagtacgccccctattgacgtcaatgacggtaaatggcccgcctggcattatgcccagtacatgaccttatgggactttcctacttggcagtacatctacgtattagtcatcgctattaccatgtcgaggccacgttctgcttcactctccccatctcccccccctccccacccccaattttgtatttatttattttttaattattttgtgcagcgatgggggcggggggggggggcgcgcgccaggcggggcggggcggggcgaggggcggggcggggcgaggcggagaggtgcggcggcagccaatcagagcggcgcgctccgaaagtttccttttatggcgaggcggcggcggcggcggccctataaaaagcgaagcgcgcggcgggcgggagcaagcttgaactgaaaaaccagaaagttaactggtaagtttagtctttttgtcttttatttcaggtcccggatccggtggtggtgcaaatcaaagaactgctcctcagtggatgttgcctttacttctaggcctgtacggaagtgttacttctgctctaaaagctgcggaattgtacccgcggccgatccaccggtaaacttaagcttggtaccgagctcgtcgacgaagcaaagaaggggcagagggagcccgtgagctgagtgggccagggactgggagaaggagtgaggaggcagggccggcatgcctctgctgctggccagacctgctagctccatgcttcccgtctgcacctgtcactagtaagcatggagctagcaggtttggccgtgtagtgctacccagcgctggctgcctcctcagcattgcaattcctctcccatctgggcaccagtcagctaccctggtgggaatctgggtagccctcgacgtgctgggcggggggcggcgggccctcccgcagaacaccatgcgctcttcggaagcaattcagtctcgttgtgcctgtgacctggtacaacgagactgaattgcttctgaggagcgccttgacagcagccatgggagggccgccccctacctcagtgactcgacgaagcaaagaaggggcagagggagcccgtgagctgagtgggccagggactgggagaaggagtgaggaggcagggccggcatgcctctgctgctggccagacctgctagctccatgcttcccgtctgcacctgtcactagtaagcatggagctagcaggtttggccgtgtagtgctacccagcgctggctgcctcctcagcattgcaattcctctcccatctgggcaccagtcagctaccctggtgggaatctgggtagccctcgacgtgctgggcggggggcggcgggccctcccgcagaacaccatgcgctcttcggaagcaattcagtctcgttgtgcctgtgacctggtacaacgagactgaattgcttctgaggagcgccttgacagcagccatgggagggccgccccctacctcagtgactcgaggacggggtgaactacgcctgaggatccgatctttttccctctgccaaaaattatggggacatcatgaagccccttgagcatctgacttctggctaataaaggaaatttattttcattgcaatagtgtgttggaattttttgtgtctctcactcggcctaggtagataagtagcatggcgggttaatcattaactacaaggaacccctagtgatggagttggccactccctctctgcgcgctcgctcgctcactgaggccgggcgaccaaaggtcgcccgacgcccgggctttgcccgggcggcctcagtgagcgagcgagcgcgcag

SEQ ID NO: 1858 - DNA, 2208 bp, Artificial Sequence
  Description of Artificial Sequence: Synthetic oligonucleotide
ctgcgcgctcgctcgctcactgaggccgcccgggcaaagcccgggcgtcgggcgacctttggtcgcccggcctcagtgagcgagcgagcgcgcagagagggagtgtagccatgctctaggaagatcaattcaattcacgcgtcgacattgattattgactagttattaatagtaatcaattacggggtcattagttcatagcccatatatggagttccgcgttacataacttacggtaaatggcccgcctggctgaccgcccaacgacccccgcccattgacgtcaataatgacgtatgttcccatagtaacgccaatagggactttccattgacgtcaatgggtggagtatttacggtaaactgcccacttggcagtacatcaagtgtatcatatgccaagtacgccccctattgacgtcaatgacggtaaatggcccgcctggcattatgcccagtacatgaccttatgggactttcctacttggcagtacatctacgtattagtcatcgctattaccatgtcgaggccacgttctgcttcactctccccatctcccccccctccccacccccaattttgtatttatttattttttaattattttgtgcagcgatgggggcggggggggggggcgcgcgccaggcggggcggggcggggcgaggggcggggcggggcgaggcggagaggtgcggcggcagccaatcagagcggcgcgctccgaaagtttccttttatggcgaggcggcggcggcggcggccctataaaaagcgaagcgcgcggcgggcgggagcaagcttgaactgaaaaaccagaaagttaactggtaagtttagtctttttgtcttttatttcaggtcccggatccggtggtggtgcaaatcaaagaactgctcctcagtggatgttgcctttacttctaggcctgtacggaagtgttacttctgctctaaaagctgcggaattgtacccgcggccgatccaccggtaaacttaagcttggtaccgagctcgtcgacgaagcaaagaaggggcagagggagcccgtgagctgagtgggccagggactgggagaaggagtgaggaggcagggccggcatgcctctgctgctggccagacctgctagctccatgcttcccgtctgcacctgtcactagtaagcatggagctagcaggtttggccgtgtagtgctacccagcgctggctgcctcctcagcattgcaattcctctcccatctgggcaccagtcagctaccctggtgggaatctgggtagccctcgacgtgctgggcggggggcggcgggccctcccgcagaacaccatgcgctcttcggaagcaattcagtctcgttgtgcctgtgacctggtacaacgagactgaattgcttctgaggagcgccttgacagcagccatgggagggccgccccctacctcagtgactcgacgtgctgggcggggggcggcgggccctcccgcagaacaccatgcgctcttcggaagcaattcagtctcgttgtgcctgtgacctggtacaacgagactgaattgcttctgaggagcgccttgacagcagccatgggagggccgccccctacctcagtgactcgacgaagcaaagaaggggcagagggagcccgtgagctgagtgggccagggactgggagaaggagtgaggaggcagggccggcatgcctctgctgctggccagacctgctagctccatgcttcccgtctgcacctgtcactagtaagcatggagctagcaggtttggccgtgtagtgctacccagcgctggctgcctcctcagcattgcaattcctctcccatctgggcaccagtcagctaccctggtgggaatctgggtagccctcgaggacggggtgaactacgcctgaggatccgatctttttccctctgccaaaaattatggggacatcatgaagccccttgagcatctgacttctggctaataaaggaaatttattttcattgcaatagtgtgttggaattttttgtgtctctcactcggcctaggtagataagtagcatggcgggttaatcattaactacaaggaacccctagtgatggagttggccactccctctctgcgcgctcgctcgctcactgaggccgggcgaccaaaggtcgcccgacgcccgggctttgcccgggcggcctcagtgagcgagcgagcgcgcag

SEQ ID NO: 1859 - protein, 743 aa, Artificial Sequence
  Description of Artificial Sequence: Synthetic polypeptide
MAADGYLPDWLEDNLSEGIREWWALKPGAPQPKANQQHQDNARGLVLPGYKYLGPGNGLDKGEPVNAADAAALEHDKAYDQQLKAGDNPYLKYNHADAEFQERLKEDTSFGGNLGRAVFQAKKRLLEPLGLVEEAAKTAPGKKRPVEQSPQEPDSSAGIGKSGAQPAKKRLNFGQTGDTESVPDPQPIGEPPAAPSGVGSLTMASGGGAPVADNNEGADGVGSSSGNWHCDSQWLGDRVITTSTRTWALPTYNNHLYKQISNSTSGGSSNDNAYFGYSTPWGYFDFNRFHCHFSPRDWQRLINNNWGFRPKRLNFKLFNIQVKEVTDNNGVKTIANNLTSTVQVFTDSDYQLPYVLGSAHEGCLPPFPADVFMIPQYGYLTLNDGSQAVGRSSFYCLEYFPSQMLRTGNNFQFSYEFENVPFHSSYAHSQSLDRLMNPLIDQYLYYLSRTINGSGQNQQTLKFSVAGPSNMAVQGRNYIPGPSYRQQRVSTTVTQNNNSEFAWPGASSWALNGRNSLMNPGPAMASHKEGEDRFFPLSGSLIFGKQGTGRDNVDADKVMITNEEEIKTTNPVATESYGQVATNHQSDGTLAVPFKAQAQTGWVQNQGILPGMVWQDRDVYLQGPIWAKIPHTDGNFHPSPLMGGFGMKHPPPQILIKNTPVPADPPTAFNKDKLNSFITQYSTGQVSVEIEWELQKENSKRWNPEIQYTSNYYKSNNVEFAVNTEGVYSEPRPIGTRYLTRNL

SEQ ID NO: 1860 - protein, 743 aa, Artificial Sequence
  Description of Artificial Sequence: Synthetic polypeptide
MAADGYLPDWLEDNLSEGIREWWALKPGAPQPKANQQHQDNARGLVLPGYKYLGPGNGLDKGEPVNAADAAALEHDKAYDQQLKAGDNPYLKYNHADAEFQERLKEDTSFGGNLGRAVFQAKKRLLEPLGLVEEAAKTAPGKKRPVEQSPQEPDSSAGIGKSGAQPAKKRLNFGQTGDTESVPDPQPIGEPPAAPSGVGSLTMASGGGAPVADNNEGADGVGSSSGNWHCDSQWLGDRVITTSTRTWALPTYNNHLYKQISNSTSGGSSNDNAYFGYSTPWGYFDFNRFHCHFSPRDWQRLINNNWGFRPKRLNFKLFNIQVKEVTDNNGVKTIANNLTSTVQVFTDSDYQLPYVLGSAHEGCLPPFPADVFMIPQYGYLTLNDGSQAVGRSSFYCLEYFPSQMLRTGNNFQFSYEFENVPFHSSYAHSQSLDRLMNPLIDQYLYYLSRTINGSGQNQQTLKFSVAGPSNMAVQGRNYIPGPSYRQQRVSTTVTQNNNSEFAWPGASSWALNGRNSLMNPGPAMASHKEGEDRFFPLSGSLIFGKQGTGRDNVDADKVMITNEEEIKTTNPVATESYGQVATNHQSAQQAVRTSLAQAQTGWVQNQGILPGMVWQDRDVYLQGPIWAKIPHTDGNFHPSPLMGGFGMKHPPPQILIKNTPVPADPPTAFNKDKLNSFITQYSTGQVSVEIEWELQKENSKRWNPEIQYTSNYYKSNNVEFAVNTEGVYSEPRPIGTRYLTRNL

SEQ ID NO: 1861 - protein, 736 aa, Artificial Sequence
  Description of Artificial Sequence: Synthetic polypeptide
MAADGYLPDWLEDNLSEGIREWWALKPGAPQPKANQQHQDNARGLVLPGYKYLGPGNGLDKGEPVNAADAAALEHDKAYDQQLKAGDNPYLKYNHADAEFQERLKEDTSFGGNLGRAVFQAKKRLLEPLGLVEEAAKTAPGKKRPVEQSPQEPDSSAGIGKSGAQPAKKRLNFGQTGDTESVPDPQPIGEPPAAPSGVGSLTMASGGGAPVADNNEGADGVGSSSGNWHCDSQWLGDRVITTSTRTWALPTYNNHLYKQISNSTSGGSSNDNAYFGYSTPWGYFDFNRFHCHFSPRDWQRLINNNWGFRPKRLNFKLFNIQVKEVTDNNGVKTIANNLTSTVQVFTDSDYQLPYVLGSAHEGCLPPFPADVFMIPQYGYLTLNDGSQAVGRSSFYCLEYFPSQMLRTGNNFQFSYEFENVPFHSSYAHSQSLDRLMNPLIDQYLYYLSRTINGSGQNQQTLKFSVAGPSNMAVQGRNYIPGPSYRQQRVSTTVTQNNNSEFAWPGASSWALNGRNSLMNPGPAMASHKEGEDRFFPLSGSLIFGKQGTGRDNVDADKVMITNEEEIKTTNPVATESYGQVATNHQSAQAQAQTGWVQNQGILPGMVWQDRDVYLQGPIWAKIPHTDGNFHPSPLMGGFGMKHPPPQILIKNTPVPADPPTAFNKDKLNSFITQYSTGQVSVEIEWELQKENSKRWNPEIQYTSNYYKSNNVEFAVNTEGVYSEPRPIGTRYLTRNL

SEQ ID NO: 1862 - protein, 534 aa, Artificial Sequence
  Description of Artificial Sequence: Synthetic polypeptide
MAEGGGGAMGDSSGGADGVGNASGNWHCDSQWMGNTVITKTTRTWVLPSYNNHIYKAITSGTSQDANVQYAGYSTPWGYFDFNRFHCHFSPRDWQRLINNHWGIRPKSLKFKIFNVQVKEVTTQDQTKTIANNLTSTIQVFTDDEHQLPYVLGSATEGTMPPFPSDVYALPQYGYCTMHTNQNGARFNDRSAFYCLEYFPSQMLRTGNNFEFTFDFEEVPFHSMFAHSQDLDRLMNPLVDQYLWNFNEVDSSRNAQFKKAVKGAYGTMGRNWLPGPKFLDQRVRAYTGGTDNYANWNIWSNGNKVNLKDRQYLLQPGPVSATYTEGEASSLPAQNILGIAKDPYRSGSTTAGISDIMVTEEQEVAPTNGVGWKPYGRTVTNEQNTTTAPTSSDLDVLGALPGMVWQNRDIYLQGPIGAKIPKTDGKFHPSPNLGGFGLHNPPPQVFIKNTPVPADPPVEYVHQKWNSYITQYSTGQCTVEMVWELRKENSKRWNPEIQFTSNFSNRTSIMFAPNETGGYVEDRLIGTRYLTQNL

SEQ ID NO: 1863 - protein, 554 aa, Artificial Sequence
  Description of Artificial Sequence: Synthetic polypeptide
MTSVNSAEASTGAGGGGSNPVKSMWSEGATFSANSVTCTFSRQFLIPYDPEHHYKVFSPAASSCHNASGKEAKVCTISPIMGYSTPWRYLDFNALNLFFSPLEFQHLIENYGSIAPDALTVTISEIAVKDVTDKTGGGVQVTDSTTGRLCMLVDHEYKYPYVLGQGQDTLAPELPIWVYFPPQYAYLTVGDVNTQGISGDSKKLASEESAFYVLEHSSFQLLGTGGTATMSYKFPPVPPENLEGCSQHFYEMYNPLYGSRLGVPDTLGGDPKFRSLTHEDHAIQPQNFMPGPLVNSVSTKEGDSFNTGAGKALTGLSTGTSQNTRISLRPGPVSQPYHHWDTDKYVTGINAISHGQTTYGNAEDKEYQQGVGRFPNEKEQLKQLQGLNMHTYFPNKGTQQYTDQIERPLMVGSVWNRRALHYESQLWSKIPNLDDSFKTQFAALGGWGLHQPPPQIFLKILPQSGPIGGIKSMGITTLVQYAVGIMTVTMTFKLGPRKATGRWNPQPGVYPPHAAGHLPYVLYDPTATDAKQHHRHGYEKPEELWTAKSRVHPL

SEQ ID NO: 1864 - protein, 587 aa, Artificial Sequence
  Description of Artificial Sequence: Synthetic polypeptide
MSDGTSQPDGGNAVHSAARVERAADGPGGSGGGGSGGGGVGVSTGSYDNQTHYRFLGDGWVEITALATRLVHLNMPKSENYCRIRVHNTTDTSVKGNMAKDDAHEQIWTPWSLVDANAWGVWLQPSDWQYICNTMSQLNLVSLDQEIFNVVLKTVTEQDSGGQAIKIYNNDLTACMMVAVDSNNILPYTPAANSMETLGFYPWKPTIASPYRYYFCVDRDLSVTYENQEGTIEHNVMGTPKGMNSQFFTIENTQQITLLRTGDEFATGTYYFDTNPVKLTHTWQTNRQLGQPPLLSTFPEADTDAGTLTAQGSRHGATQMEVNWVSEAIRTRPAQVGFCQPHNDFEASRAGPFAAPKVPADVTQGMDREANGSVRYSYGKQHGENWAAHGPAPERYTWDETNFGSGRDTRDGFIQSAPLVVPPPLNGILTNANPIGTKNDIHFSNVFNSYGPLTTFSHPSPVYPQGQIWDKELDLEHKPRLHITAPFVCKNNAPGQMLVRLGPNLTDQYDPNGATLSRIVTYGTFFWKGKLTMRAKLRANTTWNPVYQVSVEDNGNSYMSVTKWLPTATGNMQSVPLITRPVARNTY

SEQ ID NO: 1865 - protein, 584 aa, Artificial Sequence
  Description of Artificial Sequence: Synthetic polypeptide
MSDGAVQPDGGQPAVRNERATGSGNGSGGGGGGGSGGVGISTGTFNNQTEFKFLENGWVEITANSSRLVHLNMPESENYKRVVVNNMDKTAVKGNMALDDIHVEIVTPWSLVDANAWGVWFNPGDWQLIVNTMSELHLVSFEQEIFNVVLKTVSESATQPPTKVYNNDLTASLMVALDSNNTMPFTPAAMRSETLGFYPWKPTIPTPWRYYFQWDRTLIPSHTGTSGTPTNVYHGTDPDDVQFYTIENSVPVHLLRTGDEFATGTFFFDCKPCRLTHTWQTNRALGLPPFLNSLPQSEGATNFGDIGVQQDKRRGVTQMGNTDYITEATIMRPAEVGYSAPYYSFEASTQGPFKTPIAAGRGGAQTDENQAADGDPRYAFGRQHGQKTTTTGETPERFTYIAHQDTGRYPEGDWIQNINFNLPVTNDNVLLPTDPIGGKTGINYTNIFNTYGPLTALNNVPPVYPNGQIWDKEFDTDLKPRLHINAPFVCQNNCPGQLFVKVAPNLTNQYDPDASANMSRIVTYSDFWWKGKLVFKAKLRASHTWNPIQQMSINVDNQFNYVPNNIGAMKIVYEKSQLAPRKLY

SEQ ID NO: 1866 - protein, 548 aa, Artificial Sequence
  Description of Artificial Sequence: Synthetic polypeptide
GVGISTGTFNNQTEFKFLENGWVEITANSSRLVHLNMPESENYRRVVVNNMDKTAVNGNMALDDIHAQIVTPWSLVDANAWGVWFNPGDWQLIVNTMSELHLVSFEQEIFNVVLKTVSESATQPPTKVYNNDLTASLMVALDSNNTMPFTPAAMRSETLGFYPWKPTIPTPWRYYFQWDRTLIPSHTGTSGTPTNIYHGTDPDDVQFYTIENSVPVHLLRTGDEFATGTFFFDCKPCRLTHTWQTNRALGLPPFLNSLPQSEGATNFGDIGVQQDKRRGVTQMGNTNYITEATIMRPAEVGYSAPYYSFEASTQGPFKTPIAAGRGGAQTDENQAADGNPRYAFGRQHGQKTTTTGETPERFTYIAHQDTGRYPEGDWIQNINFNLPVTNDNVLLPTDPIGGKTGINYTNIFNTYGPLTALNNVPPVYPNGQIWDKEFDTDLKPRLHVNAPFVCQNNCPGQLFVKVAPNLTNEYDPDASANMSRIVTYSDFWWKGKLVFKAKLRASHTWNPIQQMSINVDNQFNYVPSNIGGMKIVYEKSQLAPRKLY

SEQ ID NO: 1867 - protein, 736 aa, Artificial Sequence; identical to SEQ ID NO: 101
  Description of Artificial Sequence: Synthetic polypeptide

SEQ ID NO: 1868 - protein, 736 aa, Artificial Sequence; identical to SEQ ID NO: 96
  Description of Artificial Sequence: Synthetic polypeptide

SEQ ID NO: 1869 - protein, 736 aa, Artificial Sequence
  Description of Artificial Sequence: Synthetic polypeptide
MAADGYLPDWLEDTLSEGIRQWWKLKPGPPPPKPAERHKDDSRGLVLPGYKYLGPFNGLDKGEPVNEADAAALEHDKAYDRQLDSGDNPYLKYNHADAEFQERLKEDTSFGGNLGRAVFQAKKRVLEPLGLVEEPVKTAPGKKRPVEHSPVEEPDSSSGTGKAGQQPARKRLNFGQTGDADSVPDPQPLGQPPAAPSGLGTNTMATGSGAPMADNNEGADGVGNSSGNWHCDSTWMGDRVITTSTRTWALPTYNNHLYKQISSQSGASNDNHYFGYSTPWGYFDFNRFHCHFSPRDWQRLINNNWGFRPKRLNFKLFNIQVKEVTQNDGTTTIANNLTSTVQVFTDSEYQLPYVLGSAHQGCLPPFPADVFMVPQYGYLTLNNGSQAVGRSSFYCLEYFPSQMLRTGNNFTFSYTFEDVPFHSSYAHSQSLDRLMNPLIDQYLYYLSRTNTPSGTTTQSRLQFSQAGASDIRDQSRNWLPGPCYRQQRVSKTSADNNNSEYSWTGATKYHLNGRDSLVNPGPAMASHKDDEEKFFPQSGVLIFGKQGSEKTNVDIEKVMITDEEEIRTTNPVATEQYGSVSTNLQRGNRQAATADVNTQGVLPGMVWQDRDVYLQGPIWAKIPHTDGHFHPSPLMGGFGLKHPPPQILIKNTPVPANPSTTFSAAKFASFITQYSTGQVSVEIEWELQKENSKRWNPEIQYTSNYNKSVNVDFTVDTNGVYSEPRPIGTRYLTRNL

SEQ ID NO: 1870 - protein, 736 aa, Artificial Sequence
  Description of Artificial Sequence: Synthetic polypeptide
MAADGYLPDWLEDNLSEGIREWWDLKPGAPKPKANQQKQDDGRGLVLPGYKYLGPFNGLDKGEPVNAADAAALEHDKAYDQQLKAGDNPYLRYNHADAEFQERLQEDTSFGGNLGRAVFQAKKRVLEPFGLVEEGAKTAPGKKRPVEQSPQEPDSSSGIGKTGQQPAKKRLNFGQTGDSESVPDPQPLGEPPATPAAVGPTTMASGGGAPMADNNEGADGVGNASGNWHCDSTWLGDRVITTSTRTWALPTYNNHLYKQISSASTGASNDNHYFGYSTPWGYFDFNRFHCHFSPRDWQRLINNNWGFRPKRLNFKLFNVQVKEVTTNDGVTTIANNLTSTVQVFSDSEYQLPYVLGSAHQGCLPPFPADVFMIPQYGYLTLNNGSQAVGRSSFYCLEYFPSQMLRTGNNFTFSYTFEDVPFHSSYAHSQSLDRLMNPLIDQYLYYLNRTQDQSGSAQNKDLLFSRGSPAGMSVQPKNWLPGPCYRQQRVSKTKTDNNNSNFTWTGASKYNLNGRESIINPGTAMASHKDDKNKFFPMSGVMIFGKESAGASNTALDNVMITDEEEIKATNPVATERFGTVAVNLQSSSTDPATGDVHVMGALPGMVWQDRDVYLQGPIWAKIPHTDGHFHPSPLMGGFGLKNPPPQILIKNTPVPANPPAEFSATKFASFITQYSTGQVSVEIEWELQKENSKRWNPEVQYTSNYAKSANVDFTVDNNGLYTEPRPIGTRYLTRPL

SEQ ID NO: 1871 - protein, 737 aa, Artificial Sequence
  Description of Artificial Sequence: Synthetic polypeptide
MAADGYLPDWLEDTLSEGIRQWWKLKPGPPPPKPAERHKDDSRGLVLPGYKYLGPGNGLDKGEPVNAADAAALEHDKAYDQQLKAGDNPYLKYNHADAEFQERLKEDTSFGGNLGRAVFQAKKRVLEPLGLVEEGAKTAPGKKRPVEPSPQRSPDSSTGIGKKGQQPARKRLNFGQTGDSESVPDPQPLGEPPATPAAVGPTTMASGGGAPMADNNEGADGVGNASGNWHCDSTWLGDRVITTSTRTWALPTYNNHLYKQISSASTGASNDNHYFGYSTPWGYFDFNRFHCHFSPRDWQRLINNNWGFRPKRLNFKLFNIQVKEVTTNDGVTTIANNLTSTVQVFSDSEYQLPYVLGSAHQGCLPPFPADVFMIPQYGYLTLNNGSQAVGRSSFYCLEYFPSQMLRTGNNFTFSYTFEDVPFHSSYAHSQSLDRLMNPLIDQYLYYLNRTQNQSGSAQNKDLLFSRGSPAGMSVQPKNWLPGPCYRQQRVSKTKTDNNNSNFTWTGASKYNLNGRESIINPGTAMASHKDDKDKFFPMSGVMIFGKESAGASNTALDNVMITDEEEIKATNPVATERFGTVAVNLQSSSTDPATEDVHVMGALPGMVWQDRDVYLQGPIWAKIPHTDGHFHPSPLMGGFGLKNPPPQILIKNTPVPANPPAEFSATKFASFITQYSTGQVSVEIEWELQKENSKRWNPEVQYTSNYAKSANVDFTVDNNGLYTEPRPIGTRYLTRNL

SEQ ID NO: 1872 - protein, 736 aa, Artificial Sequence
  Description of Artificial Sequence: Synthetic polypeptide
MAADGYLPDWLEDNLSEGIREWWDLKPGAPKPKANQQKQDDGRGLVLPGYKYLGPFNGLDKGEPVNAADAAALEHDKAYDQQLKAGDNPYLRYNHADAEFQERLQEDTSFGGNLGRAVFQAKKRVLEPFGLVEEGAKTAPGKKRPVEQSPQEPDSSSGIGKTGQQPAKKRLNFGQTGDSESVPDPQPLGEPPATPAAVGPTTMASGGGAPMADNNEGADGVGNASGNWHCDSTWLGDRVITTSTRTWALPTYNNHLYKQISSASTGASNDNHYFGYSTPWGYFDFNRFHCHFSPRDWQRLINNNWGFRPKRLNFKLFNVQVKEVTTNDGVTTIANNLTSTVQVFSDSEYQLPYVLGSAHQGCLPPFPADVFMIPQYGYLTLNNGSQAVGRSSFYCLEYFPSQMLRTGNNFTFSYTFEDVPFHSSYAHSQSLDRLMNPLIDQYLYYLNRTQDQSGSAQNKDLLFSRGSPAGMSVQPKNWLPGPCYRQQRVSKTKTDNNNSNFTWTGASKYNLNGRESIINPGTAMASHKDDKNKFFPMSGVMIFGKESAGASNTALDNVMITDEEEIKATNPVATERFGTVAVNLQSSSTDPATGDVHVMGALPGMVWQDRDVYLQGPIWAKIPHTDGHFHPSPLMGGFGLKHPPPQILIKNTPVPANPPAEFSATKFASFITQYSTGQVSVEIEWELQKENSKRWNPEVQYTSNYAKSANVDFTVDNNGLYTEPRPIGTRYLTRPL

SEQ ID NO: 1873 - protein, 736 aa, Artificial Sequence
  Description of Artificial Sequence: Synthetic polypeptide
MAADGYLPDWLEDNLSEGIREWWDLKPGAPKPKANQQKQDDGRGLVLPGYKYLGPFNGLDKGEPVNAADAAALEHDKAYDQQLKAGDNPYLRYNHADAEFQERLQEDTSFGGNLGRAVFQAKKRVLEPFGLVEEGAKTAPGKKRPVEQSPQEPDSSSGIGKTGQQPAKKRLNFGQTGDSESVPDPQPLGEPPATPAAVGPTTMASGGGAPMADNNEGADGVGNASGNWHCDSTWLGDRVITTSTRTWALPTYNNHLYKQISSASTGASNDNHYFGYSTPWGYFDFNRFHCHFSPRDWQRLINNNWGFRPKRLNFKLFNVQVKEVTTNDGVTTIANNLTSTVQVFSDSEYQLPYVLGSAHQGCLPPFPADVFMIPQYGYLTLNNGSQAVGRSSFYCLEYFPSQMLRTGNNFTFSYTFEDVPFHSSYAHSQSLDRLMNPLIDQYLYYLNRTQDQSGSAQNKDLLFSRGSPAGMSVQPKNWLPGPCYRQQRVSKTKTDNNNSNFTWTGASKYNLNGRESIINPGTAMASHKDDKDKFFPMSGVMIFGKESAGASNTALDNVMITDEEEIKATNPVATERFGTVAVNLQSSSTDPATGDVHVMGALPGMVWQDRDVYLQGPIWAKIPHTDGHFHPSPLMGGFGLKHPPPQILIKNTPVPANPPAEFSATKFASFITQYSTGQVSVEIEWELQKENSKRWNPEVQYTSNYAKSANVDFTVDNNGLYTEPRPIGTRYLTRPL

SEQ ID NO: 1874 - protein, 736 aa, Artificial Sequence
  Description of Artificial Sequence: Synthetic polypeptide
MAADGYLPDWLEDNLSEGIREWWDLKPGAPKPKANQQKQDDGRGLVLPGYKYLGPFNGLDKGEPVNAADAAALEHDKAYDQQLKAGDNPYLRYNHADAEFQERLQEDTSFGGNLGRAVFQAKKRVLEPFGLVEEGAKTAPGKKRPVEQSPQEPDSSSGIGKTGQQPAKKRLNFGQTGDSESVPDPQPLGEPPATPAAVGPTTMASGGGAPMADNNEGADGVGNASGNWHCDSTWLGDRVITTSTRTWALPTYNNHLYKQISSASTGASNDNHYFGYSTPWGYFDFNRFHCHFSPRDWQRLINNNWGFRPKRLNFKLFNIQVKEVTTNDGVTTIANNLTSTVQVFSDSEYQLPYVLGSAHQGCLPPFPADVFMIPQYGYLTLNNGSQAVGRSSFYCLEYFPSQMLRTGNNFTFSYTFEDVPFHSSYAHSQSLDRLMNPLIDQYLYYLNRTQDQSGSAQNKDLLFSRGSPAGMSVQPKNWLPGPCYRQQRVSKTKTDNNNSNFTWTGASKYNLNGRESIINPGTAMASHKDDKNKFFPMSGVMIFGKESAGASNTALDNVMITDEEEIKATNPVATERFGTVAVNLQSSSTDPATGDVHVMGALPGMVWQDRDVYLQGPIWAKIPHTDGHFHPSPLMGGFGLKHPPPQILIKNTPVPANPPAEFSATKFASFITQYSTGQVSVEIEWELQKENSKRWNPEVQYTSNYAKSANVDFTVDNNGLYTEPRPIGTRYLTRPL

SEQ ID NO: 1875 - protein, 736 aa, Artificial Sequence
  Description of Artificial Sequence: Synthetic polypeptide
MAADGYLPDWLEDNLSEGIREWWDLKPGAPKPKANQQKQDDGRGLVLPGYKYLGPFNGLDKGEPVNAADAAALEHDKAYDQQLKAGDNPYLRYNHADAEFQERLQEDTSFGGNLGRAVFQAKKRVLEPFGLVEEGAKTAPGKKRPVEQSPQEPDSSSGIGKTGQQPAKKRLNFGQTGDSESVPDPQPLGEPPATPAAVGPTTMASGGGAPMADNNEGADGVGNASGNWHCDSTWLGDRVITTSTRTWALPTYNNHLYKQISSASTGASNDNHYFGYSTPWGYFDFNRFHCHFSPRDWQRLINNNWGFRPKRLNFKLFNVQVKEVTTNDGVTTIANNLTSTVQVFSDSEYQLPYVLGSAHQGCLPPFPADVFMIPQYGYLTLNNGSQAVGRSSFYCLEYFPSQMLRTGNNFTFSYTFEDVPFHSSYAHSQSLDRLMNPLIDQYLYYLNRTQNQSGSAQNKDLLFSRGSPAGMSVQPKNWLPGPCYRQQRVSKTKTDNNNSNFTWTGASKYNLNGRESIINPGTAMASHKDDKDKFFPMSGVMIFGKESAGASNTALDNVMITDEEEIKATNPVATERFGTVAVNLQSSSTDPATGDVHVMGALPGMVWQDRDVYLQGPIWAKIPHTDGHFHPSPLMGGFGLKHPPPQILIKNTPVPANPPAEFSATKFASFITQYSTGQVSVEIEWELQKENSKRWNPEVQYTSNYAKSANVDFTVDNNGLYTEPRPIGTRYLTRPL

SEQ ID NO: 1876 - protein, 736 aa, Artificial Sequence
  Description of Artificial Sequence: Synthetic polypeptide
MAADGYLPDWLEDNLSEGIREWWDLKPGAPKPKANQQKQDDGRGLVLPGYKYLGPFNGLDKGEPVNAADAAALEHDKAYDQQLKAGDNPYLRYNHADAEFQERLQEDTSFGGNLGRAVFQAKKRVLEPFGLVEEGAKTAPGKKRPVEQSPQEPDSSSGIGKTGQQPAKKRLNFGQTGDSESVPDPQPLGEPPATPAAVGPTTMASGGGAPMADNNEGADGVGNASGNWHCDSTWLGDRVITTSTRTWALPTYNNHLYKQISSASTGASNDNHYFGYSTPWGYFDFNRFHCHFSPRDWQRLINNNWGFRPKRLNFKLFNVQVKEVTTNDGVTTIANNLTSTVQVFSDSEYQLPYVLGSAHQGCLPPFPADVFMIPQYGYLTLNNGSQAVGRSSFYCLEYFPSQMLRTGNNFTFSYTFEDVPFHSSYAHSQSLDRLMNPLIDQYLYYLNRTQNQSGSAQNKDLLFSRGSPAGMSVQPKNWLPGPCYRQQRVSKTKTDNNNSNFTWTGASKYNLNGRESIINPGTAMASHKDDKNKFFPMSGVMIFGKESAGASNTALDNVMITDEEEIKATNPVATERFGTVAVNLQSSSTDPATGDVHVMGALPGMVWQDRDVYLQGPIWAKIPHTDGHFHPSPLMGGFGLKHPPPQILIKNTPVPANPPAEFSATKFASFITQYSTGQVSVEIEWELQKENSKRWNPEVQYTSNYAKSANVDFTVDNNGLYTEPRPIGTRYLTRPL

SEQ ID NO: 1877 - DNA, 2217 bp, Artificial Sequence
  Description of Artificial Sequence: Synthetic polynucleotide
atggctgccgatggttatcttccagattggctcgaggacaacctctctgagggcattcgcgagtggtgggacctgaaacctggagccccgaaacccaaagccaaccagcaaaagcaggacaacggccggggtctggtgcttcctggctacaagtacctcggacccttcaacggactcgacaagggggagcccgtcaacgcggcggacgcagcggccctcgagcacgacaaggcctacgaccagcagctccaagcgggtgacaatccgtacctgcggtataatcacgccgacgccgagtttcaggagcgtctgcaagaagatacgtcttttgggggcaacctcgggcgcgcagtcttccaggccaaaaagcgggttctcgaacctctgggcctggttgaatcgccggttaagacggctcctggaaagaagagaccggtagagccatcaccccagcgctctccagactcctctacgggcatcggcaagaaaggccagcagcccgcaaaaaagagactcaattttgggcagactggcgactcagagtcagtccccgaccctcaaccaatcggagaaccaccagcaggcccctctggtctgggatctggtacaatggctgcaggcggtggcgctccaatggcagacaataacgaaggcgccgacggagtgggtagttcctcaggaaattggcattgcgattccacatggctgggcgacagagtcatcaccaccagcacccgcacctgggccctgcccacctacaacaaccacctctacaagcaaatctccaacgggacctcgggaggaagcaccaacgacaacacctacttcggctacagcaccccctgggggtattttgacttcaacagattccactgccacttttcaccacgtgactggcagcgactcatcaacaacaactggggattccggcccaagaggctcaacttcaagctcttcaacatccaagtcaaggaggtcacgcagaatgaaggcaccaagaccatcgccaataaccttaccagcacgattcaggtctttacggactcggaataccagctcccgtacgtgctcggctcggcgcaccagggctgcctgcctccgttcccggcggacgtcttcatgattcctcagtacgggtacctgactctgaacaatggcagtcaggctgtgggccggtcgtccttctactgcctggagtactttccttctcaaatgctgagaacgggcaacaactttgaattcagctacaacttcgaggacgtgcccttccacagcagctacgcgcacagccagagcctggaccggctgatgaaccctctcatcgaccagtacttgtactacctgtcccggactcaaagcacgggcggtactgcaggaactcagcagttgctattttctcaggccgggcctaacaacatgtcggctcaggccaagaactggctacccggtccctgctaccggcagcaacgcgtctccacgacactgtcgcagaacaacaacagcaactttgcctggacgggtgccaccaagtatcatctgaatggcagagactctctggtgaatcctggcgttgccatggctacccacaaggacgacgaagagcgattttttccatccagcggagtcttaatgtttgggaaacagggagctggaaaagacaacgtggactatagcagcgtgatgctaaccagcgaggaagaaataaagaccaccaacccagtggccacagaacagtacggcgtggtggccgataacctgcaacagcaaaacgccgctcctattgtaggggccgtcaatagtcaaggagccttacctggcatggtgtggcagaaccgggacgtgtacctgcagggtcccatctgggccaagattcctcatacggacggcaactttcatccctcgccgctgatgggaggctttggactgaagcatccgcctcctcagatcctgattaaaaacacacctgttcccgcggatcctccgaccaccttcaatcaggccaagctggcttctttcatcacgcagtacagtaccggccaggtcagcgtggagatcgagtgggagctgcagaaggagaacagcaaacgctggaacccagagattcagtacacttccaactactacaaatctacaaatgtggactttgctgtcaatactgagggtacttattccgagcctcgccccattggcacccgttacctcacccgtaatctgtaa

SEQ ID NO: 1878 - protein, 738 aa, Artificial Sequence
  Description of Artificial Sequence: Synthetic polypeptide
MAADGYLPDWLEDNLSEGIREWWDLKPGAPKPKANQQKQDNGRGLVLPGYKYLGPFNGLDKGEPVNAADAAALEHDKAYDQQLQAGDNPYLRYNHADAEFQERLQEDTSFGGNLGRAVFQAKKRVLEPLGLVESPVKTAPGKKRPVEPSPQRSPDSSTGIGKKGQQPAKKRLNFGQTGDSESVPDPQPIGEPPAGPSGLGSGTMAAGGGAPMADNNEGADGVGSSSGNWHCDSTWLGDRVITTSTRTWALPTYNNHLYKQISNGTSGGSTNDNTYFGYSTPWGYFDFNRFHCHFSPRDWQRLINNNWGFRPKRLNFKLFNIQVKEVTQNEGTKTIANNLTSTIQVFTDSEYQLPYVLGSAHQGCLPPFPADVFMIPQYGYLTLNNGSQAVGRSSFYCLEYFPSQMLRTGNNFEFSYNFEDVPFHSSYAHSQSLDRLMNPLIDQYLYYLSRTQSTGGTAGTQQLLFSQAGPNNMSAQAKNWLPGPCYRQQRVSTTLSQNNNSNFAWTGATKYHLNGRDSLVNPGVAMATHKDDEERFFPSSGVLMFGKQGAGKDNVDYSSVMLTSEEEIKTTNPVATEQYGVVADNLQQQNAAPIVGAVNSQGALPGMVWQNRDVYLQGPIWAKIPHTDGNFHPSPLMGGFGLKHPPPQILIKNTPVPADPPTTFNQAKLASFITQYSTGQVSVEIEWELQKENSKRWNPEIQYTSNYYKSTNVDFAVNTEGTYSEPRPIGTRYLTRNL

SEQ ID NO: 1879 - protein, 738 aa, Artificial Sequence; identical to SEQ ID NO: 1878
  Description of Artificial Sequence: Synthetic polypeptide

SEQ ID NO: 1880 - DNA, 4472 bp, Artificial Sequence
  Description of Artificial Sequence: Synthetic polynucleotide
ctccatcactaggggtaaccgcgaagcgcctcccacgctgccgcgtcagcgctgacgtaaattacgtcataggggagtggtcctgtattagctgtcacgtgagtgcttttgcgacattttgcgacaccacgtggccattcatggtatatatggccgagtgagcgagcaggatctccattttgaccgcgaaatttgaacgagcagcagccatgccgggcttctacgagatcgtgcttaaggtgccgagcgacctggacgagcacctgccgggcatttctgactcgtttgtgaactgggtggcagagaaggaatgggagctgcccccggattctgacatggatcggaatctgattgagcaggcacccctgaccgtggccgagaagctacagcgcgacttcctggtccaatggcgccgcgtgagtaaggccccggaggccctcttctttgttcagttcgagaagggcgagtcctacttccacctccatattctggtagagaccacgggggtcaaatccatggtgctgggccgcttcctgagtcagattcgggacaagctggtgcagaccatctaccgcgggatcgagccgaccctgcccaactggttcgcggtgacaaagacgcgtaatggcgccggaggggggaacaaggtggtggacgagtgctacatccccaactacctgctgcccaagactcagcccgagctgcagtgggcgtggactaacatggaggagtatataagcgcgtgcttgaacctggccgagcgcaaacggctcgtggcgcagcacctgacccacgtcagccagacccaggagcagaacaaggagaatctgaacccgaattctgacgcgcctgtcatccggtcaaaaacctccgcgcgctacatggagctggtcgggtggctggtggaccggggcatcacctccgagaagcagtggatccaggaggaccaggcctcgtacatctccttcaacgccgcctccaactcgcggtctcagatcaaggccgcgctggacaatgccggcaagatcatggcgctgaccaaatccgcgcccgactacctggtaggccccgctctgcccgcggacattaaatccaaccgcatctaccgcatcctggagctgaatggctacgaccctgcctacgccggttccgtctttctcggctgggcccagaaaaagtttggcaaaaggaacaccatctggctgtttgggccggccaccacgggcaagaccaacatcgcggaagccatcgcccacgccgtgcccttctacggctgcgtcaactggaccaatgagaactttcccttcaacgattgcgtcgacaagatggtgatctggtgggaggagggcaagatgacggccaaggtcgtggagtccgccaaggccattctcggcggcagcaaggtgcgcgtggaccaaaagtgcaagtcgtccgcccagatcgatcccacccccgtgatcgtcacctccaacaccaacatgtgcgccgtgattgacgggaacagcaccaccttcgagcaccagcagccgttgcaggaccggatgttcaaatttgaacttacccgccgtctggagcacgactttggcaaggtgacaaagcaggaagtcaaagagttcttccgctgggcgcaggatcacgtgaccgaggtggcgcatgagttctacgtcagaaagggtggagctaacaaaagacccgcccccgatgacgcggatataagcgagcccaagcgggcctgcccctcagtcgcggatccatcgacgtcagacgcggaaggagctccggtggactttgccgacaggtaccaaaacaaatgttctcgtcacgcgggcatgcttcagatgctgtttccctgcaaaacatgcgagagaatgaatcagaatttcaacatttgcttcacgcacgggaccagagactgttcagaatgtttccctggcgtgtcagaatctcaaccggtcgtcagaaaaaagacgtatcggaaactctgtgcgattcatcatctgctggggcgggcacccgagattgcttgctcggcctgcgacctggtcaacgtggacctggatgactgtgtttctgagcaataaatgacttaaaccaggtatggctgccgatggttatcttccagattggctcgaggacaacctctctgagggcattcgcgagtggtgggacctgaaacctggagccccgaaacccaaagccaaccagcaaaagcaggacaacggccggggtctggtgcttcctggctacaagtacctcggacccttcaacggactcgacaagggggagcccgtcaacgcggcggacgcagcggccctcgagcacgacaaggcctacgaccagcagctccaagcgggtgacaatccgtacctgcggtataatcacgccgacgccgagtttcaggagcgtctgcaagaagatacgtcttttgggggcaacctcgggcgcgcagtcttccaggccaaaaagcgggttctcgaacctctgggcctggttgaatcgccggttaagacggctcctggaaagaagagaccggtagagccatcaccccagcgctctccagactcctctacgggcatcggcaagaaaggccagcagcccgcaaaaaagagactcaattttgggcagactggcgactcagagtcagtccccgaccctcaaccaatcggagaaccaccagcaggcccctctggtctgggatctggtacaatggctgcaggcggtggcgctccaatggcagacaataacgaaggcgccgacggagtgggtagttcctcaggaaattggcattgcgattccacatggctgggcgacagagtcatcaccaccagcacccgcacctgggccctgcccacctacaacaaccacctctacaagcaaatctccaacgggacctcgggaggaagcaccaacgacaacacctacttcggctacagcaccccctgggggtattttgacttcaacagattccactgccacttttcaccacgtgactggcagcgactcatcaacaacaactggggattccggcccaagaggctcaacttcaagctcttcaacatccaagtcaaggaggtcacgcagaatgaaggcaccaagaccatcgccaataaccttaccagcacgattcaggtctttacggactcggaataccagctcccgtacgtgctcggctcggcgcaccagggctgcctgcctccgttcccggcggacgtcttcatgattcctcagtacgggtacctgactctgaacaatggcagtcaggctgtgggccggtcgtccttctactgcctggagtactttccttctcaaatgctgagaacgggcaacaactttgaattcagctacaacttcgaggacgtgcccttccacagcagctacgcgcacagccagagcctggaccggctgatgaaccctctcatcgaccagtacttgtactacctgtcccggactcaaagcacgggcggtactgcaggaactcagcagttgctattttctcaggccgggcctaacaacatgtcggctcaggccaagaactggctacccggtccctgctaccggcagcaacgcgtctccacgacactgtcgcagaacaacaacagcaactttgcctggacgggtgccaccaagtatcatctgaatggcagagactctctggtgaatcctggcgttgccatggctacccacaaggacgacgaagagcgattttttccatccagcggagtcttaatgtttgggaaacagggagctggaaaagacaacgtggactatagcagcgtgatgctaaccagcgaggaagaaataaagaccaccaacccagtggccacagaacagtacggcgtggtggccgataacctgcaacagcaaaacgccgctcctattgtaggggccgtcaatagtcaaggagccttacctggcatggtgtggcagaaccgggacgtgtacctgcagggtcccatctgggccaagattcctcatacggacggcaactttcatccctcgccgctgatgggaggctttggactgaagcatccgcctcctcagatcctgattaaaaacacacctgttcccgcggatcctccgaccaccttcaatcaggccaagctggcttctttcatcacgcagtacagtaccggccaggtcagcgtggagatcgagtgggagctgcagaaggagaacagcaaacgctggaacccagagattcagtacacttccaactactacaaatctacaaatgtggactttgctgtcaatactgagggtacttattccgagcctcgccccattggcacccgttacctcacccgtaatctgtaattacatgttaatcaataaaccggttaattcgtttcagttgaactttggtctcctgtccttcttatcttatcggttaccatagaaactggttacttattaactgcttggtgcgcttcgcgataaaagacttacgtcatcgggttacccctagtgatgga

SEQ ID NO: 1881 - protein, 738 aa, Artificial Sequence
  Description of Artificial Sequence: Synthetic polypeptide
MAADGYLPDWLEDNLSEGIREWWDLKPGAPKPKANQQKQDNGRGLVLPGYKYLGPFNGLDKGEPVNAADAAALEHDKAYDQQLQAGDNPYLRYNHADAEFQERLQEDTSFGGNLGRAVFQAKKRVLEPLGLVESPVKTAPGKKRPVEPSPQRSPDSSTGIGKKGQQPAKKRLNFGQTGDSESVPDPQPIGEPPAAPSGVGPNTMAAGGGAPMADNNEGADGVGSSSGNWHCDSTWLGDRVITTSTRTWALPTYNNHLYKQISNGTSGGSTNDNTYFGYSTPWGYFDFNRFHCHFSPRDWQRLINNNWGFRPKRLNFKLFNIQVKEVTQNEGTKTIANNLTSTIQVFTDSEYQLPYVLGSAHQGCLPPFPADVFMIPQYGYLTLNNGSQAVGRSSFYCLEYFPSQMLRTGNNFEFSYNFEDVPFHSSYAHSQSLDRLMNPLIDQYLYYLSRTQSTGGTAGTQQLLFSQAGPNNMSAQAKNWLPGPCYRQQRVSTTLSQNNNSNFAWTGATKYHLNGRDSLVNPGVAMATHKDDEERFFPSSGVLMFGKQGAGKDNVDYSSVMLTSEEEIKTTNPVATEQYGVVADNLQQQNAAPIVGAVNSQGALPGMVWQNRDVYLQGPIWAKIPHTDGNFHPSPLMGGFGLKHPPPQILIKNTPVPADPPTTFNQAKLASFITQYSTGQVSVEIEWELQKENSKRWNPEIQYTSNYYKSTNVDFAVNTEGTYSEPRPIGTRYLTRNL

SEQ ID NO: 1882 - protein, 738 aa, Artificial Sequence
  Description of Artificial Sequence: Synthetic polypeptide
MAADGYLPDWLEDNLSEGIREWWDLKPGAPKPKANQQRQDNGRGLVLPGYRYLGPFNGLDKGEPVNAADAAALEHDRAYDQQLQAGDNPYLRYNHADAEFQERLQEDTSFGGNLGRAVFQAKKRVLEPLGLVESPVRTAPGKKRPVEPSPQRSPDSSTGIGKKGQQPARKRLNFGQTGDSESVPDPQPIGEPPAAPSGVGPNTMAAGGGAPMADNNEGADGVGSSSGNWHCDSTWLGDRVITTSTRTWALPTYNNHLYRQISNGTSGGSTNDNTYFGYSTPWGYFDFNRFHCHFSPRDWQRLINNNWGFRPKRLNFKLFNIQVKEVTQNEGTRTIANNLTSTIQVFTDSEYQLPYVLGSAHQGCLPPFPADVFMIPQYGYLTLNNGSQAVGRSSFYCLEYFPSQMLRTGNNFEFSYNFEDVPFHSSYAHSQSLDRLMNPLIDQYLYYLSRTQSTGGTAGTQQLLFSQAGPNNMSAQAKNWLPGPCYRQQRVSTTLSQNNNSNFAWTGATKYHLNGRDSLVNPGVAMATHRDDEERFFPSSGVLMFGRQGAGRDNVDYSSVMLTSEEEIRTTNPVATEQYGVVADNLQQQNAAPIVGAVNSQGALPGMVWQNRDVYLQGPIWAKIPHTDGNFHPSPLMGGFGLKHPPPQILIKNTPVPADPPTTFNQAKLASFITQYSTGQVSVEIEWELQKENSKRWNPEIQYTSNYYKSTNVDFAVNTEGTYSEPRPIGTRYLTRNL

SEQ ID NO: 1883 - protein, 738 aa, Artificial Sequence
  Description of Artificial Sequence: Synthetic polypeptide
MAADGYLPDWLEDNLSEGIREWWDLKPGAPKPKANQQRQDNGRGLVLPGYRYLGPFNGLDKGEPVNAADAAALEHDRAYDQQLQAGDNPYLRYNHADAEFQERLQEDTSFGGNLGRAVFQAKKRVLEPLGLVESPVRTAPGKKRPVEPSPQRSPDSSTGIGKRGQQPARKRLNFGQTGDSESVPDPQPIGEPPAAPSGVGPNTMAAGGGAPMADNNEGADGVGSSSGNWHCDSTWLGDRVITTSTRTWALPTYNNHLYRQISNGTSGGSTNDNTYFGYSTPWGYFDFNRFHCHFSPRDWQRLINNNWGFRPKRLNFKLFNIQVKEVTQNEGTRTIANNLTSTIQVFTDSEYQLPYVLGSAHQGCLPPFPADVFMIPQYGYLTLNNGSQAVGRSSFYCLEYFPSQMLRTGNNFEFSYNFEDVPFHSSYAHSQSLDRLMNPLIDQYLYYLSRTQSTGGTAGTQQLLFSQAGPNNMSAQAKNWLPGPCYRQQRVSTTLSQNNNSNFAWTGATKYHLNGRDSLVNPGVAMATHRDDEERFFPSSGVLMFGKQGAGRDNVDYSSVMLTSEEEIRTTNPVATEQYGVVADNLQQQNAAPIVGAVNSQGALPGMVWQNRDVYLQGPIWAKIPHTDGNFHPSPLMGGFGLKHPPPQILIKNTPVPADPPTTFNQAKLASFITQYSTGQVSVEIEWELQKENSKRWNPEIQYTSNYYKSTNVDFAVNTEGTYSEPRPIGTRYLTRNL

SEQ ID NO: 1884 - protein, 738 aa, Artificial Sequence
  Description of Artificial Sequence: Synthetic polypeptide
MAADGYLPDWLEDNLSEGIREWWDLKPGAPKPKANQQRQDNGRGLVLPGYRYLGPFNGLDKGEPVNAADAAALEHDRAYDQQLQAGDNPYLRYNHADAEFQERLQEDTSFGGNLGRAVFQAKKRVLEPLGLVESPVRTAPGKKRPVEPSPQRSPDSSTGIGKRGQQPAKKRLNFGQTGDSESVPDPQPIGEPPAAPSGVGPNTMAAGGGAPMADNNEGADGVGSSSGNWHCDSTWLGDRVITTSTRTWALPTYNNHLYRQISNGTSGGSTNDNTYFGYSTPWGYFDFNRFHCHFSPRDWQRLINNNWGFRPKRLNFKLFNIQVKEVTQNEGTRTIANNLTSTIQVFTDSEYQLPYVLGSAHQGCLPPFPADVFMIPQYGYLTLNNGSQAVGRSSFYCLEYFPSQMLRTGNNFEFSYNFEDVPFHSSYAHSQSLDRLMNPLIDQYLYYLSRTQSTGGTAGTQQLLFSQAGPNNMSAQAKNWLPGPCYRQQRVSTTLSQNNNSNFAWTGATKYHLNGRDSLVNPGVAMATHRDDEERFFPSSGVLMFGRQGAGRDNVDYSSVMLTSEEEIRTTNPVATEQYGVVADNLQQQNAAPIVGAVNSQGALPGMVWQNRDVYLQGPIWAKIPHTDGNFHPSPLMGGFGLKHPPPQILIKNTPVPADPPTTFNQAKLASFITQYSTGQVSVEIEWELQKENSKRWNPEIQYTSNYYKSTNVDFAVNTEGTYSEPRPIGTRYLTRNL

SEQ ID NO: 1885 - protein, 738 aa, Artificial Sequence
  Description of Artificial Sequence: Synthetic polypeptide
MAADGYLPDWLEDNLSEGIREWWDLKPGAPKPKANQQRQDNGRGLVLPGYRYLGPFNGLDKGEPVNAADAAALEHDRAYDQQLQAGDNPYLRYNHADAEFQERLQEDTSFGGNLGRAVFQAKKRVLEPLGLVESPVRTAPGKKRPVEPSPQRSPDSSTGIGKRGQQPAKKRLNFGQTGDSESVPDPQPIGEPPAAPSGVGPNTMAAGGGAPMADNNEGADGVGSSSGNWHCDSTWLGDRVITTSTRTWALPTYNNHLYRQISNGTSGGSTNDNTYFGYSTPWGYFDFNRFHCHFSPRDWQRLINNNWGFRPKRLNFKLFNIQVKEVTQNEGTRTIANNLTSTIQVFTDSEYQLPYVLGSAHQGCLPPFPADVFMIPQYGYLTLNNGSQAVGRSSFYCLEYFPSQMLRTGNNFEFSYNFEDVPFHSSYAHSQSLDRLMNPLIDQYLYYLSRTQSTGGTAGTQQLLFSQAGPNNMSAQAKNWLPGPCYRQQRVSTTLSQNNNSNFAWTGATKYHLNGRDSLVNPGVAMATHRDDEERFFPSSGVLMFGKQGAGRDNVDYSSVMLTSEEEIRTTNPVATEQYGVVADNLQQQNAAPIVGAVNSQGALPGMVWQNRDVYLQGPIWAKIPHTDGNFHPSPLMGGFGLKHPPPQILIKNTPVPADPPTTFNQARLASFITQYSTGQVSVEIEWELQKENSKRWNPEIQYTSNYYKSTNVDFAVNTEGTYSEPRPIGTRYLTRNL

SEQ ID NO: 1886 - protein, 738 aa, Artificial Sequence
  Description of Artificial Sequence: Synthetic polypeptide
MAADGYLPDWLEDNLSEGIREWWDLKPGAPKPKANQQRQDNGRGLVLPGYRYLGPFNGLDKGEPVNAADAAALEHDRAYDQQLQAGDNPYLRYNHADAEFQERLQEDTSFGGNLGRAVFQAKKRVLEPLGLVESPVRTAPGKKRPVEPSPQRSPDSSTGIGKKGQQPAKKRLNFGQTGDSESVPDPQPIGEPPAAPSGVGPNTMAAGGGAPMADNNEGADGVGSSSGNWHCDSTWLGDRVITTSTRTWALPTYNNHLYRQISNGTSGGSTNDNTYFGYSTPWGYFDFNRFHCHFSPRDWQRLINNNWGFRPKRLNFKLFNIQVKEVTQNEGTRTIANNLTSTIQVFTDSEYQLPYVLGSAHQGCLPPFPADVFMIPQYGYLTLNNGSQAVGRSSFYCLEYFPSQMLRTGNNFEFSYNFEDVPFHSSYAHSQSLDRLMNPLIDQYLYYLSRTQSTGGTAGTQQLLFSQAGPNNMSAQAKNWLPGPCYRQQRVSTTLSQNNNSNFAWTGATKYHLNGRDSLVNPGVAMATHRDDEERFFPSSGVLMFGRQGAGRDNVDYSSVMLTSEEEIRTTNPVATEQYGVVADNLQQQNAAPIVGAVNSQGALPGMVWQNRDVYLQGPIWAKIPHTDGNFHPSPLMGGFGLKHPPPQILIKNTPVPADPPTTFNQARLASFITQYSTGQVSVEIEWELQKENSKRWNPEIQYTSNYYKSTNVDFAVNTEGTYSEPRPIGTRYLTRNL

SEQ ID NO: 1887 - DNA, 2214 bp, Artificial Sequence
  Description of Artificial Sequence: Synthetic polynucleotide
atggctgccgatggttatcttccagattggctcgaggacaacctctctgagggcattcgcgagtggtgggacctgaaacctggagccccgaaacccaaagccaaccagcaaaagcaggacaacggccggggtctggtgcttcctggctacaagtacctcggacccttcaacggactcgacaagggggagcccgtcaacgcggcggacgcagcggccctcgagcacgacaaggcctacgaccagcagctccaagcgggtgacaatccgtacctgcggtataatcacgccgacgccgagtttcaggagcgtctgcaagaagatacgtcttttgggggcaacctcgggcgcgcagtcttccaggccaaaaagcgggttctcgaacctctgggcctggttgaatcgccggttaagacggctcctggaaagaagagaccggtagagccatcaccccagcgctctccagactcctctacgggcatcggcaagaaaggccagcagcccgcaaaaaagagactcaattttgggcagactggcgactcagagtcagtccccgaccctcaaccaatcggagaaccaccagcagccccctctggtgtgggacctaatacaatggctgcaggcggtggcgctccaatggcagacaataacgaaggcgccgacggagtgggtagttcctcaggaaattggcattgcgattccacatggctgggcgacagagtcatcaccaccagcacccgcacctgggccctgcccacctacaacaaccacctctacaagcaaatctccaacgggacctcgggaggaagcaccaacgacaacacctacttcggctacagcaccccctgggggtattttgacttcaacagattccactgccacttttcaccacgtgactggcagcgactcatcaacaacaactggggattccggcccaagaggctcaacttcaagctcttcaacatccaagtcaaggaggtcacgcagaatgaaggcaccaagaccatcgccaataaccttaccagcacgattcaggtctttacggactcggaataccagctcccgtacgtgctcggctcggcgcaccagggctgcctgcctccgttcccggcggacgtcttcatgattcctcagtacgggtacctgactctgaacaatggcagtcaggctgtgggccggtcgtccttctactgcctggagtactttccttctcaaatgctgagaacgggcaacaactttgaattcagctacaacttcgaggacgtgcccttccacagcagctacgcgcacagccagagcctggaccggctgatgaaccctctcatcgaccagtacttgtactacctgtcccggactcaaagcacgggcggtactgcaggaactcagcagttgctattttctcaggccgggcctaacaacatgtcggctcaggccaagaactggctacccggtccctgctaccggcagcaacgcgtctccacgacactgtcgcagaacaacaacagcaactttgcctggacgggtgccaccaagtatcatctgaatggcagagactctctggtgaatcctggcgttgccatggctacccacaaggacgacgaagagcgattttttccatccagcggagtcttaatgtttgggaaacagggagctggaaaagacaacgtggactatagcagcgtgatgctaaccagcgaggaagaaataaagaccaccaacccagtggccacagaacagtacggcgtggtggccgataacctgcaacagcaaaacgccgctcctattgtaggggccgtcaatagtcaaggagccttacctggcatggtgtggcagaaccgggacgtgtacctgcagggtcccatctgggccaagattcctcatacggacggcaactttcatccctcgccgctgatgggaggctttggactgaagcatccgcctcctcagatcctgattaaaaacacacctgttcccgcggatcctccgaccaccttcaatcaggccaagctggcttctttcatcacgcagtacagtaccggccaggtcagcgtggagatcgagtgggagctgcagaaggagaacagcaaacgctggaacccagagattcagtacacttccaactactacaaatctacaaatgtggactttgctgtcaatactgagggtacttattccgagcctcgccccattggcacccgttacctcacccgtaatctg

SEQ ID NO: 1888 - DNA, 2217 bp, Artificial Sequence
  Description of Artificial Sequence: Synthetic polynucleotide
atggctgccgatggttatcttccagattggctcgaggacaacctctctgagggcattcgcgagtggtgggacctgaaacctggagccccgaaacccaaagccaaccagcaaaggcaggacaacggccggggtctggtgcttcctggctacaggtacctcggacccttcaacggactcgacaagggggagcccgtcaacgcggcggacgcagcggccctcgagcacgacagggcctacgaccagcagctccaagcgggtgacaatccgtacctgcggtataatcacgccgacgccgagtttcaggagcgtctgcaagaagatacgtcttttgggggcaacctcgggcgcgcagtcttccaggccaaaaagcgggttctcgaacctctgggcctggttgaatcgccggttaggacggctcctggaaagaagagaccggtagagccatcaccccagcgctctccagactcctctacgggcatcggcaagaaaggccagcagcccgcaagaaagagactcaattttgggcagactggcgactcagagtcagtccccgaccctcaaccaatcggagaaccaccagcagccccctctggtgtgggacctaatacaatggctgcaggcggtggcgctccaatggcagacaataacgaaggcgccgacggagtgggtagttcctcaggaaattggcattgcgattccacatggctgggcgacagagtcatcaccaccagcacccgcacctgggccctgcccacctacaacaaccacctctacaggcaaatctccaacgggacctcgggaggaagcaccaacgacaacacctacttcggctacagcaccccctgggggtattttgacttcaacagattccactgccacttttcaccacgtgactggcagcgactcatcaacaacaactggggattccggcccaagaggctcaacttcaagctcttcaacatccaagtcaaggaggtcacgcagaatgaaggcaccaggaccatcgccaataaccttaccagcacgattcaggtctttacggactcggaataccagctcccgtacgtgctcggctcggcgcaccagggctgcctgcctccgttcccggcggacgtcttcatgattcctcagtacgggtacctgactctgaacaatggcagtcaggctgtgggccggtcgtccttctactgcctggagtactttccttctcaaatgctgagaacgggcaacaactttgaattcagctacaacttcgaggacgtgcccttccacagcagctacgcgcacagccagagcctggaccggctgatgaaccctctcatcgaccagtacttgtactacctgtcccggactcaaagcacgggcggtactgcaggaactcagcagttgctattttctcaggccgggcctaacaacatgtcggctcaggccaagaactggctacccggtccctgctaccggcagcaacgcgtctccacgacactgtcgcagaacaacaacagcaactttgcctggacgggtgccaccaagtatcatctgaatggcagagactctctggtgaatcctggcgttgccatggctacccacagggacgacgaagagcgattttttccatccagcggagtcttaatgtttgggagacagggagctggaagagacaacgtggactatagcagcgtgatgctaaccagcgaggaagaaataaggaccaccaacccagtggccacagaacagtacggcgtggtggccgataacctgcaacagcaaaacgccgctcctattgtaggggccgtcaatagtcaaggagccttacctggcatggtgtggcagaaccgggacgtgtacctgcagggtcccatctgggccaagattcctcatacggacggcaactttcatccctcgccgctgatgggaggctttggactgaagcatccgcctcctcagatcctgattaaaaacacacctgttcccgcggatcctccgaccaccttcaatcaggccaagctggcttctttcatcacgcagtacagtaccggccaggtcagcgtggagatcgagtgggagctgcagaaggagaacagcaaacgctggaacccagagattcagtacacttccaactactacaaatctacaaatgtggactttgctgtcaatactgagggtacttattccgagcctcgccccattggcacccgttacctcacccgtaatctgtaa

SEQ ID NO: 1889 - DNA, 2217 bp, Artificial Sequence
  Description of Artificial Sequence: Synthetic polynucleotide
atggctgccgatggttatcttccagattggctcgaggacaacctctctgagggcattcgcgagtggtgggacctgaaacctggagccccgaaacccaaagccaaccagcaaaggcaggacaacggccggggtctggtgcttcctggctacaggtacctcggacccttcaacggactcgacaagggggagcccgtcaacgcggcggacgcagcggccctcgagcacgacagggcctacgaccagcagctccaagcgggtgacaatccgtacctgcggtataatcacgccgacgccgagtttcaggagcgtctgcaagaagatacgtcttttgggggcaacctcgggcgcgcagtcttccaggccaaaaagcgggttctcgaacctctgggcctggttgaatcgccggttaggacggctcctggaaagaagagaccggtagagccatcaccccagcgctctccagactcctctacgggcatcggcaagagaggccagcagcccgcaagaaagagactcaattttgggcagactggcgactcagagtcagtccccgaccctcaaccaatcggagaaccaccagcagccccctctggtgtgggacctaatacaatggctgcaggcggtggcgctccaatggcagacaataacgaaggcgccgacggagtgggtagttcctcaggaaattggcattgcgattccacatggctgggcgacagagtcatcaccaccagcacccgcacctgggccctgcccacctacaacaaccacctctacaggcaaatctccaacgggacctcgggaggaagcaccaacgacaacacctacttcggctacagcaccccctgggggtattttgacttcaacagattccactgccacttttcaccacgtgactggcagcgactcatcaacaacaactggggattccggcccaagaggctcaacttcaagctcttcaacatccaagtcaaggaggtcacgcagaatgaaggcaccaggaccatcgccaataaccttaccagcacgattcaggtctttacggactcggaataccagctcccgtacgtgctcggctcggcgcaccagggctgcctgcctccgttcccggcggacgtcttcatgattcctcagtacgggtacctgactctgaacaatggcagtcaggctgtgggccggtcgtccttctactgcctggagtactttccttctcaaatgctgagaacgggcaacaactttgaattcagctacaacttcgaggacgtgcccttccacagcagctacgcgcacagccagagcctggaccggctgatgaaccctctcatcgaccagtacttgtactacctgtcccggactcaaagcacgggcggtactgcaggaactcagcagttgctattttctcaggccgggcctaacaacatgtcggctcaggccaagaactggctacccggtccctgctaccggcagcaacgcgtctccacgacactgtcgcagaacaacaacagcaactttgcctggacgggtgccaccaagtatcatctgaatggcagagactctctggtgaatcctggcgttgccatggctacccacagggacgacgaagagcgattttttccatccagcggagtcttaatgtttgggaaacagggagctggaagagacaacgtggactatagcagcgtgatgctaaccagcgaggaagaaataaggaccaccaacccagtggccacagaacagtacggcgtggtggccgataacctgcaacagcaaaacgccgctcctattgtaggggccgtcaatagtcaaggagccttacctggcatggtgtggcagaaccgggacgtgtacctgcagggtcccatctgggccaagattcctcatacggacggcaactttcatccctcgccgctgatgggaggctttggactgaagcatccgcctcctcagatcctgattaaaaacacacctgttcccgcggatcctccgaccaccttcaatcaggccaagctggcttctttcatcacgcagtacagtaccggccaggtcagcgtggagatcgagtgggagctgcagaaggagaacagcaaacgctggaacccagagattcagtacacttccaactactacaaatctacaaatgtggactttgctgtcaatactgagggtacttattccgagcctcgccccattggcacccgttacctcacccgtaatctgtaa

SEQ ID NO: 1890 - DNA, 2217 bp, Artificial Sequence
  Description of Artificial Sequence: Synthetic polynucleotide
atggctgccgatggttatcttccagattggctcgaggacaacctctctgagggcattcgcgagtggtgggacctgaaacctggagccccgaaacccaaagccaaccagcaaaggcaggacaacggccggggtctggtgcttcctggctacaggtacctcggacccttcaacggactcgacaagggggagcccgtcaacgcggcggacgcagcggccctcgagcacgacagggcctacgaccagcagctccaagcgggtgacaatccgtacctgcggtataatcacgccgacgccgagtttcaggagcgtctgcaagaagatacgtcttttgggggcaacctcgggcgcgcagtcttccaggccaaaaagcgggttctcgaacctctgggcctggttgaatcgccggttaggacggctcctggaaagaagagaccggtagagccatcaccccagcgctctccagactcctctacgggcatcggcaagagaggccagcagcccgcaaaaaagagactcaattttgggcagactggcgactcagagtcagtccccgaccctcaaccaatcggagaaccaccagcagccccctctggtgtgggacctaatacaatggctgcaggcggtggcgctccaatggcagacaataacgaaggcgccgacggagtgggtagttcctcaggaaattggcattgcgattccacatggctgggcgacagagtcatcaccaccagcacccgcacctgggccctgcccacctacaacaaccacctctacaggcaaatctccaacgggacctcgggaggaagcaccaacgacaacacctacttcggctacagcaccccctgggggtattttgacttcaacagattccactgccacttttcaccacgtgactggcagcgactcatcaacaacaactggggattccggcccaagaggctcaacttcaagctcttcaacatccaagtcaaggaggtcacgcagaatgaaggcaccaggaccatcgccaataaccttaccagcacgattcaggtctttacggactcggaataccagctcccgtacgtgctcggctcggcgcaccagggctgcctgcctccgttcccggcggacgtcttcatgattcctcagtacgggtacctgactctgaacaatggcagtcaggctgtgggccggtcgtccttctactgcctggagtactttccttctcaaatgctgagaacgggcaacaactttgaattcagctacaacttcgaggacgtgcccttccacagcagctacgcgcacagccagagcctggaccggctgatgaaccctctcatcgaccagtacttgtactacctgtcccggactcaaagcacgggcggtactgcaggaactcagcagttgctattttctcaggccgggcctaacaacatgtcggctcaggccaagaactggctacccggtccctgctaccggcagcaacgcgtctccacgacactgtcgcagaacaacaacagcaactttgcctggacgggtgccaccaagtatcatctgaatggcagagactctctggtgaatcctggcgttgccatggctacccacagggacgacgaagagcgattttttccatccagcggagtcttaatgtttgggagacagggagctggaagagacaacgtggactatagcagcgtgatgctaaccagcgaggaagaaataaggaccaccaacccagtggccacagaacagtacggcgtggtggccgataacctgcaacagcaaaacgccgctcctattgtaggggccgtcaatagtcaaggagccttacctggcatggtgtggcagaaccgggacgtgtacctgcagggtcccatctgggccaagattcctcatacggacggcaactttcatccctcgccgctgatgggaggctttggactgaagcatccgcctcctcagatcctgattaaaaacacacctgttcccgcggatcctccgaccaccttcaatcaggccaagctggcttctttcatcacgcagtacagtaccggccaggtcagcgtggagatcgagtgggagctgcagaaggagaacagcaaacgctggaacccagagattcagtacacttccaactactacaaatctacaaatgtggactttgctgtcaatactgagggtacttattccgagcctcgccccattggcacccgttacctcacccgtaatctgtaa

SEQ ID NO: 1891 - DNA, 2217 bp, Artificial Sequence
  Description of Artificial Sequence: Synthetic polynucleotide
atggctgccgatggttatcttccagattggctcgaggacaacctctctgagggcattcgcgagtggtgggacctgaaacctggagccccgaaacccaaagccaaccagcaaaggcaggacaacggccggggtctggtgcttcctggctacaggtacctcggacccttcaacggactcgacaagggggagcccgtcaacgcggcggacgcagcggccctcgagcacgacagggcctacgaccagcagctccaagcgggtgacaatccgtacctgcggtataatcacgccgacgccgagtttcaggagcgtctgcaagaagatacgtcttttgggggcaacctcgggcgcgcagtcttccaggccaaaaagcgggttctcgaacctctgggcctggttgaatcgccggttaggacggctcctggaaagaagagaccggtagagccatcaccccagcgctctccagactcctctacgggcatcggcaagagaggccagcagcccgcaaaaaagagactcaattttgggcagactggcgactcagagtcagtccccgaccctcaaccaatcggagaaccaccagcagccccctctggtgtgggacctaatacaatggctgcaggcggtggcgctccaatggcagacaataacgaaggcgccgacggagtgggtagttcctcaggaaattggcattgcgattccacatggctgggcgacagagtcatcaccaccagcacccgcacctgggccctgcccacctacaacaaccacctctacaggcaaatctccaacgggacctcgggaggaagcaccaacgacaacacctacttcggctacagcaccccctgggggtattttgacttcaacagattccactgccacttttcaccacgtgactggcagcgactcatcaacaacaactggggattccggcccaagaggctcaacttcaagctcttcaacatccaagtcaaggaggtcacgcagaatgaaggcaccaggaccatcgccaataaccttaccagcacgattcaggtctttacggactcggaataccagctcccgtacgtgctcggctcggcgcaccagggctgcctgcctccgttcccggcggacgtcttcatgattcctcagtacgggtacctgactctgaacaatggcagtcaggctgtgggccggtcgtccttctactgcctggagtactttccttctcaaatgctgagaacgggcaacaactttgaattcagctacaacttcgaggacgtgcccttccacagcagctacgcgcacagccagagcctggaccggctgatgaaccctctcatcgaccagtacttgtactacctgtcccggactcaaagcacgggcggtactgcaggaactcagcagttgctattttctcaggccgggcctaacaacatgtcggctcaggccaagaactggctacccggtccctgctaccggcagcaacgcgtctccacgacactgtcgcagaacaacaacagcaactttgcctggacgggtgccaccaagtatcatctgaatggcagagactctctggtgaatcctggcgttgccatggctacccacagggacgacgaagagcgattttttccatccagcggagtcttaatgtttgggaaacagggagctggaagagacaacgtggactatagcagcgtgatgctaaccagcgaggaagaaataaggaccaccaacccagtggccacagaacagtacggcgtggtggccgataacctgcaacagcaaaacgccgctcctattgtaggggccgtcaatagtcaaggagccttacctggcatggtgtggcagaaccgggacgtgtacctgcagggtcccatctgggccaagattcctcatacggacggcaactttcatccctcgccgctgatgggaggctttggactgaagcatccgcctcctcagatcctgattaaaaacacacctgttcccgcggatcctccgaccaccttcaatcaggccaggctggcttctttcatcacgcagtacagtaccggccaggtcagcgtggagatcgagtgggagctgcagaaggagaacagcaaacgctggaacccagagattcagtacacttccaactactacaaatctacaaatgtggactttgctgtcaatactgagggtacttattccgagcctcgccccattggcacccgttacctcacccgtaatctgtaa

SEQ ID NO: 1892 - DNA, 2217 bp, Artificial Sequence
  Description of Artificial Sequence: Synthetic polynucleotide
atggctgccgatggttatcttccagattggctcgaggacaacctctctgagggcattcgcgagtggtgggacctgaaacctggagccccgaaacccaaagccaaccagcaaaggcaggacaacggccggggtctggtgcttcctggctacaggtacctcggacccttcaacggactcgacaagggggagcccgtcaacgcggcggacgcagcggccctcgagcacgacagggcctacgaccagcagctccaagcgggtgacaatccgtacctgcggtataatcacgccgacgccgagtttcaggagcgtctgcaagaagatacgtcttttgggggcaacctcgggcgcgcagtcttccaggccaaaaagcgggttctcgaacctctgggcctggttgaatcgccggttaggacggctcctggaaagaagagaccggtagagccatcaccccagcgctctccagactcctctacgggcatcggcaagaaaggccagcagcccgcaaaaaagagactcaattttgggcagactggcgactcagagtcagtccccgaccctcaaccaatcggagaaccaccagcagccccctctggtgtgggacctaatacaatggctgcaggcggtggcgctccaatggcagacaataacgaaggcgccgacggagtgggtagttcctcaggaaattggcattgcgattccacatggctgggcgacagagtcatcaccaccagcacccgcacctgggccctgcccacctacaacaaccacctctacaggcaaatctccaacgggacctcgggaggaagcaccaacgacaacacctacttcggctacagcaccccctgggggtattttgacttcaacagattccactgccacttttcaccacgtgactggcagcgactcatcaacaacaactggggattccggcccaagaggctcaacttcaagctcttcaacatccaagtcaaggaggtcacgcagaatgaaggcaccaggaccatcgccaataaccttaccagcacgattcaggtctttacggactcggaataccagctcccgtacgtgctcggctcggcgcaccagggctgcctgcctccgttcccggcggacgtcttcatgattcctcagtacgggtacctgactctgaacaatggcagtcaggctgtgggccggtcgtccttctactgcctggagtactttccttctcaaatgctgagaacgggcaacaactttgaattcagctacaacttcgaggacgtgcccttccacagcagctacgcgcacagccagagcctggaccggctgatgaaccctctcatcgaccagtacttgtactacctgtcccggactcaaagcacgggcggtactgcaggaactcagcagttgctattttctcaggccgggcctaacaacatgtcggctcaggccaagaactggctacccggtccctgctaccggcagcaacgcgtctccacgacactgtcgcagaacaacaacagcaactttgcctggacgggtgccaccaagtatcatctgaatggcagagactctctggtgaatcctggcgttgccatggctacccacagggacgacgaagagcgattttttccatccagcggagtcttaatgtttgggagacagggagctggaagagacaacgtggactatagcagcgtgatgctaaccagcgaggaagaaataaggaccaccaacccagtggccacagaacagtacggcgtggtggccgataacctgcaacagcaaaacgccgctcctattgtaggggccgtcaatagtcaaggagccttacctggcatggtgtggcagaaccgggacgtgtacctgcagggtcccatctgggccaagattcctcatacggacggcaactttcatccctcgccgctgatgggaggctttggactgaagcatccgcctcctcagatcctgattaaaaacacacctgttcccgcggatcctccgaccaccttcaatcaggccaggctggcttctttcatcacgcagtacagtaccggccaggtcagcgtggagatcgagtgggagctgcagaaggagaacagcaaacgctggaacccagagattcagtacacttccaactactacaaatctacaaatgtggactttgctgtcaatactgagggtacttattccgagcctcgccccattggcacccgttacctcacccgtaatctgtaa

SEQ ID NO: 1893 - protein, 744 aa, Artificial Sequence
  Description of Artificial Sequence: Synthetic polypeptide
MAADGYLPDWLEDTLSEGIRQWWKLKPGPPPPKPAERHKDDSRGLVLPGYKYLGPFNGLDKGEPVNEADAAALEHDKAYDRQLDSGDNPYLKYNHADAEFQERLKEDTSFGGNLGRAVFQAKKRVLEPLGLVEEPVKTAPGKKRPVEHSPVEPDSSSGTGKAGQQPARKRLNFGQTGDADSVPDPQPLGQPPAAPSGLGTNTMATGSGAPMADNNEGADGVGNSSGNWHCDSTWMGDRVITTSTRTWALPTYNNHLYKQISSQSGASNDNHYFGYSTPWGYFDFNRFHCHFSPRDWQRLINNNWGFRPKRLNFKLFNIQVKEVTQNDGTTTIANNLTSTVQVFTDSEYQLPYVLGSAHQGCLPPFPADVFMVPQYGYLTLNNGSQAVGRSSFYCLEYFPSQMLRTGNNFTFSYTFEDVPFHSSYAHSQSLDRLMNPLIDQYLYYLSRTNTPSGTTTQSRLQFSQAGASDIRDQSRNWLPGPCYRQQRVSKTSADNNNSEYSWTGATKYHLNGRDSLVNPGPAMASHKDDEEKFFPQSGVLIFGKQGSEKTNVDIEKVMITDEEEIRTTNPVATEQYGSVSTNLQRGQRGESGHGYFAQAATADVNTQGVLPGMVWQDRDVYLQGPIWAKIPHTDGHFHPSPLMGGFGLKHPPPQILIKNTPVPANPSTTFSAAKFASFITQYSTGQVSVEIEWELQKENSKRWNPEIQYTSNYNKSVNVDFTVDTNGVYSEPRPIGTRYLTRNL

SEQ ID NO: 1894 - DNA, 8359 bp, Artificial Sequence
  Description of Artificial Sequence: Synthetic polynucleotide
catcatcaataatataccttattttggattgaagccaatatgataatgagggggtggagtttgtgacgtggcgcggggcgtgggaacggggcgggtgacgtagtagctctagaggtcctgtattagaggtcacgtgagtgttttgcgacattttgcgacaccatgtggtcacgctgggtatttaagcccgagtgagcacgcagggtctccattttgaagcgggaggtttgaacgcgcagccgccatgccggggttttacgagattgtgattaaggtccccagcgaccttgacgagcatctgcccggcatttctgacagctttgtgaactgggtggccgagaaggaatgggagttgccgccagattctgacatggatctgaatctgattgagcaggcacccctgaccgtggccgagaagctgcagcgcgactttctgacggaatggcgccgtgtgagtaaggcaccggaggcccttttctttgtgcaatttgagaagggagagagctacttccacatgcacgtgctcgtggaaaccaccggggtgaaatccatggttttgggacgtttcctgagtcagattcgcgaaaaactgattcagagaatttaccgcgggatcgagccgactttgccaaactggttcgcggtcacaaagaccagaaatggcgccggaggcgggaacaaggtggtggatgagtgctacatccccaattacttgctccccaaaacccagcctgagctccagtgggcgtggactaatatggaacagtatttaagcgcctgtttgaatctcacggagcgtaaacggttggtggcgcagcatctgacgcacgtgtcgcagacgcaggagcagaacaaagagaatcagaatcccaattctgatgcgccggtgatcagatcaaaaacttcagccaggtacatggagctggtcgggtggctcgtggacaaggggattacctcggagaagcagtggatccaggaggaccaggcctcatacatctccttcaatgcggcctccaactcgcggtcccaaatcaaggctgccttggacaatgcgggaaagattatgagcctgactaaaaccgcccccgactacctggtgggccagcagcccgtggaggacatttccagcaatcggatttataaaattttggaactaaacgggtacgatccccaatatgcggcttccgtctttctgggatgggccacgaaaaagttcggcaagaggaacaccatctggctgtttgggcctgcaactaccgggaagaccaacatcgcggaggccatagcccacactgtgcccttctacgggtgcgtaaactggaccaatgagaactttcccttcaacgactgtgtcgacaagatggtgatctggtgggaggaggggaagatgaccgccaaggtcgtggagtcggccaaagccattctcggaggaagcaaggtgcgcgtggaccagaaatgcaagtcctcggcccagatagacccgactcccgtgatcgtcacctccaacaccaacatgtgcgccgtgattgacgggaactcaacgaccttcgaacaccagcagccgttgcaagaccggatgttcaaatttgaactcacccgccgtctggatcatgactttgggaaggtcaccaagcaggaagtcaaagactttttccggtgggcaaaggatcacgtggttgaggtggagcatgaattctacgtcaaaaagggtggagccaagaaaagacccgcccccagtgacgcagatataagtgagcccaaacgggtgcgcgagtcagttgcgcagccatcgacgtcagacgcggaagcttcgatcaactacgcagacaggtaccaaaacaaatgttctcgtcacgtgggcatgaatctgatgctgtttccctgcagacaatgcgagagaatgaatcagaattcaaatatctgcttcactcacggacagaaagactgtttagagtgctttcccgtgtcagaatctcaacccgtttctgtcgtcaaaaaggcgtatcagaaactgtgctacattcatcatatcatgggaaaggtgccagacgcttgcactgcctgcgatctggtcaatgtggatttggatgactgcatctttgaacaataaatgatttaaatcaggtatggctgccgatggttatcttccagattggctcgaggacactctctctgaaggaataagacagtggtggaagctcaaacctggcccaccaccaccaaagcccgcagagcggcataaggacgacagcaggggtcttgtgcttcctgggtacaagtacctcggacccttcaacggactcgacaagggagagccggtcaacgaggcagacgccgcggccctcgagcacgacaaagcctacgaccggcagctcgacagcggagacaacccgtacctcaagtacaaccacgccgacgcggagtttcaggagcgccttaaagaagatacgtcttttgggggcaacctcggacgagcagtcttccaggcgaaaaagagggttcttgaacctctgggcctggttgaggaacctgttaagacggctccgggaaaaaagaggccggtagagcactctcctgtggagccagactcctcctcgggaaccggaaaggcgggccagcagcctgcaagaaaaagattgaattttggtcagactggagacgcagactcagtacctgacccccagcctctcggacagccaccagcagccccctctggtctgggaactaatacgatggctacaggcagtggcgcaccaatggcagacaataacgagggcgccgacggagtgggtaattcctcgggaaattggcattgcgattccacatggatgggcgacagagtcatcaccaccagcacccgaacctgggccctgcccacctacaacaaccacctctacaaacaaatttccagccaatcaggagcctcgaacgacaatcactactttggctacagcaccccttgggggtattttgacttcaacagattccactgccacttttcaccacgtgactggcaaagactcatcaacaacaactggggattccgacccaagagactcaacttcaagctctttaacattcaagtcaaagaggtcacgcagaatgacggtacgacgacgattgccaataaccttaccagcacggttcaggtgtttactgactcggagtaccagctcccgtacgtcctcggctcggcgcatcaaggatgcctcccgccgttcccagcagacgtcttcatggtgccacagtatggatacctcaccctgaacaacgggagtcaggcagtaggacgctcttcattttactgcctggagtactttccttctcagatgctgcgtaccggaaacaactttaccttcagctacacttttgaggacgttcctttccacagcagctacgctcacagccagagtctggaccgtctcatgaatcctctcatcgaccagtacctgtattacttgagcagaacaaacactccaagtggaaccaccacgcagtcaaggcttcagttttctcaggccggagcgagtgacattcgggaccagtctaggaactggcttcctggaccctgttaccgccagcagcgagtatcaaagacatctgcggataacaacaacagtgaatactcgtggactggagctaccaagtaccacctcaatggcagagactctctggtgaatccgggcccggccatggcaagccacaaggacgatgaagaaaagttttttcctcagagcggggttctcatctttgggaagcaaggctcagagaaaacaaatgtggacattgaaaaggtcatgattacagacgaagaggaaatcaggacaaccaatcccgtggctacggagcagtatggttctgtatctaccaacctccagagaggccagagaggcgagtctggtcatggttattttgcccaggcggccaccgcagatgtcaacacacaaggcgttcttccaggcatggtctggcaggacagagatgtgtaccttcaggggcccatctgggcaaagattccacacacggacggacattttcacccctctcccctcatgggtggattcggacttaaacaccctcctccacagattctcatcaagaacaccccggtacctgcgaatccttcgaccaccttcagtgcggcaaagtttgcttccttcatcacacagtactccacgggacaggtcagcgtggagatcgagtgggagctgcagaaggaaaacagcaaacgctggaatcccgaaattcagtacacttccaactacaacaagtctgttaatgtggactttactgtggacactaatggcgtgtattcagagcctcgccccattggcaccagatacctgactcgtaatctgtaattgcttgttaatcaataaaccgtttaattcgtttcagttgaactttggtctctgcgtatttctttcttatctagtttccatgctctagaggtcctgtattagaggtcacgtgagtgttttgcgacattttgcgacaccatgtggtcacgctgggtatttaagcccgagtgagcacgcagggtctccattttgaagcgggaggtttgaacgcgcagccaccacggcggggttttacgagattgtgattaaggtccccagcgaccttgacgagcatctgcccggcatttctgacagctttgtgaactgggtggccgagaaggaatgggagttgccgccagattctgacatggatctgaatctgattgagcaggcacccctgaccgtggccgagaagctgcatcgctggcgtaatagcgaagaggcccgcaccgatcgcccttcccaacagttgcgcagcctgaatggcgaatggcgattccgttgcaatggctggcggtaatattgttctggatattaccagcaaggccgatagtttgagttcttctactcaggcaagtgatgttattactaatcaaagaagtattgcgacaacggttaatttgcgtgatggacagactcttttactcggtggcctcactgattataaaaacacttctcaggattctggcgtaccgttcctgtctaaaatccctttaatcggcctcctgtttagctcccgctctgattctaacgaggaaagcacgttatacgtgctcgtcaaagcaaccatagtacgcgccctgtagcggcgcattaagcgcggcgggtgtggtggttacgcgcagcgtgaccgctacacttgccagcgccctagcgcccgctcctttcgctttcttcccttcctttctcgccacgttcgccggctttccccgtcaagctctaaatcgggggctccctttagggttccgatttagtgctttacggcacctcgaccccaaaaaacttgattagggtgatggttcacgtagtgggccatcgccctgatagacggtttttcgccctttgacgttggagtccacgttctttaatagtggactcttgttccaaactggaacaacactcaaccctatctcggtctattcttttgatttataagggattttgccgatttcggcctattggttaaaaaatgagctgatttaacaaaaatttaacgcgaattttaacaaaatattaacgtttacaatttaaatatttgcttatacaatcttcctgtttttggggcttttctgattatcaaccggggtacatatgattgacatgctagttttacgattaccgttcatcgattctcttgtttgctccagactctcaggcaatgacctgatagcctttgtagagacctctcaaaaatagctaccctctccggcatgaatttatcagctagaacggttgaatatcatattgatggtgatttgactgtctccggcctttctcacccgtttgaatctttacctacacattactcaggcattgcatttaaaatatatgagggttctaaaaatttttatccttgcgttgaaataaaggcttctcccgcaaaagtattacagggtcataatgtttttggtacaaccgatttagctttatgctctgaggctttattgcttaattttgctaattctttgccttgcctgtatgatttattggatgttggaattcctgatgcggtattttctccttacgcatctgtgcggtatttcacaccgcatatggtgcactctcagtacaatctgctctgatgccgcatagttaagccagccccgacacccgccaacacccgctgacgcgccctgacgggcttgtctgctcccggcatccgcttacagacaagctgtgaccgtctccgggagctgcatgtgtcagaggttttcaccgtcatcaccgaaacgcgcgagacgaaagggcctcgtgatacgcctatttttataggttaatgtcatgataataatggtttcttagacgtcaggtggcacttttcggggaaatgtgcgcggaacccctatttgtttatttttctaaatacattcaaatatgtatccgctcatgagacaataaccctgataaatgcttcaataatattgaaaaaggaagagtatgagtattcaacatttccgtgtcgcccttattcccttttttgcggcattttgccttcctgtttttgctcacccagaaacgctggtgaaagtaaaagatgctgaagatcagttgggtgcacgagtgggttacatcgaactggatctcaacagcggtaagatccttgagagttttcgccccgaagaacgttttccaatgatgagcacttttaaagttctgctatgtggcgcggtattatcccgtattgacgccgggcaagagcaactcggtcgccgcatacactattctcagaatgacttggttgagtactcaccagtcacagaaaagcatcttacggatggcatgacagtaagagaattatgcagtgctgccataaccatgagtgataacactgcggccaacttacttctgacaacgatcggaggaccgaaggagctaaccgcttttttgcacaacatgggggatcatgtaactcgccttgatcgttgggaaccggagctgaatgaagccataccaaacgacgagcgtgacaccacgatgcctgtagcaatggcaacaacgttgcgcaaactattaactggcgaactacttactctagcttcccggcaacaattaatagactggatggaggcggataaagttgcaggaccacttctgcgctcggcccttccggctggctggtttattgctgataaatctggagccggtgagcgtgggtctcgcggtatcattgcagcactggggccagatggtaagccctcccgtatcgtagttatctacacgacggggagtcaggcaactatggatgaacgaaatagacagatcgctgagataggtgcctcactgattaagcattggtaactgtcagaccaagtttactcatatatactttagattgatttaaaacttcatttttaatttaaaaggatctaggtgaagatcctttttgataatctcatgaccaaaatcccttaacgtgagttttcgttccactgagcgtcagaccccgtagaaaagatcaaaggatcttcttgagatcctttttttctgcgcgtaatctgctgcttgcaaacaaaaaaaccaccgctaccagcggtggtttgtttgccggatcaagagctaccaactctttttccgaaggtaactggcttcagcagagcgcagataccaaatactgtccttctagtgtagccgtagttaggccaccacttcaagaactctgtagcaccgcctacatacctcgctctgctaatcctgttaccagtggctgctgccagtggcgataagtcgtgtcttaccgggttggactcaagacgatagttaccggataaggcgcagcggtcgggctgaacggggggttcgtgcacacagcccagcttggagcgaacgacctacaccgaactgagatacctacagcgtgagctatgagaaagcgccacgcttcccgaagggagaaaggcggacaggtatccggtaagcggcagggtcggaacaggagagcgcacgagggagcttccagggggaaacgcctggtatctttatagtcctgtcgggtttcgccacctctgacttgagcgtcgatttttgtgatgctcgtcaggggggcggagcctatggaaaaacgccagcaacgcggcctttttacggttcctggccttttgctggccttttgctcacatgttctttcctgcgttatcccctgattctgtggataaccgtattaccgcctttgagtgagctgataccgctcgccgcagccgaacgaccgagcgcagcgagtcagtgagcgaggaagcggaagagcgcccaatacgcaaaccgcctctccccgcgcgttggccgattcattaatgcagaattcc

SEQ ID NO: 1895 - protein, 736 aa, Artificial Sequence
  Description of Artificial Sequence: Synthetic polypeptide
MAADGYLPDWLEDNLSEGIREWWDLKPGAPKPKANQQKQDDGRGLVLPGYKYLGPFNGLDKGEPVNAADAAALEHDKAYDQQLKAGDNPYLRYNHADAEFQERLQEDTSFGGNLGRAVFQAKKRVLEPLGLVEEGAKTAPGKKRPVEQSPQEPDSSSGIGKKGQQPAKKRLNFGQTGDSESVPDPQPLGEPPAAPSGVGSNTMAAGGGAPMADNNEGADGVGNASGNWHCDSTWLGDRVITTSTRTWALPTYNNHLYKQISSQSGASTNDNTYFGYSTPWGYFDFNRFHCHFSPRDWQRLINNNWGFRPKRLNFKLFNIQVKEVTTNDGTTTIANNLTSTVQVFTDSEYQLPYVLGSAHQGCLPPFPADVFMIPQYGYLTLNNGSQAVGRSSFYCLEYFPSQMLRTGNNFEFSYTFEDVPFHSSYAHSQSLDRLMNPLIDQYLYYLSRTQTTSGTAGNRTLQFSQAGPSSMANQAKNWLPGPCYRQQRVSKTANQNNNSNFAWTGATKYHLNGRDSLVNPGPAMATHKDDEDKFFPMSGVLIFGKQGAGNSNVDLDNVMITSEEEIKTTNPVATEQYGTVATNLQSSNTAPATGTVNSQGALPGMVWQNRDVYLQGPIWAKIPHTDGHFHPSPLMGGFGLKHPPPQILIKNTPVPANPPTTFSPAKFASFITQYSTGQVSVEIEWELQKENSKRWNPEIQYTSNYNKSTNVDFAVDTNGVYSEPRPIGTRYLTRNL

SEQ ID NO: 1896 - DNA, 2208 bp, Artificial Sequence
  Description of Artificial Sequence: Synthetic polynucleotide
atggctgccgatggttatcttccagattggctcgaggacaacctctctgagggcattcgcgagtggtgggacttgaaacctggagccccgaaacccaaagccaaccagcaaaagcaggacgacggccggggtctggtgcttcctggctacaagtacctcggacccttcaacggactcgacaagggggagcccgtcaacgcggcggacgcagcggccctcgagcacgacaaggcctacgaccagcagctcaaagcgggtgacaatccgtacctgcggtataaccacgccgacgccgagtttcaggagcgtctgcaagaagatacgtcttttgggggcaacctcgggcgagcagtcttccaggccaagaagcgggttctcgaacctctcggtctggttgaggaaggcgctaagacggctcctggaaagaagagaccggtagagcaatcaccccaggaaccagactcctcttcgggcatcggcaagaaaggccagcagcccgcgaagaagagactcaactttgggcagacaggcgactcagagtcagtgcccgaccctcaaccactcggagaaccccccgcagccccctctggtgtgggatctaatacaatggcagcaggcggtggcgctccaatggcagacaataacgaaggcgccgacggagtgggtaacgcctcaggaaattggcattgcgattccacatggctgggcgacagagtcatcaccaccagcacccgaacctgggccctccccacctacaacaaccacctctacaagcaaatctccagccaatcgggagcaagcaccaacgacaacacctacttcggctacagcaccccctgggggtattttgactttaacagattccactgccacttctcaccacgtgactggcagcgactcatcaacaacaactggggattccggcccaagagactcaacttcaagctcttcaacatccaggtcaaggaggtcacgacgaatgatggcaccacgaccatcgccaataaccttaccagcacggttcaggtctttacggactcggaataccagctcccgtacgtcctcggctctgcgcaccagggctgcctgcctccgttcccggcggacgtcttcatgattcctcagtacgggtacctgactctgaacaatggcagtcaggccgtgggccgttcctccttctactgcctggagtactttccttctcaaatgctgagaacgggcaacaactttgagttcagctacacgtttgaggacgtgccttttcacagcagctacgcgcacagccaaagcctggaccggctgatgaaccccctcatcgaccagtacctgtactacctgtctcggactcagaccacgagtggtaccgcaggaaatcggacgttgcaattttctcaggccgggcctagtagcatggcgaatcaggccaaaaactggctacccgggccctgctaccggcagcaacgcgtctccaagacagcgaatcaaaataacaacagcaactttgcctggaccggtgccaccaagtatcatctgaatggcagagactctctggtaaatcccggtcccgctatggcaacccacaaggacgacgaagacaaattttttccgatgagcggagtcttaatatttgggaaacagggagctggaaatagcaacgtggaccttgacaacgttatgataaccagtgaggaagaaattaaaaccaccaacccagtggccacagaacagtacggcacggtggccactaacctgcaatcgtcaaacaccgctcctgctacagggaccgtcaacagtcaaggagccttacctggcatggtctggcagaaccgggacgtgtacctgcagggtcctatctgggccaagattcctcacacggacggacactttcatccctcgccgctgatgggaggctttggactgaaacacccgcctcctcagatcctgattaagaatacacctgttcccgcgaatcctccaactaccttcagtccagctaagtttgcgtcgttcatcacgcagtacagcaccggacaggtcagcgtggaaattgaatgggagctgcagaaagaaaacagcaaacgctggaacccagagattcaatacacttccaactacaacaaatctacaaatgtggactttgctgttgacacaaatggcgtttattctgagcctcgccccatcggcacccgttacctcacccgtaatctg

SEQ ID NO: 1897 - protein, 737 aa, Artificial Sequence
  Description of Artificial Sequence: Synthetic polypeptide
MAADGYLPDWLEDNLSEGIREWWDLKPGAPKPKANQQKQDDGRGLVLPGYKYLGPFNGLDKGEPVNAADAAALEHDKAYDQQLKAGDNPYLRYNHADAEFQERLQEDTSFGGNLGRAVFQAKKRVLEPLGLVEEGAKTAPGKKRPVEQSPQEPDSSTGIGKKGQQPAKKRLNFGQTGDSESVPDPQPLGEPPAAPSGVGSNTMAAGGGAPMADNNEGADGVGNASGNWHCDSTWLGDRVITTSTRTWALPTYNNHLYKQISNSQSGGSTNDNTYFGYSTPWGYFDFNRFHCHFSPRDWQRLINNNWGFRPKRLNFKLFNIQVKEVTTNDGTTTIANNLTSTVQVFTDSEYQLPYVLGSAHQGCLPPFPADVFMIPQYGYLTLNNGSQAVGRSSFYCLEYFPSQMLRTGNNFEFSYTFEDVPFHSSYAHSQSLDRLMNPLIDQYLYYLSRTQTTGGTAGNRTLQFSQAGPSSMANQAKNWLPGPCYRQQRVSKTTNQNNNSNFAWTGATKYHLNGRDSLVNPGVAMATHKDDEDRFFPSSGVLIFGKQGAGNDNVDLDNVMITSEEEIKTTNPVATEEYGVVATNLQSANTAPQTGTVNSQGALPGMVWQNRDVYLQGPIWAKIPHTDGNFHPSPLMGGFGLKHPPPQILIKNTPVPANPPTTFSPAKFASFITQYSTGQVSVEIEWELQKENSKRWNPEIQYTSNYNKSTNVDFAVDTEGVYSEPRPIGTRYLTRNL

SEQ ID NO: 1898 - DNA, 2211 bp, Artificial Sequence
  Description of Artificial Sequence: Synthetic polynucleotide
atggctgccgatggttatcttccagattggctcgaggacaacctctctgagggcattcgcgagtggtgggacttgaaacctggagccccgaaacccaaagccaaccagcaaaagcaggacgacggccggggtctggtgcttcctggctacaagtacctcggacccttcaacggactcgacaagggggagcccgtcaacgcggcggacgcagcggccctcgagcacgacaaggcctacgaccagcagctcaaagcgggtgacaatccgtacctgcggtataaccacgccgacgccgagtttcaggagcgtctgcaagaagatacgtcttttgggggcaacctcgggcgagcagtcttccaggccaagaagcgggttctcgaacctctcggtctggttgaggaaggcgctaagacggctcctggaaagaagagaccggtagagcaatcaccccaggaaccagactcctctacgggcatcggcaagaaaggccagcagcccgcgaaaaagagactcaactttgggcagactggcgactcagagtcagtgcccgaccctcaaccactcggagaaccccccgcagccccctctggtgtgggatctaatacaatggctgcaggcggtggcgctccaatggcagacaataacgaaggcgccgacggagtgggtaatgcctcaggaaattggcattgcgattccacatggctgggcgacagagtcatcaccaccagcacccgaacctgggccctccccacctacaacaaccacctctacaagcaaatctccaacagccaatcgggaggaagcaccaacgacaacacctacttcggctacagcaccccctgggggtattttgactttaacagattccactgccacttctcaccacgtgactggcagcgactcatcaacaacaactggggattccggcccaagagactcaacttcaagctcttcaacatccaggtcaaggaggtcacgacgaatgatggcaccacgaccatcgccaataaccttaccagcacggttcaggtctttacggactcggaataccagctcccgtacgtcctcggctctgcgcaccagggctgcctgcctccgttcccggcggacgtcttcatgattcctcagtacgggtacctgactctgaacaatggcagtcaggccgtgggccgttcctccttctactgcctggagtactttccttctcaaatgctgagaacgggcaacaactttgagttcagctacacgtttgaggacgtgccttttcacagcagctacgcgcacagccaaagcctggaccggctgatgaaccccctcatcgaccagtacctgtactacctgtctcggactcagaccacgggaggtaccgcaggaaatcggacgttgcaattttctcaggccgggcctagtagcatggcgaatcaggccaaaaactggctacccgggccctgctaccggcagcaacgcgtctccaagacaacgaatcaaaataacaacagcaactttgcctggaccggtgccaccaagtatcatctgaatggcagagactctctggtaaatcccggtgtcgctatggcaacccacaaggacgacgaagaccgattttttccgtccagcggagtcttaatatttgggaaacagggagctggaaatgacaacgtggaccttgacaacgttatgataaccagtgaggaagaaattaaaaccaccaacccagtggccacagaagagtacggcgtggtggccactaacctgcaatcggcaaacaccgctcctcaaacagggaccgtcaacagtcaaggagccttacctggcatggtctggcagaaccgggacgtgtacctgcagggtcctatctgggccaagattcctcacacggacggaaactttcatccctcgccgctgatgggaggctttggactgaaacacccgcctcctcagatcctgattaagaatacacctgttcccgcgaatcctccaactaccttcagtccagctaagtttgcgtcgttcatcacgcagtacagcaccggacaggtcagcgtggaaattgaatgggagctgcagaaagaaaacagcaaacgctggaacccagagattcaatacacttccaactacaacaaatctacaaatgtggactttgctgttgacacagaaggcgtttattctgagcctcgccccatcggcacccgttacctcacccgtaatctg

SEQ ID NO: 1899 - protein, 738 aa, Artificial Sequence
  Description of Artificial Sequence: Synthetic polypeptide
MAADGYLPDWLEDNLSEGIREWWDLKPGAPKPKANQQKQDDGRGLVLPGYKYLGPFNGLDKGEPVNAADAAALEHDKAYDQQLKAGDNPYLRYNHADAEFQERLQEDTSFGGNLGRAVFQAKKRVLEPLGLVEEGAKTAPGKKRPVEQSPQREPDSSTGIGKKGQQPAKKRLNFGQTGDSESVPDPQPLGEPPAAPSGVGSNTMAAGGGAPMADNNEGADGVGNSSGNWHCDSTWLGDRVITTSTRTWALPTYNNHLYKQISNGTSGGSTNDNTYFGYSTPWGYFDFNRFHCHFSPRDWQRLINNNWGFRPKRLNFKLFNIQVKEVTTNEGTKTIANNLTSTVQVFTDSEYQLPYVLGSAHQGCLPPFPADVFMIPQYGYLTLNNGSQAVGRSSFYCLEYFPSQMLRTGNNFQFSYTFEDVPFHSSYAHSQSLDRLMNPLIDQYLYYLSRTQTTGGTAGTQTLQFSQAGPSSMANQAKNWLPGPCYRQQRVSTTTNQNNNSNFAWTGATKYHLNGRDSLVNPGVAMATHKDDEDRFFPSSGVLIFGKQGAGNDNVDYSNVMITSEEEIKTTNPVATEEYGVVATNLQSANTAPQTGTVNSQGALPGMVWQNRDVYLQGPIWAKIPHTDGNFHPSPLMGGFGLKHPPPQILIKNTPVPADPPTTFNQAKLNSFITQYSTGQVSVEIEWELQKENSKRWNPEIQYTSNYYKSTNVDFAVNTEGVYSEPRPIGTRYLTRNL

SEQ ID NO: 1900 - DNA, 2214 bp, Artificial Sequence
  Description of Artificial Sequence: Synthetic polynucleotide
atggctgccgatggttatcttccagattggctcgaggacaacctctctgagggcattcgcgagtggtgggacctgaaacctggagccccgaaacccaaagccaaccagcaaaagcaggacgacggccggggtctggtgcttcctggctacaagtacctcggacccttcaacggactcgacaagggggagcccgtcaacgcggcggacgcagcggccctcgagcacgacaaggcctacgaccagcagctcaaagcgggtgacaatccgtacctgcggtataatcacgccgacgccgagtttcaggagcgtctgcaagaagatacgtcttttgggggcaacctcgggcgagcagtcttccaggccaagaagcgggttctcgaacctctcggtctggttgaggaaggcgctaagacggctcctggaaagaagagaccggtagagcagtcaccacagcgtgagcccgactcctccacgggcatcggcaagaaaggccagcagcccgccaaaaagagactcaatttcggtcagactggcgactcagagtcagtccccgaccctcaacctctcggagaacctccagcagcgccctctggtgtgggatctaatacaatggctgcaggcggtggcgcaccaatggcagacaataacgaaggtgccgacggagtgggtaattcctcgggaaattggcattgcgattccacatggctgggcgacagagtcatcaccaccagcacccgaacctgggccctgcccacctacaacaaccacctctacaagcaaatctccaacgggacctcgggaggcagcaccaacgacaacacctactttggctacagcaccccctgggggtattttgactttaacagattccactgccacttctcaccacgtgactggcagcgactcatcaacaacaactggggattccggcccaagagactcaacttcaagctcttcaacatccaggtcaaagaggtcacgacgaatgaaggcaccaagaccatcgccaataacctcaccagcaccgtccaggtgtttacggactcggaataccagctgccgtacgtcctcggctctgcccaccagggctgcctgcctccgttcccggcggacgtcttcatgattcctcagtacggctacctgactctcaacaacggtagtcaggccgtgggacgttcctccttctactgcctggagtacttcccctctcagatgctgagaacgggcaacaactttcaattcagctacactttcgaggacgtgcctttccacagcagctacgcgcacagccagagtttggacaggctgatgaatcctctcatcgaccagtacctgtactacctgtcaagaacccagactacgggaggcacagcgggaacccagacgttgcagttttctcaggccgggcctagcagcatggcgaatcaggccaaaaactggctgcctggaccctgctacagacagcagcgcgtctccacgacaacgaatcaaaacaacaacagcaactttgcctggactggtgccaccaagtatcatctgaacggcagagactctctggtgaatccgggcgtcgccatggcaacccacaaggacgacgaggaccgcttcttcccatccagcggcgtcctcatatttggcaagcagggagctggaaatgacaacgtggactatagcaacgtgatgataaccagcgaggaagaaatcaagaccaccaaccccgtggccacagaagagtatggcgtggtggctactaacctacagtcggcaaacaccgctcctcaaacggggaccgtcaacagccagggagccttacctggcatggtctggcagaaccgggacgtgtacctgcagggtcctatttgggccaagattcctcacacagatggcaactttcacccgtctcctttaatgggcggctttggacttaaacatccgcctcctcagatcctcatcaaaaacactcctgttcctgcggatcctccaacaacgttcaaccaggccaagctgaattctttcatcacgcagtacagcaccggacaagtcagcgtggagatcgagtgggagctgcagaaggagaacagcaagcgctggaacccagagattcagtatacttccaactactacaaatctacaaatgtggactttgctgttaatactgagggtgtttactctgagcctcgccccattggcactcgttacctcacccgtaatctg

SEQ ID NO: 1901 - protein, 738 aa, Artificial Sequence
  Description of Artificial Sequence: Synthetic polypeptide
MAADGYLPDWLEDNLSEGIREWWDLKPGAPKPKANQQKQDDGRGLVLPGYKYLGPFNGLDKGEPVNAADAAALEHDKAYDQQLKAGDNPYLRYNHADAEFQERLQEDTSFGGNLGRAVFQAKKRVLEPLGLVEEGAKTAPGKKRPVEQSPQREPDSSTGIGKKGQQPARKRLNFGQTGDSESVPDPQPLGEPPAAPSGVGSNTMAAGGGAPMADNNEGADGVGSSSGNWHCDSTWLGDRVITTSTRTWALPTYNNHLYKQISNGTSGGSTNDNTYFGYSTPWGYFDFNRFHCHFSPRDWQRLINNNWGFRPKRLNFKLFNIQVKEVTQNEGTKTIANNLTSTIQVFTDSEYQLPYVLGSAHQGCLPPFPADVFMIPQYGYLTLNNGSQAVGRSSFYCLEYFPSQMLRTGNNFQFSYTFEDVPFHSSYAHSQSLDRLMNPLIDQYLYYLSRTQTTGGTAGTQTLQFSQAGPSNMANQAKNWLPGPCYRQQRVSTTTSQNNNSNFAWTGATKYHLNGRDSLVNPGVAMATHKDDEDRFFPSSGILIFGKQGAGKDNVDYSNVMLTSEEEIKTTNPVATEEYGVVADNLQQQNTAPQIGTVNSQGALPGMVWQNRDVYLQGPIWAKIPHTDGNFHPSPLMGGFGLKHPPPQILIKNTPVPADPPTTFNQAKLNSFITQYSTGQVSVEIEWELQKENSKRWNPEIQYTSNYYKSTNVDFAVNTEGVYSEPRPIGTRYLTRNL

SEQ ID NO: 1902 - DNA, 2214 bp, Artificial Sequence
  Description of Artificial Sequence: Synthetic polynucleotide
atggctgccgatggttatcttccagattggctcgaggacaacctctctgagggcattcgcgagtggtgggacctgaaacctggagccccgaaacccaaagccaaccagcaaaagcaggacgacggccggggtctggtgcttcctggctacaagtacctcggacccttcaacggactcgacaagggggagcccgtcaacgcggcggacgcagcggccctcgagcacgacaaggcctacgaccagcagctcaaagcgggtgacaatccgtacctgcggtataatcacgccgacgccgagtttcaggagcgtctgcaagaagatacgtcttttgggggcaacctcgggcgagcagtcttccaggccaagaagcgggttctcgaacctctcggtctggttgaggaaggcgctaagacggctcctggaaagaagagaccggtagagcagtcaccacagcgtgagcccgactcctccacgggcatcggcaagaaaggccagcagcccgccagaaagagactcaatttcggtcagactggcgactcagagtcagtccccgaccctcaacctctcggagaacctccagcagcgccctctggtgtgggatctaatacaatggctgcaggcggtggcgcaccaatggcagacaataacgaaggtgccgacggagtgggtagttcctcgggaaattggcattgcgattccacatggctgggcgacagagtcatcaccaccagcacccgaacctgggccctgcccacctacaacaaccacctctacaagcaaatctccaacgggacctcgggaggcagcaccaacgacaacacctactttggctacagcaccccctgggggtattttgactttaacagattccactgccacttctcaccacgtgactggcagcgactcatcaacaacaactggggattccggcccaagagactcaacttcaagctcttcaacatccaggtcaaagaggtcacgcagaatgaaggcaccaagaccatcgccaataacctcaccagcaccatccaggtgtttacggactcggaataccagctgccgtacgtcctcggctctgcccaccagggctgcctgcctccgttcccggcggacgtcttcatgattcctcagtacggctacctgactctcaacaacggtagtcaggccgtgggacgttcctccttctactgcctggagtacttcccctctcagatgctgagaacgggcaacaactttcaattcagctacactttcgaggacgtgcctttccacagcagctacgcgcacagccagagtttggacaggctgatgaatcctctcatcgaccagtacctgtactacctgtcaagaacccagactacgggaggcacagcgggaacccagacgttgcagttttctcaggccgggcctagcaacatggcgaatcaggccaaaaactggctgcctggaccctgctacagacagcagcgcgtctccacgacaacgtcgcaaaacaacaacagcaactttgcctggactggtgccaccaagtatcatctgaacggcagagactctctggtgaatccgggcgtcgccatggcaacccacaaggacgacgaggaccgcttcttcccatccagcggcatcctcatatttggcaagcagggagctggaaaagacaacgtggactatagcaacgtgatgctaaccagcgaggaagaaatcaagaccaccaaccccgtggccacagaagagtatggcgtggtggctgataacctacagcagcaaaacaccgctcctcaaatagggaccgtcaacagccagggagccttacctggcatggtctggcagaaccgggacgtgtacctgcagggtcctatttgggccaagattcctcacacagatggcaactttcacccgtctcctttaatgggcggctttggacttaaacatccgcctcctcagatcctcatcaaaaacactcctgttcctgcggatcctccaacaacgttcaaccaggccaagctgaattctttcatcacgcagtacagcaccggacaagtcagcgtggagatcgagtgggagctgcagaaggagaacagcaagcgctggaacccagagattcagtatacttccaactactacaaatctacaaatgtggactttgctgttaatactgagggtgtttactctgagcctcgccccattggcactcgttacctcacccgtaatctg

SEQ ID NO: 1903 - protein, 738 aa, Artificial Sequence
  Description of Artificial Sequence: Synthetic polypeptide
MAADGYLPDWLEDNLSEGIREWWDLKPGAPKPKANQQKQDDGRGLVLPGYKYLGPFNGLDKGEPVNAADAAALEHDKAYDQQLKAGDNPYLRYNHADAEFQERLQEDTSFGGNLGRAVFQAKKRVLEPLGLVEEGAKTAPGKKRPVEPSPQRSPDSSTGIGKKGQQPARKRLNFGQTGDSESVPDPQPIGEPPAAPSGVGSGTMAAGGGAPMADNNEGADGVGSSSGNWHCDSTWLGDRVITTSTRTWALPTYNNHLYKQISNGTSGGSTNDNTYFGYSTPWGYFDFNRFHCHFSPRDWQRLINNNWGFRPKRLNFKLFNIQVKEVTQNEGTKTIANNLTSTIQVFTDSEYQLPYVLGSAHQGCLPPFPADVFMIPQYGYLTLNNGSQAVGRSSFYCLEYFPSQMLRTGNNFEFSYTFEDVPFHSSYAHSQSLDRLMNPLIDQYLYYLSRTQSTGGTAGTQQLLFSQAGPSNMSAQAKNWLPGPCYRQQRVSTTLSQNNNSNFAWTGATKYHLNGRDSLVNPGVAMATHKDDEDRFFPSSGILMFGKQGAGKDNVDYSNVMLTSEEEIKTTNPVATEQYGVVADNLQQQNTAPIVGAVNSQGALPGMVWQNRDVYLQGPIWAKIPHTDGNFHPSPLMGGFGLKHPPPQILIKNTPVPADPPTTFNQAKLNSFITQYSTGQVSVEIEWELQKENSKRWNPEIQYTSNYYKSTNVDFAVNTEGVYSEPRPIGTRYLTRNL

SEQ ID NO: 1904 - DNA, 2214 bp, Artificial Sequence
  Description of Artificial Sequence: Synthetic polynucleotide
atggctgccgatggttatcttccagattggctcgaggacaacctctctgagggcattcgcgagtggtgggacctgaaacctggagccccgaaacccaaagccaaccagcaaaagcaggacgacggccggggtctggtgcttcctggctacaagtacctcggacccttcaacggactcgacaagggggagcccgtcaacgcggcggacgcagcggccctcgagcacgacaaggcctacgaccagcagctcaaagcgggtgacaatccgtacctgcggtataatcacgccgacgccgagtttcaggagcgtctgcaagaagatacgtcttttgggggcaacctcgggcgagcagtcttccaggccaagaagcgggttctcgaacctctcggtctggttgaggaaggcgctaagacggctcctggaaagaagagaccggtagagccgtcaccacagcgttcccccgactcctccacgggcatcggcaagaaaggccagcagcccgccagaaagagactcaatttcggtcagactggcgactcagagtcagtccccgaccctcaacctatcggagaacctccagcagcgccctctggtgtgggatctggtacaatggctgcaggcggtggcgcaccaatggcagacaataacgaaggtgccgacggagtgggtagttcctcgggaaattggcattgcgattccacatggctgggcgacagagtcatcaccaccagcacccgaacctgggccctgcccacctacaacaaccacctctacaagcaaatctccaacgggacctcgggaggcagcaccaacgacaacacctactttggctacagcaccccctgggggtattttgactttaacagattccactgccacttctcaccacgtgactggcagcgactcatcaacaacaactggggattccggcccaagagactcaacttcaagctcttcaacatccaggtcaaagaggtcacgcagaatgaaggcaccaagaccatcgccaataacctcaccagcaccatccaggtgtttacggactcggaataccagctgccgtacgtcctcggctctgcccaccagggctgcctgcctccgttcccggcggacgtcttcatgattcctcagtacggctacctgactctcaacaacggtagtcaggccgtgggacgttcctccttctactgcctggagtacttcccctctcagatgctgagaacgggcaacaactttgagttcagctacactttcgaggacgtgcctttccacagcagctacgcgcacagccagagtttggacaggctgatgaatcctctcatcgaccagtacctgtactacctgtcaagaacccagtctacgggaggcacagcgggaacccagcagttgctgttttctcaggccgggcctagcaacatgtcggctcaggccaaaaactggctgcctggaccctgctacagacagcagcgcgtctccacgacactgtcgcaaaacaacaacagcaactttgcctggactggtgccaccaagtatcatctgaacggcagagactctctggtgaatccgggcgtcgccatggcaacccacaaggacgacgaggaccgcttcttcccatccagcggcatcctcatgtttggcaagcagggagctggaaaagacaacgtggactatagcaacgtgatgctaaccagcgaggaagaaatcaagaccaccaaccccgtggccacagaacagtatggcgtggtggctgataacctacagcagcaaaacaccgctcctattgtgggggccgtcaacagccagggagccttacctggcatggtctggcagaaccgggacgtgtacctgcagggtcctatttgggccaagattcctcacacagatggcaactttcacccgtctcctttaatgggcggctttggacttaaacatccgcctcctcagatcctcatcaaaaacactcctgttcctgcggatcctccaacaacgttcaaccaggccaagctgaattctttcatcacgcagtacagcaccggacaagtcagcgtggagatcgagtgggagctgcagaaggagaacagcaagcgctggaacccagagattcagtatacttccaactactacaaatctacaaatgtggactttgctgttaatactgagggtgtttactctgagcctcgccccattggcactcgttacctcacccgtaatctg

SEQ ID NO: 1905 - protein, 738 aa, Artificial Sequence
  Description of Artificial Sequence: Synthetic polypeptide
MAADGYLPDWLEDNLSEGIREWWDLKPGAPKPKANQQKQDDGRGLVLPGYKYLGPFNGLDKGEPVNAADAAALEHDKAYDQQLKAGDNPYLRYNHADAEFQERLQEDTSFGGNLGRAVFQAKKRVLEPLGLVEEGAKTAPGKKRPVEPSPQRSPDSSTGIGKKGQQPAKKRLNFGQTGDSESVPDPQPIGEPPAGPSGLGSGTMAAGGGAPMADNNEGADGVGSSSGNWHCDSTWLGDRVITTSTRTWALPTYNNHLYKQISNGTSGGSTNDNTYFGYSTPWGYFDFNRFHCHFSPRDWQRLINNNWGFRPKRLNFKLFNIQVKEVTQNEGTKTIANNLTSTIQVFTDSEYQLPYVLGSAHQGCLPPFPADVFMIPQYGYLTLNNGSQAVGRSSFYCLEYFPSQMLRTGNNFEFSYTFEDVPFHSSYAHSQSLDRLMNPLIDQYLYYLSRTQSTGGTAGTQQLLFSQAGPSNMSAQAKNWLPGPCYRQQRVSTTLSQNNNSNFAWTGATKYHLNGRDSLVNPGVAMATHKDDEERFFPSSGVLMFGKQGAGKDNVDYSSVMLTSEEEIKTTNPVATEQYGVVADNLQQQNTAPIVGAVNSQGALPGMVWQNRDVYLQGPIWAKIPHTDGNFHPSPLMGGFGLKHPPPQILIKNTPVPADPPTTFSQAKLASFITQYSTGQVSVEIEWELQKENSKRWNPEIQYTSNYYKSTNVDFAVNTEGTYSEPRPIGTRYLTRNL

SEQ ID NO: 1906 - DNA, 2214 bp, Artificial Sequence
  Description of Artificial Sequence: Synthetic polynucleotide
atggctgccgatggttatcttccagattggctcgaggacaacctctctgagggcattcgcgagtggtgggacttgaaacctggagccccgaaacccaaagccaaccagcaaaagcaggacgacggccggggtctggtgcttcctggctacaagtacctcggacccttcaacggactcgacaagggggagcccgtcaacgcggcggacgcagcggccctcgagcacgacaaggcctacgaccagcagctcaaagcgggtgacaatccgtacctgcggtataaccacgccgacgccgagtttcaggagcgtctgcaagaagatacgtcttttgggggcaacctcgggcgagcagtcttccaggccaagaagcgggttctcgaacctctcggtctggttgaggaaggcgctaagacggctcctggaaagaagagaccggtagagccatcaccccagcgttctccagactcctctacgggcatcggcaagaaaggccagcagcccgcgaaaaagagactcaactttgggcagactggcgactcagagtcagtgcccgaccctcaaccaatcggagaaccccccgcaggcccctctggtctgggatctggtacaatggctgcaggcggtggcgctccaatggcagacaataacgaaggcgccgacggagtgggtagttcctcaggaaattggcattgcgattccacatggctgggcgacagagtcatcaccaccagcacccgaacctgggccctccccacctacaacaaccacctctacaagcaaatctccaacgggacttcgggaggaagcaccaacgacaacacctacttcggctacagcaccccctgggggtattttgactttaacagattccactgccacttctcaccacgtgactggcagcgactcatcaacaacaactggggattccggcccaagagactcaacttcaagctcttcaacatccaggtcaaggaggtcacgcagaatgaaggcaccaagaccatcgccaataaccttaccagcacgattcaggtctttacggactcggaataccagctcccgtacgtcctcggctctgcgcaccagggctgcctgcctccgttcccggcggacgtcttcatgattcctcagtacgggtacctgactctgaacaatggcagtcaggccgtgggccgttcctccttctactgcctggagtactttccttctcaaatgctgagaacgggcaacaactttgagttcagctacacgtttgaggacgtgccttttcacagcagctacgcgcacagccaaagcctggaccggctgatgaaccccctcatcgaccagtacctgtactacctgtctcggactcagtccacgggaggtaccgcaggaactcagcagttgctattttctcaggccgggcctagtaacatgtcggctcaggccaaaaactggctacccgggccctgctaccggcagcaacgcgtctccacgacactgtcgcaaaataacaacagcaactttgcctggaccggtgccaccaagtatcatctgaatggcagagactctctggtaaatcccggtgtcgctatggcaacccacaaggacgacgaagagcgattttttccgtccagcggagtcttaatgtttgggaaacagggagctggaaaagacaacgtggactatagcagcgttatgctaaccagtgaggaagaaattaaaaccaccaacccagtggccacagaacagtacggcgtggtggccgataacctgcaacagcaaaacaccgctcctattgtaggggccgtcaacagtcaaggagccttacctggcatggtctggcagaaccgggacgtgtacctgcagggtcctatctgggccaagattcctcacacggacggaaactttcatccctcgccgctgatgggaggctttggactgaaacacccgcctcctcagatcctgattaagaatacacctgttcccgcggatcctccaactaccttcagtcaagctaagctggcgtcgttcatcacgcagtacagcaccggacaggtcagcgtggaaattgaatgggagctgcagaaagaaaacagcaaacgctggaacccagagattcaatacacttccaactactacaaatctacaaatgtggactttgctgttaacacagaaggcacttattctgagcctcgccccatcggcacccgttacctcacccgtaatctg

SEQ ID NO: 1907 - protein, 737 aa, Artificial Sequence
  Description of Artificial Sequence: Synthetic polypeptide
MAADGYLPDWLEDNLSEGIREWWDLKPGAPKPKANQQKQDDGRGLVLPGYKYLGPFNGLDKGEPVNAADAAALEHDKAYDQQLKAGDNPYLRYNHADAEFQERLQEDTSFGGNLGRAVFQAKKRVLEPLGLVEEGAKTAPGKKRPVEPSPQRSPDSSTGIGKKGQQPAKKRLNFGQTGDSESVPDPQPLGEPPAAPSGVGSGTMAAGGGAPMADNNEGADGVGNASGNWHCDSTWLGDRVITTSTRTWALPTYNNHLYKQISSQSAGSTNDNTYFGYSTPWGYFDFNRFHCHFSPRDWQRLINNNWGFRPKKLRFKLFNIQVKEVTTNDGVTTIANNLTSTVQVFSDSEYQLPYVLGSAHQGCLPPFPADVFMIPQYGYLTLNNGSQSVGRSSFYCLEYFPSQMLRTGNNFEFSYTFEDVPFHSSYAHSQSLDRLMNPLIDQYLYYLARTQSTTGGTAGNRELQFYQAGPSTMAEQAKNWLPGPCYRQQRVSKTLDQNNNSNFAWTGATKYHLNGRNSLVNPGVAMATHKDDEDRFFPSSGVLIFGKTGAANKTTLENVLMTNEEEIKTTNPVATEEYGVVSSNLQSANTAPQTQTVNSQGALPGMVWQNRDVYLQGPIWAKIPHTDGNFHPSPLMGGFGLKHPPPQILIKNTPVPANPPEVFTPAKFASFITQYSTGQVSVEIEWELQKENSKRWNPEIQYTSNYDKSTNVDFAVDSEGVYSEPRPIGTRYLTRNL

SEQ ID NO: 1908 - DNA, 2211 bp, Artificial Sequence
  Description of Artificial Sequence: Synthetic polynucleotide
atggctgccgatggttatcttccagattggctcgaggacaacctctctgagggcattcgcgagtggtgggacctgaaacctggagccccgaaacccaaagccaaccagcaaaagcaggacgacggccggggtctggtgcttcctggctacaagtacctcggacccttcaacggactcgacaagggggagcccgtcaacgcggcggacgcagcggccctcgagcacgacaaggcctacgaccagcagctcaaagcgggtgacaatccgtacctgcggtataaccacgccgacgccgagtttcaggagcgtctgcaagaagatacgtcatttgggggcaacctcgggcgagcagtcttccaggccaagaagcgggttctcgaacctctcggtctggttgaggaaggcgctaagacggctcctggaaagaagagaccggtagagccgtcacctcagcgttcccccgactcctccacgggcatcggcaagaaaggccagcagcccgccaaaaagagactcaatttcggtcagactggcgactcagagtcagtccccgaccctcaacctctcggagaacctccagcagcgccctctggtgtgggatctggtacaatggctgcaggcggtggcgcaccaatggcagacaataacgaaggtgccgacggagtgggtaatgcctcaggaaattggcattgcgattccacatggctgggcgacagagtcattaccaccagcacccgaacctgggccctgcccacctacaacaaccacctctacaagcaaatctccagtcaaagtgcaggtagtaccaacgacaacacctacttcggctacagcaccccctgggggtattttgactttaacagattccactgccacttctcaccacgtgactggcagcgactcatcaacaacaactggggattccggcccaagaagctgcggttcaagctcttcaacatccaggtcaaggaggtcacgacgaatgacggcgttacgaccatcgctaataaccttaccagcacggttcaggtattctcggactcggaataccagctgccgtacgtcctcggctctgcgcaccagggctgcctgcctccgttcccggcggacgtcttcatgattcctcagtacggctacctgactctcaacaatggcagtcagtctgtgggacgttcctccttctactgcctggagtacttcccctctcagatgctgagaacgggcaacaactttgagttcagctacaccttcgaggacgtgcctttccacagcagctacgcacacagccagagcctggaccggctgatgaatcccctcatcgaccagtacttgtactacctggccagaacacagagtaccacaggaggcacagctggcaatcgggaactgcagttttaccaggccgggccttcaactatggccgaacaagccaagaattggttacctggaccttgctaccggcaacaaagagtctccaaaacgctggatcaaaacaacaacagcaactttgcttggactggtgccaccaaatatcacctgaacggcagaaactcgttggttaatcccggcgtcgccatggcaactcacaaggacgacgaggaccgctttttcccatccagcggagtcctgatttttggaaaaactggagcagctaacaaaactacattggaaaatgtgttaatgacaaatgaagaagaaattaaaactactaatcctgtagccacggaagaatacggggtagtcagcagcaacttacaatcggctaatactgcaccccagacacaaactgtcaacagccagggagccttacctggcatggtctggcagaaccgggacgtgtacctgcagggtcccatctgggccaagattcctcacacggatggcaactttcacccgtctcctttgatgggcggctttggacttaaacatccgcctcctcagatcctgatcaagaacactcccgttcccgctaatcctccggaggtgtttactcctgccaagtttgcttcgttcatcacacagtacagcaccggacaagtcagcgtggaaatcgagtgggagctgcagaaggaaaacagcaagcgctggaacccggagattcagtacacctccaactatgataagtcgactaatgtggactttgccgttgacagcgagggtgtttactctgagcctcgccctattggcactcgttacctcacccgtaatctg

SEQ ID NO: 1909 - protein, 735 aa, Artificial Sequence
  Description of Artificial Sequence: Synthetic polypeptide
MAADGYLPDWLEDNLSEGIREWWDLKPGAPKPKANQQKQDDGRGLVLPGYKYLGPFNGLDKGEPVNAADAAALEHDKAYDQQLKAGDNPYLRYNHADAEFQERLQEDTSFGGNLGRAVFQAKKRVLEPLGLVEEGAKTAPGKKRPVEQSPQEPDSSSGIGKSGQQPAKKRLNFGQTGDSESVPDPQPLGEPPAAPSGVGSNTMASGGGAPMADNNEGADGVGNASGNWHCDSTWLGDRVITTSTRTWALPTYNNHLYKQISSQSGASNDNHYFGYSTPWGYFDFNRFHCHFSPRDWQRLINNNWGFRPKRLNFKLFNIQVKEVTTNDGTTTIANNLTSTVQVFTDSEYQLPYVLGSAHQGCLPPFPADVFMIPQYGYLTLNNGSQAVGRSSFYCLEYFPSQMLRTGNNFTFSYTFEDVPFHSSYAHSQSLDRLMNPLIDQYLYYLSRTQTTSGTAQNRELQFSQAGPSSMANQAKNWLPGPCYRQQRVSKTANDNNNSNFAWTGATKYHLNGRDSLVNPGPAMASHKDDEDKFFPMSGVLIFGKQGAGASNVDLDNVMITDEEEIKTTNPVATEQYGTVATNLQSSNTAPATGTVNSQGALPGMVWQDRDVYLQGPIWAKIPHTDGHFHPSPLMGGFGLKHPPPQILIKNTPVPANPPTTFSPAKFASFITQYSTGQVSVEIEWELQKENSKRWNPEIQYTSNYNKSANVDFTVDTNGVYSEPRPIGTRYLTRNL

SEQ ID NO: 1910 - DNA, 2205 bp, Artificial Sequence
  Description of Artificial Sequence: Synthetic polynucleotide
atggctgccgatggttatcttccagattggctcgaggacaacctctctgagggcattcgcgagtggtgggacttgaaacctggagccccgaaacccaaagccaaccagcaaaagcaggacgacggccggggtctggtgcttcctggctacaagtacctcggacccttcaacggactcgacaagggggagcccgtcaacgcggcggatgcagcggccctcgagcacgacaaggcctacgaccagcagctcaaagcgggtgacaatccgtacctgcggtataaccacgccgacgccgagtttcaggagcgtctgcaagaagatacgtcttttgggggcaacctcgggcgagcagtcttccaggccaagaagagggttctcgaacctcttggtctggttgaggaaggtgctaagacggctcctggaaagaaacgtccggtagagcagtcgccacaagagccagactcctcctcgggcattggcaagtcaggccagcagcccgctaaaaagagactcaattttggtcagactggcgactcagagtcagtccccgacccacaacctctcggagaacctccagcagccccctctggtgtgggatctaatacaatggcttcaggcggtggcgcaccaatggcagacaataacgaaggcgccgacggagtgggtaatgcctcaggaaattggcattgcgattccacatggctgggcgacagagtcatcaccaccagcacccgaacatgggccttgcccacctataacaaccacctctacaagcaaatctccagtcaatcaggggccagcaacgacaaccactacttcggctacagcaccccctgggggtattttgatttcaacagattccactgccatttctcaccacgtgactggcagcgactcatcaacaacaattggggattccggcccaagagactcaacttcaagctcttcaacatccaagtcaaggaggtcacgacgaatgatggcaccacgaccatcgctaataaccttaccagcacggttcaagtcttcacggactcggagtaccagttgccgtacgtcctcggctctgcgcaccagggctgcctccctccgttcccggcggacgtgttcatgattccgcagtacggctacctaacgctcaacaatggcagccaggcagtgggacggtcatccttttactgcctggaatatttcccatcgcagatgctgagaacgggcaataactttaccttcagctacaccttcgaggacgtgcctttccacagcagctacgcgcacagccagagcctggaccggctgatgaatcctctcatcgaccagtacctgtattacctgagcagaactcagactacgtccggaactgcccaaaacagggagttgcagtttagccaggcgggtccatctagcatggctaatcaggccaaaaactggctacctggaccctgttaccggcagcagcgcgtttctaaaacagcaaatgacaacaacaacagcaactttgcctggactggtgctacaaaatatcaccttaatgggcgtgattctttagtcaaccctggccctgctatggcctcacacaaagacgacgaagacaagttctttcccatgagcggtgtcttgatttttggaaagcagggcgccggagcttcaaacgttgatttggacaatgtcatgatcacagacgaagaggaaatcaaaaccactaaccccgtggccaccgaacaatatgggactgtggcaaccaatctccagagcagcaacacagcccctgcgaccggaactgtgaattctcagggagccttacctggaatggtgtggcaagacagagacgtatacctgcagggtcctatttgggccaaaattcctcacacggatggacactttcacccgtctcctctcatgggcggctttggacttaagcacccgcctcctcagatcctcatcaaaaacacgcctgttcctgcgaatcctccgacaacgttttcgcctgcaaagtttgcttcattcatcacccagtattccacaggacaagtgagcgtggagattgaatgggagctgcagaaagaaaacagcaaacgctggaatcccgaaatacagtatacatctaactataataaatctgccaacgttgatttcactgtggacaccaatggagtttatagtgagcctcgccccattggcacccgttacctcacccgtaacctg

SEQ ID NO: 1911 - protein, 735 aa, Artificial Sequence
  Description of Artificial Sequence: Synthetic polypeptide
MAADGYLPDWLEDNLSEGIREWWDLKPGAPQPKANQQHQDDGRGLVLPGYKYLGPFNGLDKGEPVNEADAAALEHDKAYDQQLKAGDNPYLKYNHADAEFQERLQEDTSFGGNLGRAVFQAKKRVLEPLGLVEEAAKTAPGKKRPVEQSPQEPDSSSGIGKSGQQPARKRLNFGQTGDSESVPDPQPLGEPPAAPSGVGSNTMASGGGAPMADNNEGADGVGNSSGNWHCDSTWLGDRVITTSTRTWALPTYNNHLYKQISSQSGASNDNHYFGYSTPWGYFDFNRFHCHFSPRDWQRLINNNWGFRPKKLNFKLFNIQVKEVTQNDGTTTIANNLTSTVQVFTDSEYQLPYVLGSAHQGCLPPFPADVFMIPQYGYLTLNNGSQAVGRSSFYCLEYFPSQMLRTGNNFTFSYTFEDVPFHSSYAHSQSLDRLMNPLIDQYLYYLSRTQTTSGTTQQSRLQFSQAGPSSMAQQAKNWLPGPCYRQQRVSKTANDNNNSNFAWTGATKYHLNGRDSLVNPGPAMASHKDDEEKFFPMHGVLIFGKQGTGASNVDLDNVMITDEEEIRTTNPVATEQYGTVATNLQSSNTAPATGTVNSQGALPGMVWQDRDVYLQGPIWAKIPHTDGHFHPSPLMGGFGLKHPPPQILIKNTPVPANPPTTFSPAKFASFITQYSTGQVSVEIEWELQKENSKRWNPEIQYTSNYNKSVNVDFTVDTNGVYSEPRPIGTRYLTRNL

SEQ ID NO: 1912 - DNA, 2205 bp, Artificial Sequence
  Description of Artificial Sequence: Synthetic polynucleotide
atggctgctgacggttatcttccagattggctcgaggacaacctttctgaaggcattcgtgagtggtgggatctgaaacctggagcccctcaacccaaagcgaaccaacaacaccaggacgacggtcggggtcttgtgcttccgggttacaaatacctcggaccctttaacggactcgacaaaggagagccggtcaacgaggcggacgcggcagccctcgaacacgacaaagcttacgaccagcagctcaaggccggtgacaacccgtacctcaagtacaaccacgccgacgccgagtttcaggagcgtcttcaagaagatacgtcttttgggggcaaccttggcagagcagtcttccaggccaaaaagagggtccttgagcctcttggtctggttgaggaagcagctaaaacggctcctggaaagaagaggcctgtagaacagtctcctcaggaaccggactcatcatctggtattggcaaatcgggccaacagcctgccagaaaaagactaaatttcggtcagactggagactcagagtcagtcccagaccctcaacctctcggagaaccaccagcagccccctcaggtgtgggatctaatacaatggcttcaggcggtggcgcaccaatggcagacaataacgagggtgccgatggagtgggtaattcctcaggaaattggcattgcgattccacatggctgggcgacagagtcatcaccaccagcaccagaacctgggccctgcccacttacaacaaccatctctacaagcaaatctccagccaatcaggagcttcaaacgacaaccactactttggctacagcaccccttgggggtattttgactttaacagattccactgccacttctcaccacgtgactggcagcgactcattaacaacaactggggattccggcccaagaaactcaacttcaagctcttcaacatccaagttaaagaggtcacgcagaacgatggcacgacgactattgccaataaccttaccagcacggttcaagtgtttacggactcggagtatcagctcccgtacgtgctcgggtcggcgcaccaaggctgtctcccgccgtttccagcggacgtcttcatgatccctcagtatggatacctcaccctgaacaacggaagtcaagcggtgggacgctcatccttttactgcctggagtacttcccttcgcagatgctaaggactggaaataacttcacattcagctataccttcgaggatgtaccttttcacagcagctacgctcacagccagagtttggatcgcttgatgaatcctcttattgatcagtatctgtactacctgagcagaacgcaaacaacctctggaacaacccaacaatcacggctgcaatttagccaggctgggccttcgtctatggctcagcaggccaaaaattggctacctgggccctgctaccggcaacagagagtttcaaagactgctaacgacaacaacaacagtaactttgcttggacaggggccaccaaatatcatctcaatggccgcgactcgctggtgaatccaggaccagctatggccagtcacaaggacgatgaagaaaaatttttccctatgcacggcgttctaatatttggcaaacaagggacaggggcaagtaacgtagatttagataatgtaatgattacggatgaagaagagattcgtaccaccaatcctgtggcaacagagcagtatggaactgtggcaactaacttgcagagctcaaatacagctcccgcgactggaactgtcaatagtcagggggccttacctggcatggtgtggcaagatcgtgacgtgtaccttcaaggacctatctgggcaaagattcctcacacggatggacactttcatccttctcctctgatgggaggctttggactgaaacatccgcctcctcaaatcttgatcaaaaatactccggtaccggcaaatcctccgacgactttcagcccggccaagtttgcttcatttatcactcagtactccactggacaggtcagcgtggaaattgagtgggagctacagaaagaaaacagcaaacgttggaatccagagattcagtacacttccaactacaacaagtctgttaatgtggactttactgtagacactaatggtgtttatagtgaacctcgccctattggaacccggtatctcacacgaaacttg

SEQ ID NO: 1913 - protein, 736 aa, Artificial Sequence
  Description of Artificial Sequence: Synthetic polypeptide
MAADGYLPDWLEDNLSEGIREWWDLKPGAPKPKANQQKQDDGRGLVLPGYKYLGPFNGLDKGEPVNAADAAALEHDKAYDQQLKAGDNPYLRYNHADAEFQERLQEDTSFGGNLGRAVFQAKKRVLEPLGLVEEGAKTAPGKKRPVEQSPQEPDSSSGIGKKGQQPARKRLNFGQTGDSESVPDPQPLGEPPAAPSGVGSNTMAAGGGAPMADNNEGADGVGNASGNWHCDSTWLGDRVITTSTRTWALPTYNNHLYKQISSQSGGSTNDNTYFGYSTPWGYFDFNRFHCHFSPRDWQRLINNNWGFRPKRLNFKLFNIQVKEVTTNDGTTTIANNLTSTVQVFTDSEYQLPYVLGSAHQGCLPPFPADVFMIPQYGYLTLNNGSQAVGRSSFYCLEYFPSQMLRTGNNFEFSYTFEDVPFHSSYAHSQSLDRLMNPLIDQYLYYLSRTQTTSGTAGNRTLQFSQAGPSSMANQAKNWLPGPCYRQQRVSKTANQNNNSNFAWTGATKYHLNGRDSLVNPGPAMATHKDDEDKFFPMSGVLIFGKQGAGNSNVDLDNVMITNEEEIKTTNPVATEQYGTVATNLQSANTAPATGTVNSQGALPGMVWQDRDVYLQGPIWAKIPHTDGHFHPSPLMGGFGLKHPPPQILIKNTPVPANPPTTFSPAKFASFITQYSTGQVSVEIEWELQKENSKRWNPEIQYTSNYNKSTNVDFAVDTNGVYSEPRPIGTRYLTRNL

SEQ ID NO: 1914 - protein, 736 aa, Artificial Sequence
  Description of Artificial Sequence: Synthetic polypeptide
MAADGYLPDWLEDNLSEGIREWWDLKPGAPKPKANQQKQDDGRGLVLPGYKYLGPFNGLDKGEPVNAADAAALEHDKAYDQQLKAGDNPYLRYNHADAEFQERLQEDTSFGGNLGRAVFQAKKRVLEPLGLVEEGAKTAPGKKRPVEQSPQEPDSSSGIGKKGQQPAKKRLNFGQTGDSESVPDPQPLGEPPAAPSGVGSNTMASGGGAPMADNNEGADGVGNASGNWHCDSTWLGDRVITTSTRTWALPTYNNHLYKQISSQSGASTNDNTYFGYSTPWGYFDFNRFHCHFSPRDWQRLINNNWGFRPKRLNFKLFNIQVKEVTTNDGTTTIANNLTSTVQVFTDSEYQLPYVLGSAHQGCLPPFPADVFMIPQYGYLTLNNGSQAVGRSSFYCLEYFPSQMLRTGNNFQFSYTFEDVPFHSSYAHSQSLDRLMNPLIDQYLYYLSRTQTTSGTAGNRELQFSQAGPSSMANQAKNWLPGPCYRQQRVSKTTNQNNNSNFAWTGATKYHLNGRDSLVNPGPAMATHKDDEDKFFPMSGVLIFGKQGAGNSNVDLDNVMITNEEEIKTTNPVATEEYGTVATNLQSANTAPATGTVNSQGALPGMVWQNRDVYLQGPIWAKIPHTDGHFHPSPLMGGFGLKHPPPQILIKNTPVPANPPTTFSPAKFASFITQYSTGQVSVEIEWELQKENSKRWNPEIQYTSNYNKSTNVDFAVDTNGVYSEPRPIGTRYLTRNL

SEQ ID NO: 1915 - protein, 736 aa, Artificial Sequence
  Description of Artificial Sequence: Synthetic polypeptide
MAADGYLPDWLEDNLSEGIREWWDLKPGAPKPKANQQKQDDGRGLVLPGYKYLGPFNGLDKGEPVNAADAAALEHDKAYDQQLKAGDNPYLRYNHADAEFQERLQEDTSFGGNLGRAVFQAKKRVLEPLGLVEEGAKTAPGKKRPVEQSPQEPDSSSGIGKKGQQPARKRLNFGQTGDSESVPDPQPLGEPPAAPSGVGSNTMAAGGGAPMADNNEGADGVGNASGNWHCDSTWLGDRVITTSTRTWALPTYNNHLYKQISSQSGGSTNDNTYFGYSTPWGYFDFNRFHCHFSPRDWQRLINNNWGFRPKRLNFKLFNIQVKEVTTNDGTTTIANNLTSTVQVFTDSEYQLPYVLGSAHQGCLPPFPADVFMIPQYGYLTLNNGSQAVGRSSFYCLEYFPSQMLRTGNNFEFSYTFEDVPFHSSYAHSQSLDRLMNPLIDQYLYYLSRTQTTSGTAGNRELQFSQAGPSSMANQAKNWLPGPCYRQQRVSKTTNQNNNSNFAWTGATKYHLNGRDSLVNPGPAMATHKDDEDKFFPMSGVLIFGKQGAGNSNVDLDNVMITSEEEIKTTNPVATEEYGTVATNLQSSNTAPATGTVNSQGALPGMVWQERDVYLQGPIWAKIPHTDGHFHPSPLMGGFGLKHPPPQILIKNTPVPANPPTTFSPAKFASFITQYSTGQVSVEIEWELQKENSKRWNPEIQYTSNYNKSTNVDFAVDTNGVYSEPRPIGTRYLTRNL

SEQ ID NO: 1916 - protein, 736 aa, Artificial Sequence
  Description of Artificial Sequence: Synthetic polypeptide
MAADGYLPDWLEDNLSEGIREWWDLKPGAPKPKANQQKQDDGRGLVLPGYKYLGPFNGLDKGEPVNAADAAALEHDKAYDQQLKAGDNPYLRYNHADAEFQERLQEDTSFGGNLGRAVFQAKKRVLEPLGLVEEGAKTAPGKKRPVEQSPQEPDSSSGIGKKGQQPARKRLNFGQTGDSESVPDPQPLGEPPAAPSGVGSNTMASGGGAPMADNNEGADGVGNASGNWHCDSTWLGDRVITTSTRTWALPTYNNHLYKQISSQSGGSTNDNTYFGYSTPWGYFDFNRFHCHFSPRDWQRLINNNWGFRPKKLNFKLFNIQVKEVTTNDGTTTIANNLTSTVQVFTDSEYQLPYVLGSAHQGCLPPFPADVFMIPQYGYLTLNNGSQAVGRSSFYCLEYFPSQMLRTGNNFEFSYTFEDVPFHSSYAHSQSLDRLMNPLIDQYLYYLSRTQTTSGTAGNRELQFSQAGPSSMANQAKNWLPGPCYRQQRVSKTTNQNNNSNFAWTGATKYHLNGRDSLVNPGPAMATHKDDEDKFFPMSGVLIFGKQGAGNSNVDLDNVMITSEEEIKTTNPVATEEYGTVATNLQSANTAPATGTVNSQGALPGMVWQDRDVYLQGPIWAKIPHTDGHFHPSPLMGGFGLKHPPPQILIKNTPVPANPPTTFSPAKFASFITQYSTGQVSVEIEWELQKENSKRWNPEIQYTSNYNKSTNVDFAVDTNGVYSEPRPIGTRYLTRNL

SEQ ID NO: 1917 - protein, 736 aa, Artificial Sequence
  Description of Artificial Sequence: Synthetic polypeptide
MAADGYLPDWLEDNLSEGIREWWDLKPGAPKPKANQQKQDDGRGLVLPGYKYLGPFNGLDKGEPVNAADAAALEHDKAYDQQLKAGDNPYLRYNHADAEFQERLQEDTSFGGNLGRAVFQAKKRVLEPLGLVEEGAKTAPGKKRPVEQSPQEPDSSSGIGKKGQQPARKRLNFGQTGDSESVPDPQPLGEPPAAPSGVGSNTMAAGGGAPMADNNEGADGVGNASGNWHCDSTWLGDRVITTSTRTWALPTYNNHLYKQISSQSGGSTNDNTYFGYSTPWGYFDFNRFHCHFSPRDWQRLINNNWGFRPKKLNFKLFNIQVKEVTTNDGTTTIANNLTSTVQVFTDSEYQLPYVLGSAHQGCLPPFPADVFMIPQYGYLTLNNGSQAVGRSSFYCLEYFPSQMLRTGNNFQFSYTFEDVPFHSSYAHSQSLDRLMNPLIDQYLYYLSRTQTTSGTAGNRTLQFSQAGPSSMANQAKNWLPGPCYRQQRVSKTTNQNNNSNFAWTGATKYHLNGRDSLVNPGPAMATHKDDEDKFFPMSGVLIFGKQGAGNSNVDLDNVMITNEEEIKTTNPVATEEYGTVATNLQSANTAPATGTVNSQGALPGMVWQDRDVYLQGPIWAKIPHTDGHFHPSPLMGGFGLKHPPPQILIKNTPVPANPPTTFSPAKFASFITQYSTGQVSVEIEWELQKENSKRWNPEIQYTSNYNKSTNVDFAVDTNGVYSEPRPIGTRYLTRNL

SEQ ID NO: 1918 - protein, 736 aa, Artificial Sequence
  Description of Artificial Sequence: Synthetic polypeptide
MAADGYLPDWLEDNLSEGIREWWDLKPGAPKPKANQQKQDDGRGLVLPGYKYLGPFNGLDKGEPVNAADAAALEHDKAYDQQLKAGDNPYLRYNHADAEFQERLQEDTSFGGNLGRAVFQAKKRVLEPLGLVEEGAKTAPGKKRPVEQSPQEPDSSSGIGKKGQQPAKKRLNFGQTGDSESVPDPQPLGEPPAAPSGVGSNTMAAGGGAPMADNNEGADGVGNASGNWHCDSTWLGDRVITTSTRTWALPTYNNHLYKQISSQSGGSTNDNTYFGYSTPWGYFDFNRFHCHFSPRDWQRLINNNWGFRPKKLNFKLFNIQVKEVTTNDGTTTIANNLTSTVQVFTDSEYQLPYVLGSAHQGCLPPFPADVFMIPQYGYLTLNNGSQAVGRSSFYCLEYFPSQMLRTGNNFEFSYTFEDVPFHSSYAHSQSLDRLMNPLIDQYLYYLSRTQTTSGTAGNRTLQFSQAGPSSMANQAKNWLPGPCYRQQRVSKTANQNNNSNFAWTGATKYHLNGRDSLVNPGPAMATHKDDEDKFFPMSGVLIFGKQGAGNSNVDLDNVMITSEEEIKTTNPVATEQYGTVATNLQSSNTAPATGTVNSQGALPGMVWQNRDVYLQGPIWAKIPHTDGHFHPSPLMGGFGLKHPPPQILIKNTPVPANPPTTFSPAKFASFITQYSTGQVSVEIEWELQKENSKRWNPEIQYTSNYNKSTNVDFAVDTNGVYSEPRPIGTRYLTRNL

SEQ ID NO: 1919 - protein, 736 aa, Artificial Sequence
  Description of Artificial Sequence: Synthetic polypeptide
MAADGYLPDWLEDNLSEGIREWWDLKPGAPKPKANQQKQDDGRGLVLPGYKYLGPFNGLDKGEPVNAADAAALEHDKAYDQQLKAGDNPYLRYNHADAEFQERLQEDTSFGGNLGRAVFQAKKRVLEPLGLVEEGAKTAPGKKRPVEQSPQEPDSSSGIGKKGQQPAKKRLNFGQTGDSESVPDPQPLGEPPAAPSGVGSNTMASGGGAPMADNNEGADGVGNASGNWHCDSTWLGDRVITTSTRTWALPTYNNHLYKQISSQSGGSTNDNTYFGYSTPWGYFDFNRFHCHFSPRDWQRLINNNWGFRPKKLNFKLFNIQVKEVTTNDGTTTIANNLTSTVQVFTDSEYQLPYVLGSAHQGCLPPFPADVFMIPQYGYLTLNNGSQAVGRSSFYCLEYFPSQMLRTGNNFEFSYTFEDVPFHSSYAHSQSLDRLMNPLIDQYLYYLSRTQTTSGTAGNRTLQFSQAGPSSMANQAKNWLPGPCYRQQRVSKTANQNNNSNFAWTGATKYHLNGRDSLVNPGPAMATHKDDEDKFFPMSGVLIFGKQGAGNSNVDLDNVMITSEEEIKTTNPVATEEYGTVATNLQSSNTAPATGTVNSQGALPGMVWQNRDVYLQGPIWAKIPHTDGHFHPSPLMGGFGLKHPPPQILIKNTPVPANPPTTFSPAKFASFITQYSTGQVSVEIEWELQKENSKRWNPEIQYTSNYNKSTNVDFAVDTNGVYSEPRPIGTRYLTRNL

SEQ ID NO: 1920 - protein, 736 aa, Artificial Sequence
  Description of Artificial Sequence: Synthetic polypeptide
MAADGYLPDWLEDNLSEGIREWWDLKPGAPKPKANQQKQDDGRGLVLPGYKYLGPFNGLDKGEPVNAADAAALEHDKAYDQQLKAGDNPYLRYNHADAEFQERLQEDTSFGGNLGRAVFQAKKRVLEPLGLVEEGAKTAPGKKRPVEQSPQEPDSSSGIGKKGQQPAKKRLNFGQTGDSESVPDPQPLGEPPAAPSGVGSNTMASGGGAPMADNNEGADGVGNASGNWHCDSTWLGDRVITTSTRTWALPTYNNHLYKQISSQSGGSTNDNTYFGYSTPWGYFDFNRFHCHFSPRDWQRLINNNWGFRPKKLNFKLFNIQVKEVTTNDGTTTIANNLTSTVQVFTDSEYQLPYVLGSAHQGCLPPFPADVFMIPQYGYLTLNNGSQAVGRSSFYCLEYFPSQMLRTGNNFQFSYTFEDVPFHSSYAHSQSLDRLMNPLIDQYLYYLSRTQTTSGTAGNRELQFSQAGPSSMANQAKNWLPGPCYRQQRVSKTTNQNNNSNFAWTGATKYHLNGRDSLVNPGPAMATHKDDEDKFFPMSGVLIFGKQGAGNSNVDLDNVMITNEEEIKTTNPVATEQYGTVATNLQSANTAPATGTVNSQGALPGMVWQDRDVYLQGPIWAKIPHTDGHFHPSPLMGGFGLKHPPPQILIKNTPVPANPPTTFSPAKFASFITQYSTGQVSVEIEWELQKENSKRWNPEIQYTSNYNKSTNVDFAVDTNGVYSEPRPIGTRYLTRNL

SEQ ID NO: 1921 - DNA, 2211 bp, Artificial Sequence
  Description of Artificial Sequence: Synthetic polynucleotide
atggctgccgatggttatcttccagattggctcgaggacaacctctctgagggcattcgcgagtggtgggacttgaaacctggagccccgaaacccaaagccaaccagcaaaagcaggacgacggccggggtctggtgcttcctggctacaagtacctcggacccttcaacggactcgacaagggggagcccgtcaacgcggcggacgcagcggccctcgagcacgacaaggcctacgaccagcagctcaaagcgggtgacaatccgtacctgcggtataaccacgccgacgccgagtttcaggagcgtctgcaagaagatacgtcttttgggggcaacctcgggcgagcagtcttccaggccaagaagcgggttctcgaacctctcggtctggttgaggaaggcgctaagacggctcctggaaagaagagaccggtagagcaatcaccccaggaaccagactcctcttcgggcatcggcaagaaaggccagcagcccgcgaaaaagagactcaactttgggcagacaggcgactcagagtcagtgcccgaccctcaaccactcggagaaccccccgcagccccctctggtgtgggatctaatacaatggctgcaggcggtggcgctccaatggcagacaataacgaaggcgccgacggagtgggtaacgcctcaggaaattggcattgcgattccacatggctgggcgacagagtcatcaccaccagcacccgaacctgggccctccccacctacaacaaccacctctacaagcaaatctccagccaatcgggagcaagcaccaacgacaacacctacttcggctacagcaccccctgggggtattttgactttaacagattccactgccacttctcaccacgtgactggcagcgactcatcaacaacaactggggattccggcccaagagactcaacttcaagctcttcaacatccaggtcaaggaggtcacgacgaatgatggcaccacgaccatcgccaataaccttaccagcacggttcaggtctttacggactcggaataccagctcccgtacgtcctcggctctgcgcaccagggctgcctgcctccgttcccggcggacgtcttcatgattcctcagtacgggtacctgactctgaacaatggcagtcaggccgtgggccgttcctccttctactgcctggagtactttccttctcaaatgctgagaacgggcaacaactttgagttcagctacacgtttgaggacgtgccttttcacagcagctacgcgcacagccaaagcctggaccggctgatgaaccccctcatcgaccagtacctgtactacctgtctcggactcagaccacgagtggtaccgcaggaaatcggacgttgcaattttctcaggccgggcctagtagcatggcgaatcaggccaaaaactggctacccgggccctgctaccggcagcaacgcgtctccaagacagcgaatcaaaataacaacagcaactttgcctggaccggtgccaccaagtatcatctgaatggcagagactctctggtaaatcccggtcccgctatggcaacccacaaggacgacgaagacaaattttttccgatgagcggagtcttaatatttgggaaacagggagctggaaatagcaacgtggaccttgacaacgttatgataaccagtgaggaagaaattaaaaccaccaacccagtggccacagaacagtacggcacggtggccactaacctgcaatcgtcaaacaccgctcctgctacagggaccgtcaacagtcaaggagccttacctggcatggtctggcagaaccgggacgtgtacctgcagggtcctatctgggccaagattcctcacacggacggacactttcatccctcgccgctgatgggaggctttggactgaaacacccgcctcctcagatcctgattaagaatacacctgttcccgcgaatcctccaactaccttcagtccagctaagtttgcgtcgttcatcacgcagtacagcaccggacaggtcagcgtggaaattgaatgggagctgcagaaagaaaacagcaaacgctggaacccagagattcaatacacttccaactacaacaaatctacaaatgtggactttgctgttgacacaaatggcgtttattctgagcctcgccccatcggcacccgttacctcacccgtaatctgtaa

SEQ ID NO: 1922 - protein, 738 aa, Artificial Sequence; identical to SEQ ID NO: 7
  Description of Artificial Sequence: Synthetic polypeptide

SEQ ID NO: 1923 - DNA, 2211 bp, Artificial Sequence
  Description of Artificial Sequence: Synthetic polynucleotide
atggctgccgatggttatcttccagattggctcgaggacaacctctctgagggcattcgcgagtggtgggacttgaaacctggagccccgaaacccaaagccaaccagcaaaagcaggacgacggccggggtctggtgcttcctggctacaagtacctcggacccttcaacggactcgacaagggggagcccgtcaacgcggcggacgcagcggccctcgagcacgacaaggcctacgaccagcagctcaaagcgggtgacaatccgtacctgcggtataaccacgccgacgccgagtttcaggagcgtctgcaagaagatacgtcttttgggggcaacctcgggcgagcagtcttccaggccaagaagcgggttctcgaaccttttggtctggttgaggaaggcgctaagacggctcctggaaagaaacgtccggtagagcagtcgccacaagagccagactcctcctcgggcatcggcaagacaggccagcagcccgctaaaaagagactcaattttggtcagactggcgactcagagtcagtccccgacccacaacctctcggagaacctccagcaacccccgctgctgtgggacctactacaatggcttcaggcggtggcgcaccaatggcagacaataacgaaggcgccgacggagtgggtaatgcctcaggaaattggcattgcgattccacatggctgggcgacagagtcatcaccaccagcacccgcacctgggccttgcccacctacaataaccacctctacaagcaaatctccagtgcttcaacgggggccagcaacgacaaccactacttcggctacagcaccccctgggggtattttgatttcaacagattccactgccacttttcaccgcgtgactggcagcgactcatcaacaacaattggggattccggcccaagagactcaacttcaagctcttcaacatccaagtcaaggaggtcacgacgagtgatggcgtcacaaccatcgctaataaccttaccagcacggttcaagtcttctcggactcggagtaccagcttccgtacgtcctcggctctgcgcaccagggctgcctccctccgttcccggcggacgtgttcatgattccgcaatacggctacctgacgctcaacaatggcagccaagccgtgggacgttcatccttttactgcctggaatatttcccttctcagatgctgagaacgggcaacaactttaccttcagctacacctttgaggaagtgcctttccacagcagctacgcgcacagccagagcctggaccggctgatgaatcctctcatcgaccaatacctgtattacctgaacagaactcaaaatcagtccggaagtgcccaaaacaaggacttgctgtttagccgtgggtctccagctggcatgtctgttcagcccaaaaactggctacctggaccctgttatcggcagcagcgcgtttctaaaacaaaaacaggcaacaacaacagcaattttacctggactggtgcttcaaaatataacctcaatgggcatgaatccatcatcaaccctggcactgctatggcctcacacaaagacgacgaagacaagttctttcccatgagcggtgtcatgatttttggaaaagagagcgccggagcttcaaacactgcattggacaatgtcatgattacagacgaagaggaaattaaagccactaaccctgtggccaccgaaagatttgggaccgtggcagtcaatttccagagcagcagcacacaccctgcgaccggagatgtgcatgttatgggagcattacctggcatggtgtggcaagatagagacgtgtacctgcagggtcccatctgggccaaaattcctcacacagatggacactttcacccgtctcctcttatgggcggctttggactcaagcacccgcctcctcagatcctcatcaaaaacacgcctgttcctgcgaatcctccggcggagttttcagctacaaagtttgcttcattcatcacccaatactccacaggacaagtgagtgtggaaattgaatgggagctgcagaaagaaaacagcaagcgctggaatcccgaagtgcagtacacatccaattatgcaaaatctgccaacgttgattttaccgtggacaacaatggactttatactgagcctcgccccattggcacccgttaccttacccgtcccctgtaa

SEQ ID NO: 1924 - DNA, 2211 bp, Artificial Sequence; identical to SEQ ID NO: 1923
  Description of Artificial Sequence: Synthetic polynucleotide

SEQ ID NO: 1925 - DNA, 2202 bp, Artificial Sequence
  Description of Artificial Sequence: Synthetic polynucleotide
atgactgacggttaccttccagattggctagaggacaacctctctgaaggcgttcgagagtggtgggcgctgcaacctggagcccctaaacccaaggcaaatcaacaacatcaggacaacgctcggggtcttgtgcttccgggttacaaatacctcggacccggcaacggacttgacaagggggaacccgtcaacgcagcggacgcggcagccctcgaacacgacaaggcctacgaccagcagctcaaggccggtgacaacccctacctcaagtacaaccacgccgacgccgagtttcaggagcgtcttcaagaagatacgtcttttgggggcaacctcggacgagcagtcttccaggccaaaaagaggatccttgagcctctgggtctggttgaggaagcggctaagacggctcctggaaaaaagagacctgtagagcaatctccagcagaaccggactcctcttcgggcatcggcaaatcaggccagcagcccgctagaaaaagactgaattttggtcagactggcgacacagagtcagtcccagaccctcaaccactcggacaacctcccgcagccccctctggtgtgggatctactacaatggcttcaggcggtggcgcaccaatggcagacaataacgagggtgccgatggagtgggtaattcctcaggaaattggcattgcgattcccaatggctgggcgacagagtcatcaccaccagcacccgcacctgggccctgcccacctacaacaatcacctctacaagcaaatctccagccaatcaggagccaccaacgacaaccactactttggctacagcaccccctgggggtattttgacttcaacagattccactgccacttttcaccacgtgactggcaaagactcatcaacaacaactggggattccgacccaagagactcaacttcaagctctttaacattcaagtcaaagaggtcacgcagaatgacggtacgacgacgattgccaataaccttaccagcacggttcaggtgtttactgactccgagtaccagctcccgtacgtcctcggctcggcgcatcagggatgcctcccgccgttcccagcagacgtcttcatggtcccacagtatggatacctcaccctgaacaacgggagtcaggcggtaggacgctcttccttttactgcctggagtactttccttctcagatgctgcgtactggaaacaactttcagtttagctacacttttgaagacgtgcctttccacagcagctacgctcacagccaaagtctggaccgtctcatgaatcctctgatcgaccagtacctgtactatctgaacaggacacaaacagccagtggaactcagcagtctcggctactgtttagccaagctggacccaccagtatgtctcttcaagctaaaaactggctgcctggaccttgctacagacagcagcgtctgtcaaagcaggcaaacgacaacaacaacagcaactttccctggactggtgccaccaaatatcatctgaatggccgggactcattggtgaacccgggccctgctatggccagtcacaaggatgacaaagaaaagtttttccccatgcatggaaccctgatatttggtaaagaaggaacaaatgccaacaacgcggatttggaaaatgtcatgattacagatgaagaagaaatccgcaccaccaatcccgtggctacggagcagtacgggactgtgtcaaataatttgcaaaactcaaacgctggtccaactactggaactgtcaatcaccaaggagcgttacctggtatggtgtggcaggatcgagacgtgtacctgcagggacccatttgggccaagattcctcacaccgatggacactttcatccttctccactgatgggaggttttgggctcaaacacccgcctcctcagatcatgatcaaaaacactcccgttccagccaatcctcccacaaactttagtgcggcaaagtttgcttccttcatcacacagtactccacggggcaggtcagcgtggagatcgagtgggagctgcagaaggagaacagcaaacgctggaatcccgaaattcagtacacttccaactacaacaaatctgttaatgtggactttactgtggacactaatggtgtgtattcagagcctcgccccattggcaccagatacctgactcgtaatctgtaa

SEQ ID NO: 1926 - DNA, 2211 bp, Artificial Sequence
  Description of Artificial Sequence: Synthetic polynucleotide
atggctgccgatggttatcttccagattggctcgaggacaacctctctgagggcattcgcgagtggtgggacttgaaacctggagccccgaaacccaaagccaaccagcaaaagcaggacgacggccggggtctggtgcttcctggctacaagtacctcggacccttcaacggactcgacaagggggagcccgtcaacgcggcggacgcagcggccctcgagcacgacaaggcctacgaccagcagctcaaagcgggtgacaatccgtacctgcggtataaccacgccgacgccgagtttcaggagcgtctgcaagaagatacgtcttttgggggcaacctcgggcgagcagtcttccaggccaagaagcgggttctcgaaccttttggtctggttgaggaaggcgctaagacggctcctggaaagaaacgtccggtagagcagtcgccacaagagccagactcctcctcgggcatcggcaagacaggccagcagcccgctaaaaagagactcaattttggtcagactggcgactcagagtcagtccccgacccacaacctctcggagaacctccagcaacccccgctgctgtgggacctactacaatggcttcaggcggtggcgcaccaatggcagacaataacgaaggcgccgacggagtgggtaatgcctcaggaaattggcattgcgattccacatggctgggcgacagagtcatcaccaccagcacccgcacctgggccttgcccacctacaataaccacctctacaagcaaatctccagtgcttcaacgggggccagcaacgacaaccactacttcggctacagcaccccctgggggtattttgatttcaacagattccactgccacttttcaccacgtgactggcagcgactcatcaacaacaattggggattccggcccaagagactcaacttcaagctcttcaacatccaagtcaaggaggtcacgacgaatgatggcgtcacaaccatcgctaataaccttaccagcacggttcaagtcttctcggactcggagtaccagcttccgtacgtcctcggctctgcgcaccagggctgcctccctccgttcccggcggacgtgttcatgattccgcaatacggctacctgacgctcaacaatggcagccaagccgtgggacgttcatccttttactgcctggaatatttcccttctcagatgctgagaacgggcaacaactttaccttcagctacacctttgaggaagtgcctttccacagcagctacgcgcacagccagagcctggaccggctgatgaatcctctcatcgaccaatacctgtattacctgaacagaactcaaaatcagtccggaagtgcccaaaacaaggacttgctgtttagccgtgggtctccagctggcatgtctgttcagcccaaaaactggctacctggaccctgttatcggcagcagcgcgtttctaaaacaaaaacagacaacaacaacagcaattttacctggactggtgcttcaaaatataacctcaatgggcgtgaatccatcatcaaccctggcactgctatggcctcacacaaagacgacgaagacaagttctttcccatgagcggtgtcatgatttttggaaaagagagcgccggagcttcaaacactgcattggacaatgtcatgattacagacgaagaggaaattaaagccactaaccctgtggccaccgaaagatttgggaccgtggcagtcaatttccagagcagcagcacagaccctgcgaccggagatgtgcatgttatgggagcattacctggcatggtgtggcaagatagagacgtgtacctgcagggtcccatctgggccaaaattcctcacacagatggacactttcacccgtctcctcttatgggcggctttggactcaagcacccgcctcctcagatcctcatcaaaaacacgcctgttcctgcgaatcctccggcggagttttcagctacaaagtttgcttcattcatcacccaatactccacaggacaagtgagtgtggaaattgaatgggagctgcagaaagaaaacagcaagcgctggaatcccgaagtgcagtacacatccaattatgcaaaatctgccaacgttgattttaccgtggacaacaatggactttatactgagcctcgccccattggcacccgttaccttacccgtcccctgtaa

SEQ ID NO: 1927 - DNA, 2211 bp, Artificial Sequence
  Description of Artificial Sequence: Synthetic polynucleotide
atggctgccgatggttatcttccagattggctcgaggacaacctctctgagggcattcgcaagtggtgggacttgaaacctggagccccgaaacccaaagccaaccagcaaaagcaggacgacggccggggtctggtgcttcctggctacaagtacctcggacccttcaacggactcgacaagggggagcccgtcaacgcggcggacgcagcggccctcgagcacgacaaggcctacgaccagcagctcaaagcgggtgacaatccgtacctgcggtataaccacgccgacgccgagtttcaggagcgtctgcaagaagatacgtcttttgggggcaacctcgggagagcagtcttccaggccaagaagcgggttctcgaaccttttggtctggttgaggaaggcgctaagacggctcctggaaagaaacgtccggtagagcagtcgccacaagagccagactcctcctcgggcatcggcaagacaggccagcagcccgctaaaaagagactcaattttggtcagactggcgactcagagtcagtccccgacccacaacctctcggagaacctccagcaacccccgctgctgtgggacctactacaatggcttcaggcggtggcgcaccaatggcagacaataacgaaggcgccgacggagtgggtaatgcctcaggaaattggcattgcgattccacatggctgggcgacagagtcatcaccaccagcacccgcacctgggccttgcccacctacaataaccacctctacaagcaaatctccagtgcttcaacgggggccagcaacgacaaccactacttcggctacagcaccccctgggggtattttgatttcaacagattccactgccacttttcaccacgtgactggcagcgactcatcaacaacaattggggattccggcccaagagactcaacttcaagctcttcaacatccaagtcaaggaggtcacgacgaatgatggcgtcacaaccatcgctaataaccttaccagcacggttcaagtcttctcggactcggagtaccagcttccgtacgtcctcggctctgcgcaccagggctgcctccctccgttcccggcggacgtgttcatgattccgcaatacggctacctgacgctcaacaatggcagccaagccgtgggacgttcatccttttactgcctggaatatttcccttctcagatgctgagaacgggcaacaactttaccttcagctacacctttgaggaagtgcctttccacagcagctacgcgcacagccagagcctggaccggctgatgaatcctctcatcgaccaatacctgtattacctgaacagaactcaaaatcagtccggaagtgcccaaaacaaggacttgctgtttagccgtgggtctccagctggcatgtctgttcagcccaaaaactggctacctggaccctgttatcggcagcagcgcgtttctaaaacaaaaacagacaacaacaacagcaattttacctggactggtgcttcaaaatataacctcaatgggcgtgaatccatcatcaaccctggcactgctatggcctcacacaaagacgacaaagacaagttctttcccatgagcggtgtcatgatttttggaaaagagagcgccggagcttcaaacactgcattggacaatgtcatgattacagacgaagaggaaattaaagccactaaccctgtggccaccgaaagatttgggaccgtggcagtcaatttccagagcagcagcacagaccctgcgaccggagatgtgcatgttatgggagcattacctggcatggtgtggcaagatagagacgtgtacctgcagggtcccatttgggccaaaattcctcacacagatggacactttcacccgtctcctcttatgggcggctttggactcaagcacccgcctcctcagatcctcatcaaaaacacacctgttcctgcgaatcctccggcggagttttcagctacaaagtttgcttcattcatcacccaatactccacaggacaagtgagtgtggaaattgaatgggagctgcagaaagaaaacagcaagcgctggaatcccgaagtgcagtacacatccaattatgcaaaatctgccaacgttgattttaccgtggacaacaatggactttatactgagcctcgccccattggcacccgttaccttacccgtcccctgtaa

SEQ ID NO: 1928 - DNA, 2211 bp, Artificial Sequence
  Description of Artificial Sequence: Synthetic polynucleotide
atggctgccgatggttatcttccagattggctcgaggacaacctctctgagggcattcgcgagtggtgggacttgaaacctggagccccgaaacccaaagccaaccagcaaaagcaggacaacggccggggtctggtgcttcctggctacaagtacctcggacccttcaacggactcgacaagggggagcccgtcaacgcggcggacgcagcggccctcgagcacgacaaggcctacgaccagcagctcaaagcgggtgacaatccgtacctgcggtataaccacgccgacgccgagtttcaggagcgtctgcaagaagatacgtcttttgggggcaacctcgggcgagcagtcttccaggccaagaagcgggttctcgaaccttttggtctggttgaggaaggcgctaagacggctcctggaaagaaacgtccggtagagcagtcgccacaagagccagactcctcctcgggcatcggcaagacaggccagcagcccgctaaaaagagactcaattttggtcagactggcgactcagagtcagtccccgacccacaacctctcggagaacctccagcaacccccgctgctgtgggacctactacaatggcttcaggcggtggcgcaccaatggcagacaataacgaaggcgccgacggagtgggtaatgcctcaggaaattggcattgcgattccacatggctgggcgacagagtcatcaccaccagcacccgcacctgggccttgcccacctacaataaccacctctacaagcaaatctccagtgcttcaacgggggccagcaacgacaaccactacttcggctacagcaccccctgggggtattttgatttcaacagattccactgccacttttcaccacgtgactggcagcgactcatcaacaacaattggggattccggcccaagagactcaacttcaagctcttcaacatccaagtcaaggaggtcacgacgaatgatggcgtcacaaccatcgctaataaccttaccagcacggttcaagtcttctcggactcggagtaccagcttccgtacgtcctcggctctgcgcaccagggctgcctccctccgttcccggcggacgtgttcatgattccgcaatacggctacctgacgctcaacaatggcagccaagccgtgggacgttcatccttttactgcctggaatatttcccttctcagatgctgagaacgggcaacaactttaccttcagctacacctttgaggaagtgcctttccacagcagctacgcgcacagccagagcctggaccggctgatgaatcctctcatcgaccaatacctgtattacctgaacagaactcaaaatcagtccggaagtgcccaaaacaaggacttgctgtttagccgtgggtctccagctggcatgtctgttcagcccaaaaactggctacctggaccctgttatcggcagcagcgcgtttctaaaacaaaaacagacaacaacaacagcaattttacctggactggtgcttcaaaatataacctcaatgggcgtgaatccatcatcaaccctggcactgctatggcctcacacaaagacgacgaagacaagttctttcccatgagcggtgtcatgatttttggaaaagagagcgccggagcttcaaacactgcattggacaatgtcatgattacagacgaagaggaaattaaagccactaaccctgtggccaccgaaagatttgggaccgtggcagtcaatttccagagcagcagcacacaccctgcgaccggagatgtgcatgttatgggagcattacctggcatggtgtggcaagatagagacgtgtacctgcagggtcccatctgggccaaaattcctcacacagatggacactttcacccgtctcctcttatgggcggctttggactcaagcacccgcctcctcagatcctcatcaaaaacacgcctgttcctgcgaatcctccggcggagttttcagctacaaagtttgcttcattcatcacccaatactccacaggacaagtgagtgtggaaattgaatgggagctgcagaaagaaaacagcaagcgctggaatcccgaagtgcagtacacatccaattatgcaaaatctgccaacgttgattttaccgtggacaacaatggactttatactgagcctcgccccattggcacccgttaccttacccgtcccctgtaa

SEQ ID NO: 1929 - DNA, 2211 bp, Artificial Sequence
  Description of Artificial Sequence: Synthetic polynucleotide
atggctgccgatggttatcttccagattggctcgaggacaacctctctgagggcattcgcgagtggtgggacttgaaacctggagccccgaaacccaaagccaaccagcaaaagcaggacgacggccggggtctggtgcttcctggctacaagtacctcggacccttcaacggactcgacaagggggagcccgtcaacgcggcggacgcagcggccctcgagcacgacaaggcctacgaccagcagctcaaagcgggtgacaatccgtacctgcggtataaccacgccgacgccgagtttcaggagcgtctgcaagaagatacgtcttttgggggcaacctcgggcgagcagtcttccaggccaaaaagcgggttctcgaaccttttggtctggttgaggaaggcgctaagacggctcctggaaagaaacgtccggtagagcagtcgccacaagagccagactcctcctcgggcatcggcaagacaggccagcagcccgctaaaaagagactcaattttggtcagactggcgactcagagtcagtccccgacccacaacctctcggagaacctccagcaacccccgctgctgtgggacctactacaatggcttcaggcggtggcgcaccaatggcagacaataacgaaggcgccgacggagtgggtaatgcctcaggaaattggcattgcgattccacatggctgggcgacagagtcatcaccaccagcacccgcacctgggccttgcccacctacaataaccacctctacaagcaaatctccagtgcttcaacgggggccagcaacgacaaccactacttcggctacagcaccccctgggggtattttgatttcaacagattccactgccacttttcaccacgtgactggcagcgactcatcaacaacaattggggattccggcccaagagactcaacttcaagctcttcaacatccaagtcaaggaggtcacgacgaatgatggcgtcacaaccatcgctaataaccttaccagcacggttcaagtcttctcggactcggagtaccagcttccgtacgtcctcggctctgcgcaccagggctgcctccctccgttcccggcggacgtgttcatgattccgcaatacggctacctgacgctcaacaatggcagccaagccgtgggacgttcatccttttattgcctggaatatttcccatcgcagatgctgagaacgggcaataactttaccttcagctacacctttgaggacgtgcctttccacagcagctacgcgcacagccagagcctggaccggctgatgaatcctctcatcgaccagtacctgtattacctgaacagaactcagaaccagtccggaagtgcccaaaacaaggacttgctgtttagccgggggtctccagctggcatgtctgttcagctcaaaaactggctacctggaccctgttatcggcagcagcgcgtttctaaaacaaaaacagacaacaacaacagcaattttacctggactggtgcttcaaaatataaccttaatgggcgtgaatccatcatcaaccctggcactgctatggcctcacacaaagacgacgaagacaagttctttcccatgagcggtgtcatgatttttggaaaagagagcgccggagcttcaaacactgcattggacaatgtcatgattacagacgaagaggaaattaaagccactaaccctgtggccaccgaaagatttgggaccgtggcagtcaatttccagagcagcagcacagaccctgcgaccggagatgtgcatgttatgggagcattacctggcatggtgtggcaagatagagacgtgtacctgcagggtcccatttgggccaaaattcctcacacagatggacactttcacccgtctcctcttatgggcggctttggactcaaacacccgcctcctcagatcctcatcaaaaacacacctgttcctgcgaatcctccggcggagttttcagctacaaagtttgcttcattcatcacccaatactccacaggacaagtgagcgtggaaattgaatgggagctgcagaaagaaaacagcaagcgctggaatcccgaagtgcagtacacatccaattatgcaaaatctgccaacgttgattttaccgtggacaacaatggactttatactgagcctcgccccattggcacccgttaccttacccgtcccctgtaa

SEQ ID NO: 1930 - DNA, 2211 bp, Artificial Sequence
  Description of Artificial Sequence: Synthetic polynucleotide
atggctgccgatggttatcttccagattggctcgaggacaacctctctgagggcattcgcgagtggtgggacttgaaacctggagccccgaaacccaaagccaaccagcaaaagcaggacgacggccggggtctggtgcttcctggctacaagtacctcggacccttcaacggactcgacaagggggagcccgtcaacgcggcggacgcagcggccctcgagcacgacaaggcctacgaccagcagctcaaagcgggtgacaatccgtacctgcggtataaccacgccgacgccgagtttcaggagcgtctgcaagaagatacgtcttttgggggcaacctcgggcgagcagtcttccaggccaagaagcgggttctcgaaccttttggtctggttgaggaaggtgctaagacggctcctggaaagaagagaccggtagagcagtcgccccaagaaccagactcctcatcgggcatcggcaaatcaggccagcagcccgctaaaaagagactcaattttggtcagactggcgactcagagtcagtccccgacccacaacctctcggagaacctccagcaacccccgctgctgtgggacctactacaatggcttcaggcggtggcgcaccaatggcagacaataacgaaggcgccgacggagtgggtaatgcctcaggaaattggcattgcgattccacatggctgggcgacagagtcattaccaccagcacccgaacctgggccctgcccacctataacaaccacctctacaaacaaatctccagcgcttcaacgggggccagcaacgacaaccactacttcggctacagcaccccctgggggtattttgattttaacagattccactgccacttctcaccacgtgactggcagcgactcatcaacaacaattggggattccggcccaagagactcaacttcaagctcttcaacatccaagtcaaggaggtcacgacgaacgatggcgtcacgaccatcgctaataaccttaccagcacggttcaagtcttctcggactcggagtaccagttgccgtacgtcctcggctctgcgcaccagggctgcctccctccgttcccggcggacgtgttcatgattccgcagtacggctacctaacactcaacaatggcagccaggccgtgggacgttcatccttttactgcctggaatatttcccatcgcagatgctgagaacgggcaataactttaccttcagctacacattcgaggacgtgcctttccacagcagctacgcgcacagccaaagcctggaccggctgatgaatcctctcatcgaccagtacttgtattacctaaacagaactcaaaatcagtccggaagtgcccaaaacaaggacttgctgtttagccgggggtctccagctggcatgtctgttcagcccaaaaactggctacctggaccctgttatcggcagcagcgcgtttctaaaacaaaaacagacaacaacaacagcaactttacctggactggtgcttcaaaatataaccttaatgggcgtgaatctataatcaaccctggcactgctatggcttcacacaaagacgacgaagacaagttctttccaatgagcggtgtcatgatttttggcaaggagagcgccggagcttcaaacactgcattggacaatgtcatgattacagacgaagaggaaattaaagccactaaccctgtggccaccgaaagatttgggaccgtggcagtcaatttccagagcagcagcacagaccctgcgaccggagatgtgcatgttatgggagcattacctggcatggtgtggcaagatagagacgtgtacctgcagggtccaatttgggccaaaattcctcacacagatggacactttcacccgtctcctcttatgggcggctttggacttaagcacccgcctcctcagatcctcatcaaaaacacgcctgttcctgcgaatcctccggcagagttttcggctacaaagtttgcttcattcatcacccagtattccacaggacaagtgagtgtggaaattgaatgggagttgcagaaagaaaacagcaagcgttggaatcccgaagtgcagtacacatctaattatgcaaaatctgccaacgttgatttcactgtggacaacaatggactttatactgagcctcgccccattggcacccgttacctcacccgtcccctgtaa

SEQ ID NO: 1931 - DNA, 2211 bp, Artificial Sequence
  Description of Artificial Sequence: Synthetic polynucleotide
atggctgccgatggttatcttccagattggctcgaggacaacctctctgagggcattcgcgagtggtgggacttgaaacctggagccccgaaacccaaagccaaccagcaaaagcaggacgacggccggggtctggtgcttcctggctacaagtacctcggacccttcaacggactcgacaagggggagcccgtcaacgcggcggacgcagcggccctcgagcacgacaaggcctacgaccagcagctcaaagcgggtgacaatccgtacctgcggtataaccacgccgacgccgagtttcaggagcgtctgcaagaagatacgtcttttgggggcaacctcgggcgagcagtcttccaggccaagaagagggttctcgaaccttttggtctggttgaggaaggtgctaagacggctcctggaaagaaacgtccggtagagcagtcaccccaagaaccagactcctcctcgggcattggcaaatcaggccagcagcccgctaaaaagagactcaattttggtcagactggcgactcagagtcagtccccgacccacaacctctcggagaacctccagcaacccccgctgctttgggacctactacaatggcttcaggcggtggcgcaccaatggcagacaataacgaaggcgccgacggagtgggtaatgcctcaggaaattggcattgcgattccacatggctgggcgacagagtcatcaccaccagcacccgcacctgggccttgcccacctacaataaccacctctacaagcaaatctccagtgcttcaacgggggccagcaacgacaaccactacttcggctacagcaccccctgggggtattttgatttcaacagattccactgccatttctcaccacgtgactggcagcgactcatcaacaacaactggggattccggcccaagagactcaacttcaagctcttcaacatccaagtcaaggaggtcacgacgaacgatggcgtcacgaccatcgctaataaccttaccagcacggttcaagtcttctcggactcggagtaccagcttccgtacgtcctcggctctgcgcaccagggctgcctccctccgttcccggcggacgtgttcatgattccgcagtacggctacctgacgctcaacaatggcagcaaagccgtgggacgttcatccttttactgcctggaatatttcccttctcagatgctgagaacgggcaacaactttaccttcagctacacctttgaggaagtgcctttccacagcagctacgcgcacagccagagcctggaccggctgatgaatcctctcatcgaccaatacctgtattacctgaacagaactcaaaatcagtccggaagtgcccaaaacaaggacttgctgtttagccgtgggtctccagctggcatgtctgttcagcccaaaaactggctacctggaccctgttatcggcagcagcgcgtttctaaaacaaaaacagacaacaacaacagcaattttacctggactggtgcttcaaaatataacctcaatgggcgtgaatccatcatcaaccctggcactgctatggcctcacacaaagacgacgaagacaagttctttcccatgagcggtgtcatgatttttggaaaagagagcgccggagcttcaaacactgcattggacaatgtcatgattacagacgaagaggaaattaaagccactaaccctgtggccaccgaaagatttgggaccgtggcagtcaatttccagagcagcagcacagaccctgcgaccggagatgtgcatgttatgggagcattacctggcatggtgtggcaagatagagacgtgtacctgcagggtcccatttgggccaaaattcctcacacggatggacactttcacccgtctcctcttatgggcggctttggactcaagcacccgcctcctcagatcctcatcaaaaacacacctgttcctgcgaatcctccggcagagttttcggctacaaagtttgcttcattcatcacccagtactccacaggacaagtgagcgtggaaattgaatgggagttgcagaaagaaaacagtaagcgctggaatcccgaagtgcagtacacatctaattatgcaaaatctgccaacgttgacttcactgtggacaacaatggactttatactgagcctcgccccattggcacccgttacctcacccgtcccctgtaa

SEQ ID NO: 1932 - DNA, 2970 bp, Artificial Sequence
  Description of Artificial Sequence: Synthetic polynucleotide
agatgaccgccaaggtcgtagagtccgccaaggccattctgggcggcagcaaggtgcgcgtggaccaaaaatgcaaggcctctgcgcagatcgaccccacccccgtgatcgtcacctccaacaccaacatgtgcgccgtgattgacgggaacagcaccaccttcgagcaccagcagcccctgcaggaccggatgttcaagtttgaactcacccgccgcctcgactacgactttggcaaggtcaccaagcaggaagtcaaggactttttccggtgggcggctgatcacgtgactgacgtggctcatgagttttacgtcacaaagggtggagctaagaaaaggcccgccccctctgacgaggatataagcgagcccaagcggccgcgcgtgtcatttgcgcagccggagacgtcagacgcggaagctcccggagacttcgccgacaggtaccaaaacaaatgttctcgtcacgcgggtatgctgcagatgctctttccctgcaagacgtgcgagagaatgaatcagaattccaacgtctgcttcacgcacggtcagaaagattgcggggagtgctttcccgggtcagaatctcaaccggtttctgtcgtcagaaaaacgtatcagaaactgtgcatccttcatcagctccggggggcacccgagatcgcctgctctgcttgcgaccaactcaaccccgatttggacgattgccaatttgagcaataaatgactgaaatcaggtatggctgctgacggttatcttccagattggctcgaggacaacctctctgaaggcattcgcgagtggtgggcgctgaaacctggagctccacaacccaaggccaaccaacagcatcaggacaacggcaggggtcttgtgcttcctgggtacaagtacctcggacccttcaacggactcgacaagggagagccggtcaacgaggcagacgccgcggccctcgagcacgacaaggcctacgacaagcagctcgagcagggggacaacccgtatctcaagtacaaccacggcgacgccgagttccagcagcgcttggcgaccgacacctcttttgggggcaacctcgggcgagcagtcttccaggccaaaaagaggattctcgagcctctgggtctggttgaagagggcgttaaaacggctcctggaaagaaacgcccattagaaaagactccaaatcggccgaccaacccggactctgggaaggccccggccaagaaaaagcaaaaagacggcgaaccagccgactctgctagaaggacactcgactttgaagactctggagcaggagacggaccccctgagggatcatcttccggagaaatgtctcatgatgctgagatgcgtgcggcgccaggcggaaatgctgtcgaggcgggacaaggtgccgatggagtgggtaatgcctccggtgattggcattgcgattccacctggtcagagggccgagtcaccaccaccagcacccgaacctgggtcctacccacgtacaacaaccacctgtacctgcgaatcggaacaacggccaacagcaacacctacaacggattctccaccccctggggatactttgactttaaccgcttccactgccacttttccccacgcgactggcagcgactcatcaacaacaactggggactcaggccgaaatcgatgcgtgttaaaatcttcaacatacaggtcaaggaggtcacgacgtcaaacggcgagactacggtcgctaataaccttaccagcacggttcagatctttgcggattcgacgtatgaactcccatacgtgatggacgccggtcaggaggggagctttcctccgtttcccaacgacgtctttatggttccccaatacggatactgcggagttgtcactggaaaaaaccagaaccagacagacagaaatgccttttactgcctggaatactttccatcccaaatgctaagaactggcaacaattttgaagtcagttaccaatttgaaaaagttcctttccattcaatgtacgcgcacagccagagcctggacagaatgatgaatcctttactggatcagtacctgtggcatctgcaatcgaccactaccggaaattcccttaatcaaggaacagctaccaccacgtacgggaaaattaccactggagactttgcctactacaggaaaaactggttgcctggagcctgcattaaacaacaaaaattttcaaagaatgccaatcaaaactacaagattcccgccagcgggggagacgcccttttaaagtatgacacgcataccactctaaatgggcgatggagtaacatggctcctggacctccaatggcaaccgcaggtgccggggactcggattttagcaacagccagctgatctttgccggacccaatccgagcggtaacacgaccacatcttcaaacaatttgttgtttacctcagaagaggagattgccacaacaaacccacgagacacggacatgtttggacagattgcagataataatcaaaatgccaccaccgcccctcacatcgctaacctggacgctatgggaattgttcccggaatggtctggcaaaacagagacatctactaccagggccctatttgggccaaggtccctcacacggacggacactttcacccttcgccgctgatgggaggatttggactgaaacacccgcctccacagattttcatcaaaaacacccccgtacccgccaatcccaatactacctttagcgctgcaaggattaattcttttctgacgcagtacagcaccggacaagttgccgttcagatcgactgggaaattcagaaggagcattccaaacgctggaatcccgaagttcaatttacttcaaactacggcactcaaaattctatgctgtgggctcccgacaatgctggcaactaccacgaactccgggctattgggtcccgtttcctcacccaccacttgtaa

SEQ ID NO: 1933 - protein, 736 aa, Artificial Sequence
  Description of Artificial Sequence: Synthetic polypeptide
MAADGYLPDWLEDNLSEGIREWWDLKPGAPKPKANQQKQDDGRGLVLPGYKYLGPFNGLDKGEPVNAADAAALEHDKAYDQQLKAGDNPYLRYNHADAEFQERLQEDTSFGGNLGRAVFQAKKRVLEPFGLVEEGAKTAPGKKRPVEQSPQEPDSSSGIGKTGQQPAKKRLNFGQTGDSESVPDPQPLGEPPATPAAVGPTTMASGGGAPMADNNEGADGVGNASGNWHCDSTWLGDRVITTSTRTWALPTYNNHLYKQISSASTGASNDNHYFGYSTPWGYFDFNRFHCHFSPRDWQRLINNNWGFRPKRLNFKLFNIQVKEVTTSDGVTTIANNLTSTVQVFSDSEYQLPYVLGSAHQGCLPPFPADVFMIPQYGYLTLNNGSQAVGRSSFYCLEYFPSQMLRTGNNFTFSYTFEEVPFHSSYAHSQSLDRLMNPLIDQYLYYLNRTQNQSGSAQNKDLLFSRGSPAGMSVQPKNWLPGPCYRQQRVSKTKTGNNNSNFTWTGASKYNLNGHESIINPGTAMASHKDDEDKFFPMSGVMIFGKESAGASNTALDNVMITDEEEIKATNPVATERFGTVAVNFQSSSTHPATGDVHVMGALPGMVWQDRDVYLQGPIWAKIPHTDGHFHPSPLMGGFGLKHPPPQILIKNTPVPANPPAEFSATKFASFITQYSTGQVSVEIEWELQKENSKRWNPEVQYTSNYAKSANVDFTVDNNGLYTEPRPIGTRYLTRPL

SEQ ID NO: 1934 - protein, 736 aa, Artificial Sequence; identical to SEQ ID NO: 1933
  Description of Artificial Sequence: Synthetic polypeptide

SEQ ID NO: 1935 - protein, 733 aa, Artificial Sequence
  Description of Artificial Sequence: Synthetic polypeptide
MTDGYLPDWLEDNLSEGVREWWALQPGAPKPKANQQHQDNARGLVLPGYKYLGPGNGLDKGEPVNAADAAALEHDKAYDQQLKAGDNPYLKYNHADAEFQERLQEDTSFGGNLGRAVFQAKKRILEPLGLVEEAAKTAPGKKRPVEQSPAEPDSSSGIGKSGQQPARKRLNFGQTGDTESVPDPQPLGQPPAAPSGVGSTTMASGGGAPMADNNEGADGVGNSSGNWHCDSQWLGDRVITTSTRTWALPTYNNHLYKQISSQSGATNDNHYFGYSTPWGYFDFNRFHCHFSPRDWQRLINNNWGFRPKRLNFKLFNIQVKEVTQNDGTTTIANNLTSTVQVFTDSEYQLPYVLGSAHQGCLPPFPADVFMVPQYGYLTLNNGSQAVGRSSFYCLEYFPSQMLRTGNNFQFSYTFEDVPFHSSYAHSQSLDRLMNPLIDQYLYYLNRTQTASGTQQSRLLFSQAGPTSMSLQAKNWLPGPCYRQQRLSKQANDNNNSNFPWTGATKYHLNGRDSLVNPGPAMASHKDDKEKFFPMHGTLIFGKEGTNANNADLENVMITDEEEIRTTNPVATEQYGTVSNNLQNSNAGPTTGTVNHQGALPGMVWQDRDVYLQGPIWAKIPHTDGHFHPSPLMGGFGLKHPPPQIMIKNTPVPANPPTNFSAAKFASFITQYSTGQVSVEIEWELQKENSKRWNPEIQYTSNYNKSVNVDFTVDTNGVYSEPRPIGTRYLTRNL

SEQ ID NO: 1936 - protein, 736 aa, Artificial Sequence; identical to SEQ ID NO: 757
  Description of Artificial Sequence: Synthetic polypeptide

SEQ ID NO: 1937 - protein, 736 aa, Artificial Sequence
  Description of Artificial Sequence: Synthetic polypeptide
MAADGYLPDWLEDNLSEGIRKWWDLKPGAPKPKANQQKQDDGRGLVLPGYKYLGPFNGLDKGEPVNAADAAALEHDKAYDQQLKAGDNPYLRYNHADAEFQERLQEDTSFGGNLGRAVFQAKKRVLEPFGLVEEGAKTAPGKKRPVEQSPQEPDSSSGIGKTGQQPAKKRLNFGQTGDSESVPDPQPLGEPPATPAAVGPTTMASGGGAPMADNNEGADGVGNASGNWHCDSTWLGDRVITTSTRTWALPTYNNHLYKQISSASTGASNDNHYFGYSTPWGYFDFNRFHCHFSPRDWQRLINNNWGFRPKRLNFKLFNIQVKEVTTNDGVTTIANNLTSTVQVFSDSEYQLPYVLGSAHQGCLPPFPADVFMIPQYGYLTLNNGSQAVGRSSFYCLEYFPSQMLRTGNNFTFSYTFEEVPFHSSYAHSQSLDRLMNPLIDQYLYYLNRTQNQSGSAQNKDLLFSRGSPAGMSVQPKNWLPGPCYRQQRVSKTKTDNNNSNFTWTGASKYNLNGRESIINPGTAMASHKDDKDKFFPMSGVMIFGKESAGASNTALDNVMITDEEEIKATNPVATERFGTVAVNFQSSSTDPATGDVHVMGALPGMVWQDRDVYLQGPIWAKIPHTDGHFHPSPLMGGFGLKHPPPQILIKNTPVPANPPAEFSATKFASFITQYSTGQVSVEIEWELQKENSKRWNPEVQYTSNYAKSANVDFTVDNNGLYTEPRPIGTRYLTRPL

SEQ ID NO: 1938 - protein, 736 aa, Artificial Sequence
  Description of Artificial Sequence: Synthetic polypeptide
MAADGYLPDWLEDNLSEGIREWWDLKPGAPKPKANQQKQDNGRGLVLPGYKYLGPFNGLDKGEPVNAADAAALEHDKAYDQQLKAGDNPYLRYNHADAEFQERLQEDTSFGGNLGRAVFQAKKRVLEPFGLVEEGAKTAPGKKRPVEQSPQEPDSSSGIGKTGQQPAKKRLNFGQTGDSESVPDPQPLGEPPATPAAVGPTTMASGGGAPMADNNEGADGVGNASGNWHCDSTWLGDRVITTSTRTWALPTYNNHLYKQISSASTGASNDNHYFGYSTPWGYFDFNRFHCHFSPRDWQRLINNNWGFRPKRLNFKLFNIQVKEVTTNDGVTTIANNLTSTVQVFSDSEYQLPYVLGSAHQGCLPPFPADVFMIPQYGYLTLNNGSQAVGRSSFYCLEYFPSQMLRTGNNFTFSYTFEEVPFHSSYAHSQSLDRLMNPLIDQYLYYLNRTQNQSGSAQNKDLLFSRGSPAGMSVQPKNWLPGPCYRQQRVSKTKTDNNNSNFTWTGASKYNLNGRESIINPGTAMASHKDDEDKFFPMSGVMIFGKESAGASNTALDNVMITDEEEIKATNPVATERFGTVAVNFQSSSTHPATGDVHVMGALPGMVWQDRDVYLQGPIWAKIPHTDGHFHPSPLMGGFGLKHPPPQILIKNTPVPANPPAEFSATKFASFITQYSTGQVSVEIEWELQKENSKRWNPEVQYTSNYAKSANVDFTVDNNGLYTEPRPIGTRYLTRPL

SEQ ID NO: 1939 - protein, 736 aa, Artificial Sequence
  Description of Artificial Sequence: Synthetic polypeptide
MAADGYLPDWLEDNLSEGIREWWDLKPGAPKPKANQQKQDDGRGLVLPGYKYLGPFNGLDKGEPVNAADAAALEHDKAYDQQLKAGDNPYLRYNHADAEFQERLQEDTSFGGNLGRAVFQAKKRVLEPFGLVEEGAKTAPGKKRPVEQSPQEPDSSSGIGKTGQQPAKKRLNFGQTGDSESVPDPQPLGEPPATPAAVGPTTMASGGGAPMADNNEGADGVGNASGNWHCDSTWLGDRVITTSTRTWALPTYNNHLYKQISSASTGASNDNHYFGYSTPWGYFDFNRFHCHFSPRDWQRLINNNWGFRPKRLNFKLFNIQVKEVTTNDGVTTIANNLTSTVQVFSDSEYQLPYVLGSAHQGCLPPFPADVFMIPQYGYLTLNNGSQAVGRSSFYCLEYFPSQMLRTGNNFTFSYTFEDVPFHSSYAHSQSLDRLMNPLIDQYLYYLNRTQNQSGSAQNKDLLFSRGSPAGMSVQLKNWLPGPCYRQQRVSKTKTDNNNSNFTWTGASKYNLNGRESIINPGTAMASHKDDEDKFFPMSGVMIFGKESAGASNTALDNVMITDEEEIKATNPVATERFGTVAVNFQSSSTDPATGDVHVMGALPGMVWQDRDVYLQGPIWAKIPHTDGHFHPSPLMGGFGLKHPPPQILIKNTPVPANPPAEFSATKFASFITQYSTGQVSVEIEWELQKENSKRWNPEVQYTSNYAKSANVDFTVDNNGLYTEPRPIGTRYLTRPL

SEQ ID NO: 1940 - protein, 736 aa, Artificial Sequence
  Description of Artificial Sequence: Synthetic polypeptide
MAADGYLPDWLEDNLSEGIREWWDLKPGAPKPKANQQKQDDGRGLVLPGYKYLGPFNGLDKGEPVNAADAAALEHDKAYDQQLKAGDNPYLRYNHADAEFQERLQEDTSFGGNLGRAVFQAKKRVLEPFGLVEEGAKTAPGKKRPVEQSPQEPDSSSGIGKSGQQPAKKRLNFGQTGDSESVPDPQPLGEPPATPAAVGPTTMASGGGAPMADNNEGADGVGNASGNWHCDSTWLGDRVITTSTRTWALPTYNNHLYKQISSASTGASNDNHYFGYSTPWGYFDFNRFHCHFSPRDWQRLINNNWGFRPKRLNFKLFNIQVKEVTTNDGVTTIANNLTSTVQVFSDSEYQLPYVLGSAHQGCLPPFPADVFMIPQYGYLTLNNGSQAVGRSSFYCLEYFPSQMLRTGNNFTFSYTFEDVPFHSSYAHSQSLDRLMNPLIDQYLYYLNRTQNQSGSAQNKDLLFSRGSPAGMSVQPKNWLPGPCYRQQRVSKTKTDNNNSNFTWTGASKYNLNGRESIINPGTAMASHKDDEDKFFPMSGVMIFGKGSAGASNTALDNVMITDEEEIKATNPVATERFGTVAVNFQSSSTDPATGDVHVMGALPGMVWQDRDVYLQGPIWAKIPHTDGHFHPSPLMGGFGLKHPPPQILIKNTPVPANPPAEFSATKFASFITQYSTGQVSVEIEWELQKENSKRWNPEVQYTSNYAKSANVDFTVDNNGLYTEPRPIGTRYLTRPL

SEQ ID NO: 1941 - protein, 736 aa, Artificial Sequence; identical to SEQ ID NO: 688
  Description of Artificial Sequence: Synthetic polypeptide

SEQ ID NO: 1942 - protein, 742 aa, Artificial Sequence
  Description of Artificial Sequence: Synthetic polypeptide
MAADGYLPDWLEDNLSEGIREWWALKPGAPQPKANQQHQDNGRGLVLPGYKYLGPFNGLDKGEPVNEADAAALEHDKAYDKQLEQGDNPYLKYNHADAEFQQRLATDTSFGGNLGRAVFQAKKRILEPLGLVEEGVKTAPGKKRPLEKTPNRPTNPDSGKAPAKKKQKDGEPADSARRTLDFEDSGAGDGPPEGSSSGEMSHDAEMRAAPGGNAVEAGQGADGVGNASGDWHCDSTWSEGRVTTTSTRTWVLPTYNNHLYLRIGTTANSNTYNGFSTPWGYFDFNRFHCHFSPRDWQRLINNNWGLRPKSMRVKIFNIQVKEVTTSNGETTVANNLTSTVQIFADSTYELPYVMDAGQEGSFPPFPNDVFMVPQYGYCGVVTGKNQNQTDRNAFYCLEYFPSQMLRTGNNFEVSYQFEKVPFHSMYAHSQSLDRMMNPLLDQYLWHLQSTTTGNSLNQGTATTTYGKITTGDFAYYRKNWLPGACIKQQKFSKNANQNYKIPASGGDALLKYDTHTTLNGRWSNMAPGPPMATAGAGDSDFSNSQLIFAGPNPSGNTTTSSNNLLFTSEEEIATTNPRDTDMFGQIADNNQNATTAPHIANLDAMGIVPGMVWQNRDIYYQGPIWAKVPHTDGHFHPSPLMGGFGLKHPPPQIFIKNTPVPANPNTTFSAARINSFLTQYSTGQVAVQIDWEIQKEHSKRWNPEVQFTSNYGTQNSMLWAPDNAGNYHELRAIGSRFLTHHL

SEQ ID NO: 1943 - DNA, 2211 bp, Artificial Sequence
  Description of Artificial Sequence: Synthetic polynucleotide
atggctgccgatggttatcttccagattggctcgaggacaacctctctgagggcattcgcgagtggtgggacttgaaacctggagccccgaagcccaaagccaaccagcaaaagcaggacgacggccggggtctggtgcttcctggctacaagtacctcggacccttcaacggactcgacaagggggagcccgtcaacgcggcggacgcagcggccctcgagcacgacaaggcctacgaccagcagctcaaagcgggtgacaatccgtacctgcggtataaccacgccgacgccgagtttcaggagcgtctgcaagaagatacgtcttttgggggcaacctcgggcgagcagtcttccaggccaagaagcgggttctcgaacctctcggtctggttgaggaaggcgctaaggcggctcctggaaagaaacgtccggtagagcagtcgccacaagagccagactcctcctcgggcatcggcaagacaggccagcagcccgctaaaaagagactcaattttggtcagactggcgactcagagtcagtccccgatccacaacctctcggagaacctccagcagccccctcaggtctgggacctaatacaatggcttcaggcggtggcgctccaatggcagacaataacgaaggcgccgacggagtgggtaattcctcgggaaattggcattgcgattccacatggctgggggacagagtcatcaccaccagcacccgaacctgggccctgcccacctacaacaaccacctctacaagcaaatctccaacggcacctcgggaggaagcaccaacgacaacacctattttggctacagcaccccctgggggtattttgacttcaacagattccactgtcacttttcaccacgtgactggcaacgactcatcaacaacaattggggattccggcccaaaagactcaacttcaagctgttcaacatccaggtcaaggaagtcacgacgaacgaaggcaccaagaccatcgccaataatctcaccagcaccgtgcaggtctttacggactcggagtaccagttaccgtacgtgctaggatccgctcaccagggatgtctgcctccgttcccggcggacgtcttcatggttcctcagtacggctatttaactttaaacaatggaagccaagccctgggacgttcctccttctactgtctggagtatttcccatcgcagatgctgagaaccggcaacaactttcagttcagctacaccttcgaggacgtgcctttccacagcagctacgcgcacagccagagcctggacaggctgatgaatcccctcatcgaccagtacctgtactacctggtcagaacgcaaacgactggaactggagggacgcagactctggcattcagccaagcgggtcctagctcaatggccaaccaggctagaaattgggtgcccggaccttgctaccggcagcagcgcgtctccacgacaaccaaccagaacaacaacagcaactttgcctggacgggagctgccaagtttaagctgaacggccgagactctctaatgaatccgggcgtggcaatggcttcccacaaggatgacgacgaccgcttcttcccttcgagcggggtcctgatttttggcaagcaaggagccgggaacgatggagtggattacagccaagtgctgattacagatgaggaagaaatcaaggctaccaaccccgtggccacagaagaatatggagcagtggccatcaacaaccaggccgccaatacgcaggcgcagaccggactcgtgcacaaccagggggtgattcccggcatggtgtggcagaatagagacgtgtacctgcagggtcccatctgggccaaaattcctcacacggacggcaactttcacccgtctcccctgatgggcggctttggactgaagcacccgcctcctcaaattctcatcaagaacacaccggttccagcggacccgccgcttaccttcaaccaggccaagctgaactctttcatcacgcagtacagcaccggacaggtcagcgtggaaatcgagtgggagctgcagaaagaaaacagcaaacgctggaatccagagattcaatacacttccaactactacaaatctacaaatgtggactttgctgtcaacacggagggggtttatagcgagcctcgccccattggcacccgttacctcacccgcaacctgtaa

SEQ ID NO: 1944 - DNA, 2592 bp, Artificial Sequence
  Description of Artificial Sequence: Synthetic polynucleotide
ctggctgccgatggttatcttccagattggctcgaggacaacctctctgagggcattcgcgagtggtgggacttgaaacctggagccccgaagcccaaagccaaccagcaaaagcaggacgacggccggggtctggtgcttcctggctacaagtacctcggacccttcaacggactcgacaagggggagcccgtcaacgcggcggacgcagcggccctcgagcacgacaaggcctacgaccagcagctcaaagcgggtgacaatccgtacctgcggtataaccacgccgacgccgagtttcaggagcgtctgcaagaagatacgtcttttgggggcaacctcgggcgagcagtcttccaggccaagaagcgggttctcgaacctctcggtctggttgaggaaggcgctaagatggaagtgcagctccaagccagtggtggcggactggtgcaggcaggaggcagcttgaggctcagctgtgccgccagcggcttcaagatcacccactacaccatgggctggttccggcaggcccctggcaaggagagggagttcgtgagcaggattacctggggtggtgacaacaccttctacagcaacagcgtgaagggcaggttcaccatcagcagggacaacgccaagaacaccgtgtacctgcagatgaacagcctgaagcccgaggacaccgccgactactactgtgcagccggcagtaccagcaccgctacccccctgagggtggactactggggcaaaggcactcaggtgacagtgtcttcaggagggggtggcagcgctcctggaaagaaacgtccggtagagcagtcgccacaagagccagactcctcctcgggcatcggcaagacaggccagcagcccgctaaaaagagactcaattttggtcagactggcgactcagagtcagtccccgatccacaacctctcggagaacctccagcagccccctcaggtctgggacctaatacaatggcttcaggcggtggcgctccaatggcagacaataacgaaggcgccgacggagtgggtaattcctcgggaaattggcattgcgattccacatggctgggggacagagtcatcaccaccagcacccgaacctgggccctgcccacctacaacaaccacctctacaagcaaatctccaacggcacctcgggaggaagcaccaacgacaacacctattttggctacagcaccccctgggggtattttgacttcaacagattccactgtcacttttcaccacgtgactggcaacgactcatcaacaacaattggggattccggcccaaaagactcaacttcaagctgttcaacatccaggtcaaggaagtcacgacgaacgaaggcaccaagaccatcgccaataatctcaccagcaccgtgcaggtctttacggactcggagtaccagttaccgtacgtgctaggatccgctcaccagggatgtctgcctccgttcccggcggacgtcttcatggttcctcagtacggctatttaactttaaacaatggaagccaagccctgggacgttcctccttctactgtctggagtatttcccatcgcagatgctgagaaccggcaacaactttcagttcagctacaccttcgaggacgtgcctttccacagcagctacgcgcacagccagagcctggacaggctgatgaatcccctcatcgaccagtacctgtactacctggtcagaacgcaaacgactggaactggagggacgcagactctggcattcagccaagcgggtcctagctcaatggccaaccaggctagaaattgggtgcccggaccttgctaccggcagcagcgcgtctccacgacaaccaaccagaacaacaacagcaactttgcctggacgggagctgccaagtttaagctgaacggccgagactctctaatgaatccgggcgtggcaatggcttcccacaaggatgacgacgaccgcttcttcccttcgagcggggtcctgatttttggcaagcaaggagccgggaacgatggagtggattacagccaagtgctgattacagatgaggaagaaatcaaggctaccaaccccgtggccacagaagaatatggagcagtggccatcaacaaccaggccgccaatacgcaggcgcagaccggactcgtgcacaaccagggggtgattcccggcatggtgtggcagaatagagacgtgtacctgcagggtcccatctgggccaaaattcctcacacggacggcaactttcacccgtctcccctgatgggcggctttggactgaagcacccgcctcctcaaattctcatcaagaacacaccggttccagcggacccgccgcttaccttcaaccaggccaagctgaactctttcatcacgcagtacagcaccggacaggtcagcgtggaaatcgagtgggagctgcagaaagaaaacagcaaacgctggaatccagagattcaatacacttccaactactacaaatctacaaatgtggactttgctgtcaacacggagggggtttatagcgagcctcgccccattggcacccgttacctcacccgcaacctgtaa

SEQ ID NO: 1945 - DNA, 2601 bp, Artificial Sequence
  Description of Artificial Sequence: Synthetic polynucleotide
ctggctgccgatggttatcttccagattggctcgaggacaacctctctgagggcattcgcgagtggtgggacttgaaacctggagccccgaagcccaaagccaaccagcaaaagcaggacgacggccggggtctggtgcttcctggctacaagtacctcggacccttcaacggactcgacaagggggagcccgtcaacgcggcggacgcagcggccctcgagcacgacaaggcctacgaccagcagctcaaagcgggtgacaatccgtacctgcggtataaccacgccgacgccgagtttcaggagcgtctgcaagaagatacgtcttttgggggcaacctcgggcgagcagtcttccaggccaagaagcgggttctcgaacctctcggtctggttgaggaaggcgctaagatggaggtgcagctgcaggcttctggaggaggactggtgcaggctggagggagtctgaggctgtcttgcagtgcctcagtgaggactttctccatctacgccatgggctggtttaggcaggctcccgggaaggagcgcgaattcgtggccggaatcaaccggtctggcgacgtgaccaagtacgctgatttcgtgaaaggccggtttagcatttccagagacaacgccaagaatatggtgtatctgcagatgaactccctgaaacctgaagacacagctctgtactattgtgccgctacttgggcctacgataccgtgggggctctgacatcaggatataatttttggggccaggggacccaggtgacagtgagctccggaggaggaggaagcgctcctggaaagaaacgtccggtagagcagtcgccacaagagccagactcctcctcgggcatcggcaagacaggccagcagcccgctaaaaagagactcaattttggtcagactggcgactcagagtcagtccccgatccacaacctctcggagaacctccagcagccccctcaggtctgggacctaatacaatggcttcaggcggtggcgctccaatggcagacaataacgaaggcgccgacggagtgggtaattcctcgggaaattggcattgcgattccacatggctgggggacagagtcatcaccaccagcacccgaacctgggccctgcccacctacaacaaccacctctacaagcaaatctccaacggcacctcgggaggaagcaccaacgacaacacctattttggctacagcaccccctgggggtattttgacttcaacagattccactgtcacttttcaccacgtgactggcaacgactcatcaacaacaattggggattccggcccaaaagactcaacttcaagctgttcaacatccaggtcaaggaagtcacgacgaacgaaggcaccaagaccatcgccaataatctcaccagcaccgtgcaggtctttacggactcggagtaccagttaccgtacgtgctaggatccgctcaccagggatgtctgcctccgttcccggcggacgtcttcatggttcctcagtacggctatttaactttaaacaatggaagccaagccctgggacgttcctccttctactgtctggagtatttcccatcgcagatgctgagaaccggcaacaactttcagttcagctacaccttcgaggacgtgcctttccacagcagctacgcgcacagccagagcctggacaggctgatgaatcccctcatcgaccagtacctgtactacctggtcagaacgcaaacgactggaactggagggacgcagactctggcattcagccaagcgggtcctagctcaatggccaaccaggctagaaattgggtgcccggaccttgctaccggcagcagcgcgtctccacgacaaccaaccagaacaacaacagcaactttgcctggacgggagctgccaagtttaagctgaacggccgagactctctaatgaatccgggcgtggcaatggcttcccacaaggatgacgacgaccgcttcttcccttcgagcggggtcctgatttttggcaagcaaggagccgggaacgatggagtggattacagccaagtgctgattacagatgaggaagaaatcaaggctaccaaccccgtggccacagaagaatatggagcagtggccatcaacaaccaggccgccaatacgcaggcgcagaccggactcgtgcacaaccagggggtgattcccggcatggtgtggcagaatagagacgtgtacctgcagggtcccatctgggccaaaattcctcacacggacggcaactttcacccgtctcccctgatgggcggctttggactgaagcacccgcctcctcaaattctcatcaagaacacaccggttccagcggacccgccgcttaccttcaaccaggccaagctgaactctttcatcacgcagtacagcaccggacaggtcagcgtggaaatcgagtgggagctgcagaaagaaaacagcaaacgctggaatccagagattcaatacacttccaactactacaaatctacaaatgtggactttgctgtcaacacggagggggtttatagcgagcctcgccccattggcacccgttacctcacccgcaacctgtaa

SEQ ID NO: 1946 - DNA, 2367 bp, Artificial Sequence
  Description of Artificial Sequence: Synthetic polynucleotide
ctggctgccgatggttatcttccagattggctcgaggacaacctctctgagggcattcgcgagtggtgggacttgaaacctggagccccgaagcccaaagccaaccagcaaaagcaggacgacggccggggtctggtgcttcctggctacaagtacctcggacccttcaacggactcgacaagggggagcccgtcaacgcggcggacgcagcggccctcgagcacgacaaggcctacgaccagcagctcaaagcgggtgacaatccgtacctgcggtataaccacgccgacgccgagtttcaggagcgtctgcaagaagatacgtcttttgggggcaacctcgggcgagcagtcttccaggccaagaagcgggttctcgaacctctcggtctggttgaggaaggcgctaagatgccaagcagtgtaatcgatgcgctgcagtacaagctggagggcaccacgaggctgaccaggaagaggggtctgaagctggccacggccctcagccttagcaataagttcgtagagggcagccccagcggcggcggcggcagcggcggcggcggcagcgctcctggaaagaaacgtccggtagagcagtcgccacaagagccagactcctcctcgggcatcggcaagacaggccagcagcccgctaaaaagagactcaattttggtcagactggcgactcagagtcagtccccgatccacaacctctcggagaacctccagcagccccctcaggtctgggacctaatacaatggcttcaggcggtggcgctccaatggcagacaataacgaaggcgccgacggagtgggtaattcctcgggaaattggcattgcgattccacatggctgggggacagagtcatcaccaccagcacccgaacctgggccctgcccacctacaacaaccacctctacaagcaaatctccaacggcacctcgggaggaagcaccaacgacaacacctattttggctacagcaccccctgggggtattttgacttcaacagattccactgtcacttttcaccacgtgactggcaacgactcatcaacaacaattggggattccggcccaaaagactcaacttcaagctgttcaacatccaggtcaaggaagtcacgacgaacgaaggcaccaagaccatcgccaataatctcaccagcaccgtgcaggtctttacggactcggagtaccagttaccgtacgtgctaggatccgctcaccagggatgtctgcctccgttcccggcggacgtcttcatggttcctcagtacggctatttaactttaaacaatggaagccaagccctgggacgttcctccttctactgtctggagtatttcccatcgcagatgctgagaaccggcaacaactttcagttcagctacaccttcgaggacgtgcctttccacagcagctacgcgcacagccagagcctggacaggctgatgaatcccctcatcgaccagtacctgtactacctggtcagaacgcaaacgactggaactggagggacgcagactctggcattcagccaagcgggtcctagctcaatggccaaccaggctagaaattgggtgcccggaccttgctaccggcagcagcgcgtctccacgacaaccaaccagaacaacaacagcaactttgcctggacgggagctgccaagtttaagctgaacggccgagactctctaatgaatccgggcgtggcaatggcttcccacaaggatgacgacgaccgcttcttcccttcgagcggggtcctgatttttggcaagcaaggagccgggaacgatggagtggattacagccaagtgctgattacagatgaggaagaaatcaaggctaccaaccccgtggccacagaagaatatggagcagtggccatcaacaaccaggccgccaatacgcaggcgcagaccggactcgtgcacaaccagggggtgattcccggcatggtgtggcagaatagagacgtgtacctgcagggtcccatctgggccaaaattcctcacacggacggcaactttcacccgtctcccctgatgggcggctttggactgaagcacccgcctcctcaaattctcatcaagaacacaccggttccagcggacccgccgcttaccttcaaccaggccaagctgaactctttcatcacgcagtacagcaccggacaggtcagcgtggaaatcgagtgggagctgcagaaagaaaacagcaaacgctggaatccagagattcaatacacttccaactactacaaatctacaaatgtggactttgctgtcaacacggagggggtttatagcgagcctcgccccattggcacccgttacctcacccgcaacctgtaa

SEQ ID NO: 1947 - DNA, 2328 bp, Artificial Sequence
  Description of Artificial Sequence: Synthetic polynucleotide
ctggctgccgatggttatcttccagattggctcgaggacaacctctctgagggcattcgcgagtggtgggacttgaaacctggagccccgaagcccaaagccaaccagcaaaagcaggacgacggccggggtctggtgcttcctggctacaagtacctcggacccttcaacggactcgacaagggggagcccgtcaacgcggcggacgcagcggccctcgagcacgacaaggcctacgaccagcagctcaaagcgggtgacaatccgtacctgcggtataaccacgccgacgccgagtttcaggagcgtctgcaagaagatacgtcttttgggggcaacctcgggcgagcagtcttccaggccaagaagcgggttctcgaacctctcggtctggttgaggaaggcgctaagatgtataccatctggatgcccgagaaccccaggcccggtaccccctgcgacatcttcaccaacagcaggggcaagcgagccagcaacggcggcggcggcggcagcggcggcggcggcagcgctcctggaaagaaacgtccggtagagcagtcgccacaagagccagactcctcctcgggcatcggcaagacaggccagcagcccgctaaaaagagactcaattttggtcagactggcgactcagagtcagtccccgatccacaacctctcggagaacctccagcagccccctcaggtctgggacctaatacaatggcttcaggcggtggcgctccaatggcagacaataacgaaggcgccgacggagtgggtaattcctcgggaaattggcattgcgattccacatggctgggggacagagtcatcaccaccagcacccgaacctgggccctgcccacctacaacaaccacctctacaagcaaatctccaacggcacctcgggaggaagcaccaacgacaacacctattttggctacagcaccccctgggggtattttgacttcaacagattccactgtcacttttcaccacgtgactggcaacgactcatcaacaacaattggggattccggcccaaaagactcaacttcaagctgttcaacatccaggtcaaggaagtcacgacgaacgaaggcaccaagaccatcgccaataatctcaccagcaccgtgcaggtctttacggactcggagtaccagttaccgtacgtgctaggatccgctcaccagggatgtctgcctccgttcccggcggacgtcttcatggttcctcagtacggctatttaactttaaacaatggaagccaagccctgggacgttcctccttctactgtctggagtatttcccatcgcagatgctgagaaccggcaacaactttcagttcagctacaccttcgaggacgtgcctttccacagcagctacgcgcacagccagagcctggacaggctgatgaatcccctcatcgaccagtacctgtactacctggtcagaacgcaaacgactggaactggagggacgcagactctggcattcagccaagcgggtcctagctcaatggccaaccaggctagaaattgggtgcccggaccttgctaccggcagcagcgcgtctccacgacaaccaaccagaacaacaacagcaactttgcctggacgggagctgccaagtttaagctgaacggccgagactctctaatgaatccgggcgtggcaatggcttcccacaaggatgacgacgaccgcttcttcccttcgagcggggtcctgatttttggcaagcaaggagccgggaacgatggagtggattacagccaagtgctgattacagatgaggaagaaatcaaggctaccaaccccgtggccacagaagaatatggagcagtggccatcaacaaccaggccgccaatacgcaggcgcagaccggactcgtgcacaaccagggggtgattcccggcatggtgtggcagaatagagacgtgtacctgcagggtcccatctgggccaaaattcctcacacggacggcaactttcacccgtctcccctgatgggcggctttggactgaagcacccgcctcctcaaattctcatcaagaacacaccggttccagcggacccgccgcttaccttcaaccaggccaagctgaactctttcatcacgcagtacagcaccggacaggtcagcgtggaaatcgagtgggagctgcagaaagaaaacagcaaacgctggaatccagagattcaatacacttccaactactacaaatctacaaatgtggactttgctgtcaacacggagggggtttatagcgagcctcgccccattggcacccgttacctcacccgcaacctgtaa

SEQ ID NO: 1948 - DNA, 2298 bp, Artificial Sequence
  Description of Artificial Sequence: Synthetic polynucleotide
ctggctgccgatggttatcttccagattggctcgaggacaacctctctgagggcattcgcgagtggtgggacttgaaacctggagccccgaagcccaaagccaaccagcaaaagcaggacgacggccggggtctggtgcttcctggctacaagtacctcggacccttcaacggactcgacaagggggagcccgtcaacgcggcggacgcagcggccctcgagcacgacaaggcctacgaccagcagctcaaagcgggtgacaatccgtacctgcggtataaccacgccgacgccgagtttcaggagcgtctgcaagaagatacgtcttttgggggcaacctcgggcgagcagtcttccaggccaagaagcgggttctcgaacctctcggtctggttgaggaaggcgctaagatgaccttcttctacggcggcagcaggggcaagaggaacaacttcaagaccgaggagtacggcggcggcggcagcggcggcggcggcagcgctcctggaaagaaacgtccggtagagcagtcgccacaagagccagactcctcctcgggcatcggcaagacaggccagcagcccgctaaaaagagactcaattttggtcagactggcgactcagagtcagtccccgatccacaacctctcggagaacctccagcagccccctcaggtctgggacctaatacaatggcttcaggcggtggcgctccaatggcagacaataacgaaggcgccgacggagtgggtaattcctcgggaaattggcattgcgattccacatggctgggggacagagtcatcaccaccagcacccgaacctgggccctgcccacctacaacaaccacctctacaagcaaatctccaacggcacctcgggaggaagcaccaacgacaacacctattttggctacagcaccccctgggggtattttgacttcaacagattccactgtcacttttcaccacgtgactggcaacgactcatcaacaacaattggggattccggcccaaaagactcaacttcaagctgttcaacatccaggtcaaggaagtcacgacgaacgaaggcaccaagaccatcgccaataatctcaccagcaccgtgcaggtctttacggactcggagtaccagttaccgtacgtgctaggatccgctcaccagggatgtctgcctccgttcccggcggacgtcttcatggttcctcagtacggctatttaactttaaacaatggaagccaagccctgggacgttcctccttctactgtctggagtatttcccatcgcagatgctgagaaccggcaacaactttcagttcagctacaccttcgaggacgtgcctttccacagcagctacgcgcacagccagagcctggacaggctgatgaatcccctcatcgaccagtacctgtactacctggtcagaacgcaaacgactggaactggagggacgcagactctggcattcagccaagcgggtcctagctcaatggccaaccaggctagaaattgggtgcccggaccttgctaccggcagcagcgcgtctccacgacaaccaaccagaacaacaacagcaactttgcctggacgggagctgccaagtttaagctgaacggccgagactctctaatgaatccgggcgtggcaatggcttcccacaaggatgacgacgaccgcttcttcccttcgagcggggtcctgatttttggcaagcaaggagccgggaacgatggagtggattacagccaagtgctgattacagatgaggaagaaatcaaggctaccaaccccgtggccacagaagaatatggagcagtggccatcaacaaccaggccgccaatacgcaggcgcagaccggactcgtgcacaaccagggggtgattcccggcatggtgtggcagaatagagacgtgtacctgcagggtcccatctgggccaaaattcctcacacggacggcaactttcacccgtctcccctgatgggcggctttggactgaagcacccgcctcctcaaattctcatcaagaacacaccggttccagcggacccgccgcttaccttcaaccaggccaagctgaactctttcatcacgcagtacagcaccggacaggtcagcgtggaaatcgagtgggagctgcagaaagaaaacagcaaacgctggaatccagagattcaatacacttccaactactacaaatctacaaatgtggactttgctgtcaacacggagggggtttatagcgagcctcgccccattggcacccgttacctcacccgcaacctgtaa

SEQ ID NO: 1949 - DNA, 2211 bp, Artificial Sequence
  Description of Artificial Sequence: Synthetic polynucleotide
atggctgccgatggttatcttccagattggctcgaggacaaccttagtgaaggaattcgcgagtggtgggctttgaaacctggagcccctcaacccaaggcaaatcaacaacatcaagacaacgctcgaggtcttgtgcttccgggttacaaataccttggacccggcaacggactcgacaagggggagccggtcaacgcagcagacgcggcggccctcgagcacgacaaggcctacgaccagcagctcaaggccggagacaacccgtacctcaagtacaaccacgccgacgccgagttccaggagcggctcaaagaagatacgtcttttgggggcaacctcgggcgagcagtcttccaggccaaaaagaggcttcttgaacctcttggtctggttgaggaagcggctaaggcggctcctggaaagaagaggcctgtagagcagtctcctcaggaaccggactcctccgcgggtattggcaaatcgggtgcacagcccgctaaaaagagactcaatttcggtcagactggcgacacagagtcagtcccagaccctcaaccaatcggagaacctcccgcagccccctcaggtgtgggatctcttacaatggcttcaggtggtggcgcaccagtggcagacaataacgaaggtgccgatggagtgggtagttcctcgggaaattggcattgcgattcccaatggctgggggacagagtcatcaccaccagcacccgaacctgggccctgcccacctacaacaatcacctctacaagcaaatctccaacagcacatctggaggatcttcaaatgacaacgcctacttcggctacagcaccccctgggggtattttgacttcaacagattccactgccacttctcaccacgtgactggcagcgactcatcaacaacaactggggattccggcctaagcgactcaacttcaagctcttcaacattcaggtcaaagaggttacggacaacaatggagtcaagaccatcgccaataaccttaccagcacggtccaggtcttcacggactcagactatcagctcccgtacgtgctcgggtcggctcacgagggctgcctcccgccgttcccagcggacgttttcatgattcctcagtacgggtatctgacgcttaatgatggaagccaggccgtgggtcgttcgtccttttactgcctggaatatttcccgtcgcaaatgctaagaacgggtaacaacttccagttcaactacgagtttgagaacgtacctttccatagcagctacgctcacagccaaagcctggaccgactaatgaatccactcatcgaccaatacttgtactatctctcaaagactattaacgattctggacagaatcaacaaacgctaaaattcagtgtggccggacccagcaacatggctgtccagggaagaaactacatacctggacccagctaccgacaacaacgtgtctcaaccactgtgactcaaaacaacaacagcgaatttgcttggcctggagcttcttcttgggctctcaatggacgtaatagcttgatgaatcctggacctgctatggccagccacaaagaaggagaggaccgtttctttcctttgtctggatctttaatttttggcaaacaaggaactggaagagacaacgtggatgcggacgaagtcatgataaccaacgaagaagaaattaaaactactaacccggtagcaacggagtcctatggacaagtggccataaaccaccagagtgcccaagcacaggcgcagaccggctgggttcaaaaccaaggaatacttccgggtatggtttggcaggacagagatgtgtacctgcaaggacccatttgggccaaaattcctcacacggacggcaactttcacccttctccgctgatgggagggtttggaatgaagcacccgcctcctcagatcctcatcaaaaacacacctgtacctgcggatcctccaacggccttcaacaaggacaagctgaactctttcatcacccagtattctactggccaagtcagcgtggagatcgagtgggagctgcagaaggaaaacagcaagcgctggaacccggagatccagtacacttccaactattacaagtctaataatgttgaatttgctgttaatactgaaggtgtatatagtgaaccccgccccattggcaccagatacctgactcgtaatctgtaa

SEQ ID NO: 1950 - DNA, 2277 bp, Artificial Sequence
  Description of Artificial Sequence: Synthetic polynucleotide
ctggctgccgatggttatcttccagattggctcgaggacaaccttagtgaaggaattcgcgagtggtgggctttgaaacctggagcccctcaacccaaggcaaatcaacaacatcaagacaacgctcgaggtcttgtgcttccgggttacaaataccttggacccggcaacggactcgacaagggggagccggtcaacgcagcagacgcggcggccctcgagcacgacaaggcctacgaccagcagctcaaggccggagacaacccgtacctcaagtacaaccacgccgacgccgagttccaggagcggctcaaagaagatacgtcttttgggggcaacctcgggcgagcagtcttccaggccaaaaagaggcttcttgaacctcttggtctggttgaggaagcggctaagatgaacaaccagaagatcgtgaacctgaaggagaaggtggcccagctggaggccggcggcggcggcagcgctcctggaaagaagaggcctgtagagcagtctcctcaggaaccggactcctccgcgggtattggcaaatcgggtgcacagcccgctaaaaagagactcaatttcggtcagactggcgacacagagtcagtcccagaccctcaaccaatcggagaacctcccgcagccccctcaggtgtgggatctcttacaatggcttcaggtggtggcgcaccagtggcagacaataacgaaggtgccgatggagtgggtagttcctcgggaaattggcattgcgattcccaatggctgggggacagagtcatcaccaccagcacccgaacctgggccctgcccacctacaacaatcacctctacaagcaaatctccaacagcacatctggaggatcttcaaatgacaacgcctacttcggctacagcaccccctgggggtattttgacttcaacagattccactgccacttctcaccacgtgactggcagcgactcatcaacaacaactggggattccggcctaagcgactcaacttcaagctcttcaacattcaggtcaaagaggttacggacaacaatggagtcaagaccatcgccaataaccttaccagcacggtccaggtcttcacggactcagactatcagctcccgtacgtgctcgggtcggctcacgagggctgcctcccgccgttcccagcggacgttttcatgattcctcagtacgggtatctgacgcttaatgatggaagccaggccgtgggtcgttcgtccttttactgcctggaatatttcccgtcgcaaatgctaagaacgggtaacaacttccagttcaactacgagtttgagaacgtacctttccatagcagctacgctcacagccaaagcctggaccgactaatgaatccactcatcgaccaatacttgtactatctctcaaagactattaacgattctggacagaatcaacaaacgctaaaattcagtgtggccggacccagcaacatggctgtccagggaagaaactacatacctggacccagctaccgacaacaacgtgtctcaaccactgtgactcaaaacaacaacagcgaatttgcttggcctggagcttcttcttgggctctcaatggacgtaatagcttgatgaatcctggacctgctatggccagccacaaagaaggagaggaccgtttctttcctttgtctggatctttaatttttggcaaacaaggaactggaagagacaacgtggatgcggacgaagtcatgataaccaacgaagaagaaattaaaactactaacccggtagcaacggagtcctatggacaagtggccataaaccaccagagtgcccaagcacaggcgcagaccggctgggttcaaaaccaaggaatacttccgggtatggtttggcaggacagagatgtgtacctgcaaggacccatttgggccaaaattcctcacacggacggcaactttcacccttctccgctgatgggagggtttggaatgaagcacccgcctcctcagatcctcatcaaaaacacacctgtacctgcggatcctccaacggccttcaacaaggacaagctgaactctttcatcacccagtattctactggccaagtcagcgtggagatcgagtgggagctgcagaaggaaaacagcaagcgctggaacccggagatccagtacacttccaactattacaagtctaataatgttgaatttgctgttaatactgaaggtgtatatagtgaaccccgccccattggcaccagatacctgactcgtaatctgtaa

SEQ ID NO: 1951 - DNA, 2313 bp, Artificial Sequence
  Description of Artificial Sequence: Synthetic polynucleotide
ctggctgccgatggttatcttccagattggctcgaggacaaccttagtgaaggaattcgcgagtggtgggctttgaaacctggagcccctcaacccaaggcaaatcaacaacatcaagacaacgctcgaggtcttgtgcttccgggttacaaataccttggacccggcaacggactcgacaagggggagccggtcaacgcagcagacgcggcggccctcgagcacgacaaggcctacgaccagcagctcaaggccggagacaacccgtacctcaagtacaaccacgccgacgccgagttccaggagcggctcaaagaagatacgtcttttgggggcaacctcgggcgagcagtcttccaggccaaaaagaggcttcttgaacctcttggtctggttgaggaagcggctaagatgtataccatctggatgcccgagaaccccaggcccggtaccccctgcgacatcttcaccaacagcaggggcaagcgagccagcaacggcggcggcggcggcagcgctcctggaaagaagaggcctgtagagcagtctcctcaggaaccggactcctccgcgggtattggcaaatcgggtgcacagcccgctaaaaagagactcaatttcggtcagactggcgacacagagtcagtcccagaccctcaaccaatcggagaacctcccgcagccccctcaggtgtgggatctcttacaatggcttcaggtggtggcgcaccagtggcagacaataacgaaggtgccgatggagtgggtagttcctcgggaaattggcattgcgattcccaatggctgggggacagagtcatcaccaccagcacccgaacctgggccctgcccacctacaacaatcacctctacaagcaaatctccaacagcacatctggaggatcttcaaatgacaacgcctacttcggctacagcaccccctgggggtattttgacttcaacagattccactgccacttctcaccacgtgactggcagcgactcatcaacaacaactggggattccggcctaagcgactcaacttcaagctcttcaacattcaggtcaaagaggttacggacaacaatggagtcaagaccatcgccaataaccttaccagcacggtccaggtcttcacggactcagactatcagctcccgtacgtgctcgggtcggctcacgagggctgcctcccgccgttcccagcggacgttttcatgattcctcagtacgggtatctgacgcttaatgatggaagccaggccgtgggtcgttcgtccttttactgcctggaatatttcccgtcgcaaatgctaagaacgggtaacaacttccagttcaactacgagtttgagaacgtacctttccatagcagctacgctcacagccaaagcctggaccgactaatgaatccactcatcgaccaatacttgtactatctctcaaagactattaacgattctggacagaatcaacaaacgctaaaattcagtgtggccggacccagcaacatggctgtccagggaagaaactacatacctggacccagctaccgacaacaacgtgtctcaaccactgtgactcaaaacaacaacagcgaatttgcttggcctggagcttcttcttgggctctcaatggacgtaatagcttgatgaatcctggacctgctatggccagccacaaagaaggagaggaccgtttctttcctttgtctggatctttaatttttggcaaacaaggaactggaagagacaacgtggatgcggacgaagtcatgataaccaacgaagaagaaattaaaactactaacccggtagcaacggagtcctatggacaagtggccataaaccaccagagtgcccaagcacaggcgcagaccggctgggttcaaaaccaaggaatacttccgggtatggtttggcaggacagagatgtgtacctgcaaggacccatttgggccaaaattcctcacacggacggcaactttcacccttctccgctgatgggagggtttggaatgaagcacccgcctcctcagatcctcatcaaaaacacacctgtacctgcggatcctccaacggccttcaacaaggacaagctgaactctttcatcacccagtattctactggccaagtcagcgtggagatcgagtgggagctgcagaaggaaaacagcaagcgctggaacccggagatccagtacacttccaactattacaagtctaataatgttgaatttgctgttaatactgaaggtgtatatagtgaaccccgccccattggcaccagatacctgactcgtaatctgtaa

SEQ ID NO: 1952 - DNA, 2283 bp, Artificial Sequence
  Description of Artificial Sequence: Synthetic polynucleotide
ctggctgccgatggttatcttccagattggctcgaggacaaccttagtgaaggaattcgcgagtggtgggctttgaaacctggagcccctcaacccaaggcaaatcaacaacatcaagacaacgctcgaggtcttgtgcttccgggttacaaataccttggacccggcaacggactcgacaagggggagccggtcaacgcagcagacgcggcggccctcgagcacgacaaggcctacgaccagcagctcaaggccggagacaacccgtacctcaagtacaaccacgccgacgccgagttccaggagcggctcaaagaagatacgtcttttgggggcaacctcgggcgagcagtcttccaggccaaaaagaggcttcttgaacctcttggtctggttgaggaagcggctaagatgaccttcttctacggcggcagcaggggcaagaggaacaacttcaagaccgaggagtacggcggcggcggcagcgctcctggaaagaagaggcctgtagagcagtctcctcaggaaccggactcctccgcgggtattggcaaatcgggtgcacagcccgctaaaaagagactcaatttcggtcagactggcgacacagagtcagtcccagaccctcaaccaatcggagaacctcccgcagccccctcaggtgtgggatctcttacaatggcttcaggtggtggcgcaccagtggcagacaataacgaaggtgccgatggagtgggtagttcctcgggaaattggcattgcgattcccaatggctgggggacagagtcatcaccaccagcacccgaacctgggccctgcccacctacaacaatcacctctacaagcaaatctccaacagcacatctggaggatcttcaaatgacaacgcctacttcggctacagcaccccctgggggtattttgacttcaacagattccactgccacttctcaccacgtgactggcagcgactcatcaacaacaactggggattccggcctaagcgactcaacttcaagctcttcaacattcaggtcaaagaggttacggacaacaatggagtcaagaccatcgccaataaccttaccagcacggtccaggtcttcacggactcagactatcagctcccgtacgtgctcgggtcggctcacgagggctgcctcccgccgttcccagcggacgttttcatgattcctcagtacgggtatctgacgcttaatgatggaagccaggccgtgggtcgttcgtccttttactgcctggaatatttcccgtcgcaaatgctaagaacgggtaacaacttccagttcaactacgagtttgagaacgtacctttccatagcagctacgctcacagccaaagcctggaccgactaatgaatccactcatcgaccaatacttgtactatctctcaaagactattaacgattctggacagaatcaacaaacgctaaaattcagtgtggccggacccagcaacatggctgtccagggaagaaactacatacctggacccagctaccgacaacaacgtgtctcaaccactgtgactcaaaacaacaacagcgaatttgcttggcctggagcttcttcttgggctctcaatggacgtaatagcttgatgaatcctggacctgctatggccagccacaaagaaggagaggaccgtttctttcctttgtctggatctttaatttttggcaaacaaggaactggaagagacaacgtggatgcggacgaagtcatgataaccaacgaagaagaaattaaaactactaacccggtagcaacggagtcctatggacaagtggccataaaccaccagagtgcccaagcacaggcgcagaccggctgggttcaaaaccaaggaatacttccgggtatggtttggcaggacagagatgtgtacctgcaaggacccatttgggccaaaattcctcacacggacggcaactttcacccttctccgctgatgggagggtttggaatgaagcacccgcctcctcagatcctcatcaaaaacacacctgtacctgcggatcctccaacggccttcaacaaggacaagctgaactctttcatcacccagtattctactggccaagtcagcgtggagatcgagtgggagctgcagaaggaaaacagcaagcgctggaacccggagatccagtacacttccaactattacaagtctaataatgttgaatttgctgttaatactgaaggtgtatatagtgaaccccgccccattggcaccagatacctgactcgtaatctgtaa

SEQ ID NO: 1953 - DNA, 2283 bp, Artificial Sequence
  Description of Artificial Sequence: Synthetic polynucleotide
ctggctgccgatggttatcttccagattggctcgaggacaaccttagtgaaggaattcgcgagtggtgggctttgaaacctggagcccctcaacccaaggcaaatcaacaacatcaagacaacgctcgaggtcttgtgcttccgggttacaaataccttggacccggcaacggactcgacaagggggagccggtcaacgcagcagacgcggcggccctcgagcacgacaaggcctacgaccagcagctcaaggccggagacaacccgtacctcaagtacaaccacgccgacgccgagttccaggagcggctcaaagaagatacgtcttttgggggcaacctcgggcgagcagtcttccaggccaaaaagaggcttcttgaacctcttggtctggttgaggaagcggctaagatggcagctgcggccgccgcggctgcagcggctgcagccgccgcagctgcggctgcagcgggcggcggcggcagcgctcctggaaagaagaggcctgtagagcagtctcctcaggaaccggactcctccgcgggtattggcaaatcgggtgcacagcccgctaaaaagagactcaatttcggtcagactggcgacacagagtcagtcccagaccctcaaccaatcggagaacctcccgcagccccctcaggtgtgggatctcttacaatggcttcaggtggtggcgcaccagtggcagacaataacgaaggtgccgatggagtgggtagttcctcgggaaattggcattgcgattcccaatggctgggggacagagtcatcaccaccagcacccgaacctgggccctgcccacctacaacaatcacctctacaagcaaatctccaacagcacatctggaggatcttcaaatgacaacgcctacttcggctacagcaccccctgggggtattttgacttcaacagattccactgccacttctcaccacgtgactggcagcgactcatcaacaacaactggggattccggcctaagcgactcaacttcaagctcttcaacattcaggtcaaagaggttacggacaacaatggagtcaagaccatcgccaataaccttaccagcacggtccaggtcttcacggactcagactatcagctcccgtacgtgctcgggtcggctcacgagggctgcctcccgccgttcccagcggacgttttcatgattcctcagtacgggtatctgacgcttaatgatggaagccaggccgtgggtcgttcgtccttttactgcctggaatatttcccgtcgcaaatgctaagaacgggtaacaacttccagttcaactacgagtttgagaacgtacctttccatagcagctacgctcacagccaaagcctggaccgactaatgaatccactcatcgaccaatacttgtactatctctcaaagactattaacgattctggacagaatcaacaaacgctaaaattcagtgtggccggacccagcaacatggctgtccagggaagaaactacatacctggacccagctaccgacaacaacgtgtctcaaccactgtgactcaaaacaacaacagcgaatttgcttggcctggagcttcttcttgggctctcaatggacgtaatagcttgatgaatcctggacctgctatggccagccacaaagaaggagaggaccgtttctttcctttgtctggatctttaatttttggcaaacaaggaactggaagagacaacgtggatgcggacgaagtcatgataaccaacgaagaagaaattaaaactactaacccggtagcaacggagtcctatggacaagtggccataaaccaccagagtgcccaagcacaggcgcagaccggctgggttcaaaaccaaggaatacttccgggtatggtttggcaggacagagatgtgtacctgcaaggacccatttgggccaaaattcctcacacggacggcaactttcacccttctccgctgatgggagggtttggaatgaagcacccgcctcctcagatcctcatcaaaaacacacctgtacctgcggatcctccaacggccttcaacaaggacaagctgaactctttcatcacccagtattctactggccaagtcagcgtggagatcgagtgggagctgcagaaggaaaacagcaagcgctggaacccggagatccagtacacttccaactattacaagtctaataatgttgaatttgctgttaatactgaaggtgtatatagtgaaccccgccccattggcaccagatacctgactcgtaatctgtaa

SEQ ID NO: 1954 - protein, 726 aa, Artificial Sequence
  Description of Artificial Sequence: Synthetic polypeptide
MEVQLQASGGGLVQAGGSLRLSCAASGFKITHYTMGWFRQAPGKEREFVSRITWGGDNTFYSNSVKGRFTISRDNAKNTVYLQMNSLKPEDTADYYCAAGSTSTATPLRVDYWGKGTQVTVSSGGGGSAPGKKRPVEQSPQEPDSSSGIGKTGQQPAKKRLNFGQTGDSESVPDPQPLGEPPAAPSGLGPNTMASGGGAPMADNNEGADGVGNSSGNWHCDSTWLGDRVITTSTRTWALPTYNNHLYKQISNGTSGGSTNDNTYFGYSTPWGYFDFNRFHCHFSPRDWQRLINNNWGFRPKRLNFKLFNIQVKEVTTNEGTKTIANNLTSTVQVFTDSEYQLPYVLGSAHQGCLPPFPADVFMVPQYGYLTLNNGSQALGRSSFYCLEYFPSQMLRTGNNFQFSYTFEDVPFHSSYAHSQSLDRLMNPLIDQYLYYLVRTQTTGTGGTQTLAFSQAGPSSMANQARNWVPGPCYRQQRVSTTTNQNNNSNFAWTGAAKFKLNGRDSLMNPGVAMASHKDDDDRFFPSSGVLIFGKQGAGNDGVDYSQVLITDEEEIKATNPVATEEYGAVAINNQAANTQAQTGLVHNQGVIPGMVWQNRDVYLQGPIWAKIPHTDGNFHPSPLMGGFGLKHPPPQILIKNTPVPADPPLTFNQAKLNSFITQYSTGQVSVEIEWELQKENSKRWNPEIQYTSNYYKSTNVDFAVNTEGVYSEPRPIGTRYLTRNL

SEQ ID NO: 1955 - protein, 729 aa, Artificial Sequence
  Description of Artificial Sequence: Synthetic polypeptide
MEVQLQASGGGLVQAGGSLRLSCSASVRTFSIYAMGWFRQAPGKEREFVAGINRSGDVTKYADFVKGRFSISRDNAKNMVYLQMNSLKPEDTALYYCAATWAYDTVGALTSGYNFWGQGTQVTVSSGGGGSAPGKKRPVEQSPQEPDSSSGIGKTGQQPAKKRLNFGQTGDSESVPDPQPLGEPPAAPSGLGPNTMASGGGAPMADNNEGADGVGNSSGNWHCDSTWLGDRVITTSTRTWALPTYNNHLYKQISNGTSGGSTNDNTYFGYSTPWGYFDFNRFHCHFSPRDWQRLINNNWGFRPKRLNFKLFNIQVKEVTTNEGTKTIANNLTSTVQVFTDSEYQLPYVLGSAHQGCLPPFPADVFMVPQYGYLTLNNGSQALGRSSFYCLEYFPSQMLRTGNNFQFSYTFEDVPFHSSYAHSQSLDRLMNPLIDQYLYYLVRTQTTGTGGTQTLAFSQAGPSSMANQARNWVPGPCYRQQRVSTTTNQNNNSNFAWTGAAKFKLNGRDSLMNPGVAMASHKDDDDRFFPSSGVLIFGKQGAGNDGVDYSQVLITDEEEIKATNPVATEEYGAVAINNQAANTQAQTGLVHNQGVIPGMVWQNRDVYLQGPIWAKIPHTDGNFHPSPLMGGFGLKHPPPQILIKNTPVPADPPLTFNQAKLNSFITQYSTGQVSVEIEWELQKENSKRWNPEIQYTSNYYKSTNVDFAVNTEGVYSEPRPIGTRYLTRNL

SEQ ID NO: 1956 - protein, 651 aa, Artificial Sequence
  Description of Artificial Sequence: Synthetic polypeptide
MPSSVIDALQYKLEGTTRLTRKRGLKLATALSLSNKFVEGSPSGGGGSGGGGSAPGKKRPVEQSPQEPDSSSGIGKTGQQPAKKRLNFGQTGDSESVPDPQPLGEPPAAPSGLGPNTMASGGGAPMADNNEGADGVGNSSGNWHCDSTWLGDRVITTSTRTWALPTYNNHLYKQISNGTSGGSTNDNTYFGYSTPWGYFDFNRFHCHFSPRDWQRLINNNWGFRPKRLNFKLFNIQVKEVTTNEGTKTIANNLTSTVQVFTDSEYQLPYVLGSAHQGCLPPFPADVFMVPQYGYLTLNNGSQALGRSSFYCLEYFPSQMLRTGNNFQFSYTFEDVPFHSSYAHSQSLDRLMNPLIDQYLYYLVRTQTTGTGGTQTLAFSQAGPSSMANQARNWVPGPCYRQQRVSTTTNQNNNSNFAWTGAAKFKLNGRDSLMNPGVAMASHKDDDDRFFPSSGVLIFGKQGAGNDGVDYSQVLITDEEEIKATNPVATEEYGAVAINNQAANTQAQTGLVHNQGVIPGMVWQNRDVYLQGPIWAKIPHTDGNFHPSPLMGGFGLKHPPPQILIKNTPVPADPPLTFNQAKLNSFITQYSTGQVSVEIEWELQKENSKRWNPEIQYTSNYYKSTNVDFAVNTEGVYSEPRPIGTRYLTRNL

SEQ ID NO: 1957 - protein, 638 aa, Artificial Sequence
  Description of Artificial Sequence: Synthetic polypeptide
MYTIWMPENPRPGTPCDIFTNSRGKRASNGGGGGSGGGGSAPGKKRPVEQSPQEPDSSSGIGKTGQQPAKKRLNFGQTGDSESVPDPQPLGEPPAAPSGLGPNTMASGGGAPMADNNEGADGVGNSSGNWHCDSTWLGDRVITTSTRTWALPTYNNHLYKQISNGTSGGSTNDNTYFGYSTPWGYFDFNRFHCHFSPRDWQRLINNNWGFRPKRLNFKLFNIQVKEVTTNEGTKTIANNLTSTVQVFTDSEYQLPYVLGSAHQGCLPPFPADVFMVPQYGYLTLNNGSQALGRSSFYCLEYFPSQMLRTGNNFQFSYTFEDVPFHSSYAHSQSLDRLMNPLIDQYLYYLVRTQTTGTGGTQTLAFSQAGPSSMANQARNWVPGPCYRQQRVSTTTNQNNNSNFAWTGAAKFKLNGRDSLMNPGVAMASHKDDDDRFFPSSGVLIFGKQGAGNDGVDYSQVLITDEEEIKATNPVATEEYGAVAINNQAANTQAQTGLVHNQGVIPGMVWQNRDVYLQGPIWAKIPHTDGNFHPSPLMGGFGLKHPPPQILIKNTPVPADPPLTFNQAKLNSFITQYSTGQVSVEIEWELQKENSKRWNPEIQYTSNYYKSTNVDFAVNTEGVYSEPRPIGTRYLTRNL

SEQ ID NO: 1958 - protein, 628 aa, Artificial Sequence
  Description of Artificial Sequence: Synthetic polypeptide
MTFFYGGSRGKRNNFKTEEYGGGGSGGGGSAPGKKRPVEQSPQEPDSSSGIGKTGQQPAKKRLNFGQTGDSESVPDPQPLGEPPAAPSGLGPNTMASGGGAPMADNNEGADGVGNSSGNWHCDSTWLGDRVITTSTRTWALPTYNNHLYKQISNGTSGGSTNDNTYFGYSTPWGYFDFNRFHCHFSPRDWQRLINNNWGFRPKRLNFKLFNIQVKEVTTNEGTKTIANNLTSTVQVFTDSEYQLPYVLGSAHQGCLPPFPADVFMVPQYGYLTLNNGSQALGRSSFYCLEYFPSQMLRTGNNFQFSYTFEDVPFHSSYAHSQSLDRLMNPLIDQYLYYLVRTQTTGTGGTQTLAFSQAGPSSMANQARNWVPGPCYRQQRVSTTTNQNNNSNFAWTGAAKFKLNGRDSLMNPGVAMASHKDDDDRFFPSSGVLIFGKQGAGNDGVDYSQVLITDEEEIKATNPVATEEYGAVAINNQAANTQAQTGLVHNQGVIPGMVWQNRDVYLQGPIWAKIPHTDGNFHPSPLMGGFGLKHPPPQILIKNTPVPADPPLTFNQAKLNSFITQYSTGQVSVEIEWELQKENSKRWNPEIQYTSNYYKSTNVDFAVNTEGVYSEPRPIGTRYLTRNL

SEQ ID NO: 1959 - protein, 621 aa, Artificial Sequence
  Description of Artificial Sequence: Synthetic polypeptide
MNNQKIVNLKEKVAQLEAGGGGSAPGKKRPVEQSPQEPDSSAGIGKSGAQPAKKRLNFGQTGDTESVPDPQPIGEPPAAPSGVGSLTMASGGGAPVADNNEGADGVGSSSGNWHCDSQWLGDRVITTSTRTWALPTYNNHLYKQISNSTSGGSSNDNAYFGYSTPWGYFDFNRFHCHFSPRDWQRLINNNWGFRPKRLNFKLFNIQVKEVTDNNGVKTIANNLTSTVQVFTDSDYQLPYVLGSAHEGCLPPFPADVFMIPQYGYLTLNDGSQAVGRSSFYCLEYFPSQMLRTGNNFQFNYEFENVPFHSSYAHSQSLDRLMNPLIDQYLYYLSKTINDSGQNQQTLKFSVAGPSNMAVQGRNYIPGPSYRQQRVSTTVTQNNNSEFAWPGASSWALNGRNSLMNPGPAMASHKEGEDRFFPLSGSLIFGKQGTGRDNVDADEVMITNEEEIKTTNPVATESYGQVAINHQSAQAQAQTGWVQNQGILPGMVWQDRDVYLQGPIWAKIPHTDGNFHPSPLMGGFGMKHPPPQILIKNTPVPADPPTAFNKDKLNSFITQYSTGQVSVEIEWELQKENSKRWNPEIQYTSNYYKSNNVEFAVNTEGVYSEPRPIGTRYLTRNL

SEQ ID NO: 1960 - protein, 633 aa, Artificial Sequence
  Description of Artificial Sequence: Synthetic polypeptide
MYTIWMPENPRPGTPCDIFTNSRGKRASNGGGGGSAPGKKRPVEQSPQEPDSSAGIGKSGAQPAKKRLNFGQTGDTESVPDPQPIGEPPAAPSGVGSLTMASGGGAPVADNNEGADGVGSSSGNWHCDSQWLGDRVITTSTRTWALPTYNNHLYKQISNSTSGGSSNDNAYFGYSTPWGYFDFNRFHCHFSPRDWQRLINNNWGFRPKRLNFKLFNIQVKEVTDNNGVKTIANNLTSTVQVFTDSDYQLPYVLGSAHEGCLPPFPADVFMIPQYGYLTLNDGSQAVGRSSFYCLEYFPSQMLRTGNNFQFNYEFENVPFHSSYAHSQSLDRLMNPLIDQYLYYLSKTINDSGQNQQTLKFSVAGPSNMAVQGRNYIPGPSYRQQRVSTTVTQNNNSEFAWPGASSWALNGRNSLMNPGPAMASHKEGEDRFFPLSGSLIFGKQGTGRDNVDADEVMITNEEEIKTTNPVATESYGQVAINHQSAQAQAQTGWVQNQGILPGMVWQDRDVYLQGPIWAKIPHTDGNFHPSPLMGGFGMKHPPPQILIKNTPVPADPPTAFNKDKLNSFITQYSTGQVSVEIEWELQKENSKRWNPEIQYTSNYYKSNNVEFAVNTEGVYSEPRPIGTRYLTRNL

SEQ ID NO: 1961 - protein, 623 aa, Artificial Sequence
  Description of Artificial Sequence: Synthetic polypeptide
MTFFYGGSRGKRNNFKTEEYGGGGSAPGKKRPVEQSPQEPDSSAGIGKSGAQPAKKRLNFGQTGDTESVPDPQPIGEPPAAPSGVGSLTMASGGGAPVADNNEGADGVGSSSGNWHCDSQWLGDRVITTSTRTWALPTYNNHLYKQISNSTSGGSSNDNAYFGYSTPWGYFDFNRFHCHFSPRDWQRLINNNWGFRPKRLNFKLFNIQVKEVTDNNGVKTIANNLTSTVQVFTDSDYQLPYVLGSAHEGCLPPFPADVFMIPQYGYLTLNDGSQAVGRSSFYCLEYFPSQMLRTGNNFQFNYEFENVPFHSSYAHSQSLDRLMNPLIDQYLYYLSKTINDSGQNQQTLKFSVAGPSNMAVQGRNYIPGPSYRQQRVSTTVTQNNNSEFAWPGASSWALNGRNSLMNPGPAMASHKEGEDRFFPLSGSLIFGKQGTGRDNVDADEVMITNEEEIKTTNPVATESYGQVAINHQSAQAQAQTGWVQNQGILPGMVWQDRDVYLQGPIWAKIPHTDGNFHPSPLMGGFGMKHPPPQILIKNTPVPADPPTAFNKDKLNSFITQYSTGQVSVEIEWELQKENSKRWNPEIQYTSNYYKSNNVEFAVNTEGVYSEPRPIGTRYLTRNL

SEQ ID NO: 1962 - protein, 623 aa, Artificial Sequence
  Description of Artificial Sequence: Synthetic polypeptide
MAAAAAAAAAAAAAAAAAAAGGGGSAPGKKRPVEQSPQEPDSSAGIGKSGAQPAKKRLNFGQTGDTESVPDPQPIGEPPAAPSGVGSLTMASGGGAPVADNNEGADGVGSSSGNWHCDSQWLGDRVITTSTRTWALPTYNNHLYKQISNSTSGGSSNDNAYFGYSTPWGYFDFNRFHCHFSPRDWQRLINNNWGFRPKRLNFKLFNIQVKEVTDNNGVKTIANNLTSTVQVFTDSDYQLPYVLGSAHEGCLPPFPADVFMIPQYGYLTLNDGSQAVGRSSFYCLEYFPSQMLRTGNNFQFNYEFENVPFHSSYAHSQSLDRLMNPLIDQYLYYLSKTINDSGQNQQTLKFSVAGPSNMAVQGRNYIPGPSYRQQRVSTTVTQNNNSEFAWPGASSWALNGRNSLMNPGPAMASHKEGEDRFFPLSGSLIFGKQGTGRDNVDADEVMITNEEEIKTTNPVATESYGQVAINHQSAQAQAQTGWVQNQGILPGMVWQDRDVYLQGPIWAKIPHTDGNFHPSPLMGGFGMKHPPPQILIKNTPVPADPPTAFNKDKLNSFITQYSTGQVSVEIEWELQKENSKRWNPEIQYTSNYYKSNNVEFAVNTEGVYSEPRPIGTRYLTRNL

SEQ ID NO: 1963 - DNA, 2214 bp, Artificial Sequence
  Description of Artificial Sequence: Synthetic polynucleotide
atggctgccgatggttatcttccagattggctcgaggacaacctctctgagggcattcgcgagtggtgggacttgaaacctggagccccgaagcccaaagccaaccagcaaaagcaggacgacggccggggtctggtgcttcctggctacaagtacctcggacccttcaacggactcgacaagggggagcccgtcaacgcggcggacgcagcggccctcgagcacgacaaggcctacgaccagcagctcaaagcgggtgacaatccgtacctgcggtataaccacgccgacgtcgagtttcaggagcgtctgcaagaagatacgtcttttgggggcaacctcgggcgagcagtcttccaggccaagaagagggttctcgaaccttttggtctggttgaggaaggcgctaagacggctcctggaaagaaacgtccggtagagcagtcgccacaagagccagactcctcctcgggcatcggcaagaaaggccaacagcccgccagaaaaagactcaattttggccagactggcgactcagagtcagttccagaccctcaacctctcggagaacctccagcagcgccctctggtgtgggacctaatacaatggctgcaggcggtggcgcaccaatggcagacaataacgagggcgccgacggagtgggtaattcctcgggaaattggcattgcgattccacatggatgggggacagagtcatcaccaccagcacccgaacctgggccctgcccacctacaacaaccacctctacaagcaaatctccaacggcacctcgggaggaagcaccaacgacaacacctattttggctacagcaccccctgggggtattttgatttcaacagattccactgccacttctcaccacgtgactggcagcgactcatcaacaacaactggggattccggccaaaaagactcagcttcaagctcttcaacatccaggtcaaggaggtcacgcagaatgaaggcaccaagaccatcgccaataaccttaccagcacgattcaggtatttacggactcggaataccagctgccatacgtcctcggctccgcgcaccagggctgcctgcctccgttcccggcggacgtcttcatgattccccagtacggctaccttacactgaacaatggaagtcaagccgtaggccgttcctccttctactgcctggaatattttccttctcaaatgctgagaacgggcaacaactttgagttcagctaccagtttgaggacgtgccttttcacagcagctacgcgcacagccaaagcctggaccggctgatgaaccccctcatcgaccagtacctgtactacctgtctcggactcagtccacgggaggtaccgcaagaactcagcagttgctattttctcaggccgggcctaatacaatggccaatcaggcaaagaactggctgccaggaccctgttaccgccaacaacgcgtctcaacgacaaccgggcaaaacaacaatagcaactctgcctggactgctgggaccaaataccatctgaatggaagaaattcattggctaatcctggcatcgctatggcaacacacaaagacgacgaggagcgtttttttcccagtaacgggatcctgatttttggcaaacaaaatgctgccagagacaatgcggattacagcgatgtcatgctcaccagcgaggaagaaatcaaaaccactaaccctgtggctacagaggaatacggtatcgtggcagataacttgcagcagcaaaacacggctcctcaaattggaactgtcaacagccagggggccttacccggtatggtctggcagaaccgggacgtgtacctgcagggtcccatctgggccaagattcctcacacggacggcaacttccacccatctccgctgatgggcggctttggcctgaaacatcctccgcctcagatcctgatcaagaacacgcctgtacctgcggatcctccgaccaccttcaaccagtcaaagctgaactctttcatcacgcaatacagcaccggacaggtcagcgtggaaattgaatgggagctacagaaggaaaacagcaagcgctggaaccccgagatccagtacacctccaactactacaaatctacaagtgtggactttgctgttaatacagaaggcgtgtactctgaaccccgccccattggcacccgttacctcacccgtaatctgtaa

SEQ ID NO: 1964 - DNA, 2214 bp, Artificial Sequence
  Description of Artificial Sequence: Synthetic polynucleotide
atggctgccgatggttatcttccagattggctcgaggacaacctctctgagggcattcgcgagtggtgggcgctgaaacctggagccccgaagcccaaagccaaccagcaaaagcaggacgacggccggggtctggtgcttcctggctacaagtacctcggacccttcaacggactcgacaagggggagcccgtcaacgcggcggacgcagcggccctcgagcacgacaaggcctacgaccagcagctcaaagcgggtgacaatccgtacctgcggtataaccacgccgacgccgagtttcaggagcgtctgcaagaagatacgtcttttgggggcaacctcgggcgagcagtcttccaggccaagaagcgggttctcgaacctctcggtctggttgaggacggcgctaagacggctcctggaaagaagagaccagtagagcagtcaccccaagaaccagactcctcctcgggcatcggcaagaaaggccaacagcccgccagaaaaagactcaattttggccagactggcgactcagagtcagttccagaccctcaacctctcggagaacctccagcaacccccgctgctgtgggacctactacaatggcttcaggcggtggcgcaccaatggcagacaataacgaaggcgccgacggagtgggtagttcctcgggaaattggcattgcgattccacatggctgggcgacagagtcatcaccaccagcacccgaacctgggccctgcccacctacaacaaccacctctacaagcaaatctccaacgggacatcgggaggagccaccaacgacaacacctacttcggctacagcaccccctgggggtattttgactttaacagattccactgccacttttcaccacgtgactggcagcgactcatcaacaacaactggggattccggcccaagagactcagcttcaagctcttcaacatccaggtcaaggaggtcacgcagaatgaaggcaccaagaccatcgccaataacctcaccagcaccatccaggtgtttacggactcggagtaccagctgccgtacgttctcggctctgcccaccagggctgcctgcctccgttcccggcggacgtgttcatgattccccagtacggctacctaacactcaacaacggtagtcaggccgtgggacgctcctccttctactgcctggaatactttccttcgcagatgctgagaaccggcaacaacttccagtttacttacaccttcgaggacgtgcctttccacagcagctacgcccacagccagagcttggaccggctgatgaatcctctgattgaccagtacctgtactacttgtctcggactcaaacaacaggaggcacggcaaatacgcagactctgggcttcagccaaggtgggcctaatacaatggccaatcaggcaaagaactggctgccaggaccctgttaccgccaacaacgcgtctcaacgacaaccgggcaaaacaacaatagcaactttgcctggactgctgggaccaaataccatctgaatggaagaaattcattggctaatcctggcatcgctatggcaacacacaaggacgacgaggagcgtttttttcccagtaacgggatcctgatttttggcaaacaaaatgctgccagagacaatgcggattacagcgatgtcatgctcaccagcgaggaagaaatcaaaaccactaaccctgtggctacagaggaatacggtatcgtggcagataacttgcagcagcaaaacacggctcctcaaattggaactgtcaacagccagggggccttacccggtatggtctggcagaaccgggacgtgtacctgcagggtcccatctgggccaagattcctcacacggacggcaacttccacccgtctccgctgatgggcggctttggcctgaaacatcctccgcctcagatcctgatcaagaacacgcctgtacctgcggatcctccgaccaccttcaaccagtcaaagctgaactctttcatcacgcaatacagcaccggacaggtcagcgtggaaatcgagtgggagctgcagaaagaaaacagcaagcgctggaaccccgagatccagtacacctccaactactacaaatctacaaatgtggactttgctgtcaacacggagggggtttatagcgagcctcgccccattggcacccgttacctcacccgcaacctgtaa

SEQ ID NO: 1965 - DNA, 2211 bp, Artificial Sequence
  Description of Artificial Sequence: Synthetic polynucleotide
  misc_feature (715)..(715): n is a, c, g, or t
atggctgccgatggttatcttccagattggctcgaggacaacctctctgagggcattcgcgagtggtgggcgctgaaacctggagccccgaagcccaaagccaaccagcaaaagcaggacgacggccggggtctggtgcttcctggctacaagtacctcggacccttcaacggactcgacaagggggagcccgtcaacgcggcggacgcagcggccctcgagcacgacaaggcctacgaccagcagctcaaagcgggtgacaatccgtacctgcggtataaccacgccgacgccgagtttcaggagcgtctgcaagaagatacgtcttttgggggcaacctcgggcgagcagtcttccaggccaagaagcgggttctcgaacctctcggtctggttgaggaaggcgctaagacggctcctggaaagaaacgtccggtagagcagtcgccacaagagccagactcctcctcgggcatcggcaagacaggccagcagcccgctaaaaagaggctcaattttggtcagactggcgactcagagtcagtccccgacccacaacctctcggagaacctccagcaacccccgctgctgtgggacctactacaatggcttcaggcggtggcgcaccaatggcagacaataacgaaggcgccgacggagtgggtaatgcctcaggaaattggcattgcgattccacatggctgggcgacagantcatcaccaccagcacccgaacatgggccttgcccacctataacaaccacctctacaagcaaatctccagtgcttcaacgggggccagcaacgacaaccactacttcggctacagcaccccctgggggtattttgatttcaacagattccactgccatttctcaccacgtgactggcagcgactcatcaacaacaattggggattccggcccaagagactcaacttcaagctcttcaacatccaagtcaaggaggtcacgcagaatgaaggcaccaagaccatcgccaataacctcaccagcaccatccaggtgtttacggactcggagtaccagctgccgtacgttctcggctctgcccaccagggctgcctgcctccgttcccggcggacgtgttcatgattccccagtacggctacctaacactcaacaacggtagtcaggccgtgggacgctcctccttctactgcctggaatattttccatctcaaatgctgcgaactggaaacaattttgaattcagctacaccttcgaggacgtgcctttccacagcagctacgcacacagccagagcttggaccgactgatgaatcctctcatcgaccagtacctgtactacttgtctcggactcaaacaacaggaggcacggcaaatacgcagactctgggcttcagccaaggtgggcctaatacaatggccaatcaggcaaagaactggctgccaggaccctgttaccgccaacaacgcgtctcaacgacaaccgggcaaaacaacaatagcaactttgcctggactgctgggaccaaataccatctgaatggaagaaattcattggctaatcctggcatcgctatggcaacacacaaagacgacgaggagcgtttttttcccagtaacgggatcctgatttttggcaaacaaaatgctgccagagacaatgcggattacagcgatgtcatgctcaccagcgaggaagaaatcaaaaccactaaccctgtggctacagaggaatacggtatcgtggcagataacttgcagcagcaaaacacggctcctcaaattggaactgtcaacagccaggggaccttacccggtatggtctggcagaaccgggacgtgtacctgcagggtcccatctgggccaagattcctcacacggacggcaacttccacccgtctccgctgatgggcggctttggcctgaaacatcctccgcctcagatcctgatcaagaacacgcctgtacctgcggatcctccgaccaccttcaaccagtcaaagctgaactctttcatcacgcaatacagcaccggacaggtcagcgtggaaattgaatgggagctacagaaggaaaacagcaagcgctggaaccccgagatccagtacacctccaattactacaaatctacaagtgtggactttgctgttaatacagaaggcgtgtactctgaaccccgccccattggcacgcgtttcctcacccgtaatctgtaa

SEQ ID NO: 1966 - DNA, 2214 bp, Artificial Sequence
  Description of Artificial Sequence: Synthetic polynucleotide
atggctgccgatggttatcttccagattggctcgaggacaacctctctgagggcattcgcgagtggtgggcgctgaaacctggagccccgaagcccaaagccaaccagcaaaagcaggacgacggccggggtctggtgcttcctggctacaagtacctcggacccttcaacggactcgacaagggggagcccgtcaacgcggcggacgcagcggccctcgagcacgacaaggcctacgaccagcagctcaaagcgggtgacaatccgtacctgcggtataaccacgccgacgccgagtttcaggagcgtctgcaagaagatacgtcttttgggggcaacctcgggcgagcagtcttccaggccaagaagcgggttctcgaacctctcggtctggttgaggaaggcgctaagacggctcctggaaagaaacgtccggtagagcagtcgccacaagagccagactcctcctcgggcatcggcaagacaggccagcagcccgctaaaaagaggctcaattttggccagactggcgactcagagtcagttccagaccctcaacctctcggagaacctccagcagcgccctctggtgtgggacctaatacaatggctgcaggcggtggcgcaccaatggcagacaataacgaaggcgccgacggagtgggtagttcctcgggaaattggcattgcgattccacatggctgggcgacagagtcatcaccaccagcacccgaacctgggccctgcccacctacaacaaccacctctacaagcaaatctccaacgggacatcgggaggagccaccaacgacaacacctacttcggctacagcaccccctgggggtattttgactttaacagattccactgccacttttcaccacgtgactggcagcgactcatcaacaacaactggggattccggcccaagagactcagcttcaagctcttcaacatccaggtcaaggaggtcacgcagaatgaaggcaccaagaccatcgccaataacctcaccagcaccatccaggtgtttacggactcggagtaccagctgccgtacgtactaggatccgctcaccagggatgtctgcctccgttcccggcggacgtgttcatgattccccagtacggctacctaacactcaacaacggtagtcaggccgtgggacgctcctccttctactgcctggaatattttccatctcagatgctgagaacgggcaataactttaccttcagctacaccttcgaggacgtgcctttccacagcagctatgcccacagccagagcttggaccggctgatgaatcctctgattgaccagtacctgtactacttgtctcggactcaaacaacaggaggcacggcaaatacgcagactctgggcttcagccaaggtgggcctaatacaatggccaatcaggcaaagaactggctgccaggaccctgttaccgccaacaacgcgtctcaacgacaaccgggcaaaacaacaatagcaactttgcctggactgctgggaccaaataccatctgaatggaagaaattcattggctaatcctggcatcgctatggcaacacacaaagacgacgaggagcgtttttttcccagtaacgggatcctgatttttggcaaacaaaatgctgccagagacaatgcggattacagcgatgtcatgctcaccagcgaggaagaaatcaaaaccactaaccctgtggctacagaggaatacggtatcgtggcagataacttgcagcagcaaaacacggctcctcaaattggaactgtcaacagccagggggccttacccggtatggtctggcagaaccgggacgtgtacctgcagggtcccatctgggccaagattcctcacacggacggcaacttccacccgtctccgctaatgggaggatttggactgaagcacccacctcctcagatcctgatcaagaacacgccggtacctgcggatcctccgaccaccttcaaccagtcaaagctgtactctttcatcacgcaatacagcaccggacaggtcagcgtggaaattgaatgggagctgcagaaggaaaacagcaagcgctggaaccccgagatccaatacacctccaactactacaaatctacaagtgtggactttgctgttaatacagaaggcgtgtactctgaaccccgccccattggcacccgttacctcacccgtaatctgtaa

SEQ ID NO: 1967 - protein, 737 aa, Artificial Sequence
  Description of Artificial Sequence: Synthetic polypeptide
MAADGYLPDWLEDNLSEGIREWWDLKPGAPKPKANQQKQDDGRGLVLPGYKYLGPFNGLDKGEPVNAADAAALEHDKAYDQQLKAGDNPYLRYNHADVEFQERLQEDTSFGGNLGRAVFQAKKRVLEPFGLVEEGAKTAPGKKRPVEQSPQEPDSSSGIGKKGQQPARKRLNFGQTGDSESVPDPQPLGEPPAAPSGVGPNTMAAGGGAPMADNNEGADGVGNSSGNWHCDSTWMGDRVITTSTRTWALPTYNNHLYKQISNGTSGGSTNDNTYFGYSTPWGYFDFNRFHCHFSPRDWQRLINNNWGFRPKRLSFKLFNIQVKEVTQNEGTKTIANNLTSTIQVFTDSEYQLPYVLGSAHQGCLPPFPADVFMIPQYGYLTLNNGSQAVGRSSFYCLEYFPSQMLRTGNNFEFSYQFEDVPFHSSYAHSQSLDRLMNPLIDQYLYYLSRTQSTGGTARTQQLLFSQAGPNTMANQAKNWLPGPCYRQQRVSTTTGQNNNSNSAWTAGTKYHLNGRNSLANPGIAMATHKDDEERFFPSNGILIFGKQNAARDNADYSDVMLTSEEEIKTTNPVATEEYGIVADNLQQQNTAPQIGTVNSQGALPGMVWQNRDVYLQGPIWAKIPHTDGNFHPSPLMGGFGLKHPPPQILIKNTPVPADPPTTFNQSKLNSFITQYSTGQVSVEIEWELQKENSKRWNPEIQYTSNYYKSTSVDFAVNTEGVYSEPRPIGTRYLTRNL

SEQ ID NO: 1968 - protein, 737 aa, Artificial Sequence
  Description of Artificial Sequence: Synthetic polypeptide
MAADGYLPDWLEDNLSEGIREWWALKPGAPKPKANQQKQDDGRGLVLPGYKYLGPFNGLDKGEPVNAADAAALEHDKAYDQQLKAGDNPYLRYNHADAEFQERLQEDTSFGGNLGRAVFQAKKRVLEPLGLVEDGAKTAPGKKRPVEQSPQEPDSSSGIGKKGQQPARKRLNFGQTGDSESVPDPQPLGEPPATPAAVGPTTMASGGGAPMADNNEGADGVGSSSGNWHCDSTWLGDRVITTSTRTWALPTYNNHLYKQISNGTSGGATNDNTYFGYSTPWGYFDFNRFHCHFSPRDWQRLINNNWGFRPKRLSFKLFNIQVKEVTQNEGTKTIANNLTSTIQVFTDSEYQLPYVLGSAHQGCLPPFPADVFMIPQYGYLTLNNGSQAVGRSSFYCLEYFPSQMLRTGNNFQFTYTFEDVPFHSSYAHSQSLDRLMNPLIDQYLYYLSRTQTTGGTANTQTLGFSQGGPNTMANQAKNWLPGPCYRQQRVSTTTGQNNNSNFAWTAGTKYHLNGRNSLANPGIAMATHKDDEERFFPSNGILIFGKQNAARDNADYSDVMLTSEEEIKTTNPVATEEYGIVADNLQQQNTAPQIGTVNSQGALPGMVWQNRDVYLQGPIWAKIPHTDGNFHPSPLMGGFGLKHPPPQILIKNTPVPADPPTTFNQSKLNSFITQYSTGQVSVEIEWELQKENSKRWNPEIQYTSNYYKSTNVDFAVNTEGVYSEPRPIGTRYLTRNL

SEQ ID NO: 1969 - protein, 736 aa, Artificial Sequence
  Description of Artificial Sequence: Synthetic polypeptide
  MOD_RES (239)..(239): Xaa can be any naturally occurring amino acid
MAADGYLPDWLEDNLSEGIREWWALKPGAPKPKANQQKQDDGRGLVLPGYKYLGPFNGLDKGEPVNAADAAALEHDKAYDQQLKAGDNPYLRYNHADAEFQERLQEDTSFGGNLGRAVFQAKKRVLEPLGLVEEGAKTAPGKKRPVEQSPQEPDSSSGIGKTGQQPAKKRLNFGQTGDSESVPDPQPLGEPPATPAAVGPTTMASGGGAPMADNNEGADGVGNASGNWHCDSTWLGDRXITTSTRTWALPTYNNHLYKQISSASTGASNDNHYFGYSTPWGYFDFNRFHCHFSPRDWQRLINNNWGFRPKRLNFKLFNIQVKEVTQNEGTKTIANNLTSTIQVFTDSEYQLPYVLGSAHQGCLPPFPADVFMIPQYGYLTLNNGSQAVGRSSFYCLEYFPSQMLRTGNNFEFSYTFEDVPFHSSYAHSQSLDRLMNPLIDQYLYYLSRTQTTGGTANTQTLGFSQGGPNTMANQAKNWLPGPCYRQQRVSTTTGQNNNSNFAWTAGTKYHLNGRNSLANPGIAMATHKDDEERFFPSNGILIFGKQNAARDNADYSDVMLTSEEEIKTTNPVATEEYGIVADNLQQQNTAPQIGTVNSQGTLPGMVWQNRDVYLQGPIWAKIPHTDGNFHPSPLMGGFGLKHPPPQILIKNTPVPADPPTTFNQSKLNSFITQYSTGQVSVEIEWELQKENSKRWNPEIQYTSNYYKSTSVDFAVNTEGVYSEPRPIGTRFLTRNL

SEQ ID NO: 1970 - protein, 737 aa, Artificial Sequence
  Description of Artificial Sequence: Synthetic polypeptide
MAADGYLPDWLEDNLSEGIREWWALKPGAPKPKANQQKQDDGRGLVLPGYKYLGPFNGLDKGEPVNAADAAALEHDKAYDQQLKAGDNPYLRYNHADAEFQERLQEDTSFGGNLGRAVFQAKKRVLEPLGLVEEGAKTAPGKKRPVEQSPQEPDSSSGIGKTGQQPAKKRLNFGQTGDSESVPDPQPLGEPPAAPSGVGPNTMAAGGGAPMADNNEGADGVGSSSGNWHCDSTWLGDRVITTSTRTWALPTYNNHLYKQISNGTSGGATNDNTYFGYSTPWGYFDFNRFHCHFSPRDWQRLINNNWGFRPKRLSFKLFNIQVKEVTQNEGTKTIANNLTSTIQVFTDSEYQLPYVLGSAHQGCLPPFPADVFMIPQYGYLTLNNGSQAVGRSSFYCLEYFPSQMLRTGNNFTFSYTFEDVPFHSSYAHSQSLDRLMNPLIDQYLYYLSRTQTTGGTANTQTLGFSQGGPNTMANQAKNWLPGPCYRQQRVSTTTGQNNNSNFAWTAGTKYHLNGRNSLANPGIAMATHKDDEERFFPSNGILIFGKQNAARDNADYSDVMLTSEEEIKTTNPVATEEYGIVADNLQQQNTAPQIGTVNSQGALPGMVWQNRDVYLQGPIWAKIPHTDGNFHPSPLMGGFGLKHPPPQILIKNTPVPADPPTTFNQSKLYSFITQYSTGQVSVEIEWELQKENSKRWNPEIQYTSNYYKSTSVDFAVNTEGVYSEPRPIGTRYLTRNL

SEQ ID NO: 1971 - DNA, 2208 bp, Artificial Sequence
  Description of Artificial Sequence: Synthetic polynucleotide
atggctgccgatggttatcttccagattggctcgaggacaacctctctgagggcattcgcgagtggtgggacttgaaacctggagccccgaaacccaaagccaaccagcaaaagcaggacgacggccggggtctggtgcttcctggctacaagtacctcggacccttcaacggactcgacaagggggagcccgtcaacgcggcggatgcagcggccctcgagcacgacaaagcctacgaccggcagctcgacagcggagacaacccgtacctcaagtacaaccacgccgacgcggagtttcaggagcgccttaaagaagatacgtcttttgggggcaacctcggacgagcagtcttccaggccaagaagagggttctcgaaccttttggtctggttgaggaaggtgctaagacggctcctggaaagaaacgtccggtagagcagtcgccacaagagccagactcctcctcgggcattggcaagacaggccagcagcccgctaaaaagagactcaattttggtcagactggcgactcagagtcagtccccgacccacaacctctcggagaacctccagcaacccccgctgctgtgggacctactacaatggcttcaggtggtggcgcaccagtggcagacaataacgaaggcgccgacggagtgggtagttcctcgggaaattggcattgcgattccacatggctgggcgacagagtcatcaccaccagcacccgaacatgggccttgcccacctataacaaccacctctacaagcaaatctccagtgcttcgacgggggccagcaacgacaaccactacttcggctacagcaccccctgggggtattttgatttcaacaggttccactgccatttctcaccacgtgactggcagcgactcatcaacaacaattggggattccggcccaaaagactcaacttcaagctgttcaacatccaggtcaaggaagtcacgacgaacgaaggcaccaagaccatcgccaataatctcaccagcaccgtgcaggtctttacggactcggagtaccagttaccgtacgtgctaggatccgctcaccagggatgtctgcctccgttcccggcggacgtcttcatggttcctcagtacggctatttaactttaaacaatggaagccaagccctgggacgttcctccttctactgtctggagtatttcccatcgcagatgctgagaacgggcaacaactttacctttagctacaccttcgaggacgtgcctttccacagcagctacgcgcacagccagagcctggacaggctgatgaatcccctcatcgaccagtacctgtactacctggtcagaacgcaaacgactggaactggagggacgcagactctggcattcagccaagcgggtcctagctcaatggccaaccaggctagaaattgggtgcccggaccttgctaccggcagcagcgcgtctccacgacaaccaaccagaacaacaacagcaactttgcctggacgggagctgccaagtttaagctgaacggccgagactctctaatgaatccgggcgtggcaatggcttcccacaaggatgacgacgaccgcttcttcccttcgagcggggtcctgatttttggcaagcaaggagccgggaacgatggagtggattacagccaagtgctgattacagatgaggaagaaatcaaggctaccaaccccgtggccacagaagaatatggagcagtggccatcaacaaccaggccgccaatacgcaggcgcagaccggactcgtgcacaaccagggggtgattcccggcatggtgtggcagaatagagacgtgtacctgcagggtcccatctgggccaaaattcctcacacggacggcaactttcacccgtctcccctgatgggcggctttggactgaagcacccgcctcctcaaattctcatcaagaacacaccggttccagcggacccgccgcttaccttcaaccaggccaagctgaactctttcatcacgcagtacagcaccggacaggtcagcgtggaaatcgagtgggagctgcagaaagaaaacagcaaacgctggaatccagagattcaatacacttccaactactacaaatctacaaatgtggactttgctgtcaacacggagggggtttatagcgagcctcgccccattggcacccgttacctcacccgcaacctgtaa

SEQ ID NO: 1972 - DNA, 2211 bp, Artificial Sequence
  Description of Artificial Sequence: Synthetic polynucleotide
  misc_feature (337)..(337): n is a, c, g, or t
atggctgccgatggttatcttccagattggctcgaggacactctctctgaaggaataagacagtggtggaagctcaaacctggcccaccaccaccaaagcccgcagagcggcataaggacgacagcaggggtcttgtgcttcctggctacaagtacctcggacccttcaacggactcgacaagggggagcccgtcaacgcggcggacgcagcgaccctcgagcacgacaaggcctacgaccagcagctcaaagcgggtgacaatccgtacctgcggtataaccacgccgacgccgagtttcaggagcgtctgcaagaagatacgtcttttgggggcnacctcgggcgagcagtcttccaggccaagaagcgggttctcgaacctctcggtctggttgaggaagctgctaagacggctcctggaaagaagagaccagtagagccatcaccccagcgttctccagactcctctacgggcatcggcaagaaaggccaacagcccgccagaaaaagactcaattttggtcagactggcgactcagagtcagttccagaccctcaacctctcggagaacctccagcagcgccctctggtgtgggacctaatacaatggctgcaggcggtggcgcaccaatggcagacaataacgaaggcgccgacggagtgggtagttcctcgggaaattggcattgcgattccacatggctgggcgacagagtcatcaccaccagcacccgaacctgggccctgcccacctacaacaaccacctctacaagcaaatctccagtgcttcaacgggggccagcaacgacaaccactacttcggctacagcaccccctgggggtattttgatttcaacagattccactgccatttctcaccacgtgactggcagcgactcatcaacaacaattggggattccggcccaagagactcaacttcaagctcttcaacatccaagtcaaggaggtcacgacgaatgatggcgtcacgaccatcgctaataaccttaccagcacggttcaagtcttctcggactcagactatcagctcccgtacgtgctcgggtcggctcacgagggctgcctcccgccgttcccagcggacgttttcatgattcctcagtacggctatttaactttaaacaatggaagccaagccctgggacgttcctccttctactgtctggagtatttcccatcgcagatgctgagaaccggcaacaactttcagttcagctacaccttcgaggacgtgcctttccacagcagctacgcgcacagccagagcctggacaggctgatgaatcccctcatcgaccagtacctgtactacctggtcagaacgcaaacgactggaactggagggacgcagactctggcattcagccaagcgggtcctagctcaatggccaaccaggctagaaattgggtgcccggaccttgctaccggcagcagcgcgtctccacgacaaccaaccagaacaacaacagcaactttgcctggacgggagctgccaagtttaagctgaacggccgagactctctaatgaatccgggcgtggcaatggcttcccacaaggatgacgacgaccgcttcttcccttcgagcggggtcctgatttttggcaagcaaggagccgggaacgatggagtggattacagccaagtgctgattacagatgaggaagaaatcaaggctaccaaccccgtagccacagaagaatatggagcagtggccatcaacaaccaggccgccaatacgcaggcgcagaccggactcgtgcacaaccagggggtgattcccggaatggtgtggcaagacagagacgtatacctgcagggtcctatttgggccaaaattcctcacacggatggacactttcacccgtctcctctcatgggcggctttggacttaagcacccgcctcctcagatcctcatcaaaaacacgcctgttcctgcgaatcctccggcagagttttcggctacaaagtttgcttcattcatcacccagtattccacaggacaagtgagcgtggagattgaatgggagctgcagaaagaaaacagcaaacgctggaatcccgaagtgcagtatacatctaactatgcaaaatctgccaacgttgatttcactgtggacaacaatggactttatactgagcctcgccccattggcacccgttacctcacccgtcccctgtaa

SEQ ID NO: 1973 - DNA, 2214 bp, Artificial Sequence
  Description of Artificial Sequence: Synthetic polynucleotide
  misc_feature (335)..(335): n is a, c, g, or t
atgactgacggttaccttccagattggctagaggacaacctctctgaaggcgttcgagagtggtgggcgctgcaacctggagccccgaagcccaaagccaaccagcaaaagcaggacgacggccggggtctggtgcttcctggctacaagtacctcggacccttcaacggactcgacaagggggagcccgtcaacgcggcggacgcagcggccctcgagcacgacaaggcctacgaccagcagctcaaagcgggtgacaatccgtacctgcggtataaccacgccgacgccgagtttcaggagcgtctgcaagaagatacgtcttttgggggcancctcgggcgagcagtcttccaggccaagaagcgggttctcgaacctctcggtctggttgaggaaggcgctaagacggctcctggaaagaaacgtccggtagagccatcaccccagcgttctccagactcctctacgggcatcggcaagaaaggccaacagcccgccagaaaaagactcaattttggtcagactggcgactcagagtcagttccagaccctcaacctctcggagaacctccagcagcgccctcaggtgtgggatctcttacaatggcttcaggtggtggcgcaccagtggcagacaataacgaaggtgccgatggagtgggtagttcctcgggaaattggcattgcgattcccaatggctgggggacagagtcatcaccaccagcacccgaacctgggccctgcccacctacaacaatcacctctacaagcaaatctccaacagcacatctggaggatcttcaaatgacaacgcctacttcggctacagcaccccctgggggtattttgacttcaacagattccactgccacttctcaccacgtgactggcagcgactcatcaacaacaactggggattccggcccaagagactcagcttcaagctcttcaacatccaggtcaaggaggtcacgcagaatgaaggcaccaagaccatcgccaataacctcaccagcaccatccaggtgtttacggactcggagtaccagctgccgtacgttctcggctctgcccaccagggctgcctgcctccgttcccggcggacgtgttcatgattccccagtacggctacctaacactcaacaacggtagtcaggccgtgggacgctcctccttctactgcctggaatactttccttcgcagatgctgagaaccggcaacaacttccagtttacttacaccttcgaggacgtgcctttccacagcagctacgcccacagccagagcttggaccggctgatgaatcctctgattgaccagtacctgtactacttgtctcggactcaaacaacaggaggcacggcaaatacgcagactctgggcttcagccaaggtgggcctaatacaatggccaatcaggcaaagaactggctgccaggaccctgttaccgccaacaacgcgtctcaacgacaaccgggcaaaacaacaatagcaactttgcctggactgctgggaccaaataccatctgaatggaagaaattcattggctaatcctggcatcgctatggcaacacacaaagacgacgaggagcgtttttttcccagtaacgggatcctgatttttggcaaacaaaatgctgccagagacaatgcggattacagcgatgtcatgctcaccagcgaggaagaaatcaaaaccactaaccctgtggctacagaggaatacggtatcgtggcagataacttgcagcagcaaaacacggctcctcaaattggaactgtcaacagccagggggccttacccggtatggtctggcagaaccgggacgtgtacctgcagggtcccatctgggccaagattcctcacacggacggcaacttccacccgtctccgctgatgggcggctttggcctgaaacatcctccgcctcagatcctgatcaagaacacgcctgtacctgcggatcctccgaccaccttaaaccaggccaagctgaactctttcatcacgcaatacagcaccggacaggtcagcgtggaaattgaatgggagctgcagaaggaaaacagcaagcgctggaacccagagattcagtacacttcaaactactacaaatctacaaatgtggactttgctgtcaatacagagggaacttatagtgaaccccgccccattggcaccagatttctgactcgtaatctgtaa

SEQ ID NO: 1974 - DNA, 2211 bp, Artificial Sequence
  Description of Artificial Sequence: Synthetic polynucleotide
  misc_feature (338)..(338): n is a, c, g, or t
atggctgccgatggttatcttccagattggctcgaggacactctctctgaaggaataagacagtggtggaagctcaaacctggcccaccaccaccaaagcccgcagagcggcataaggacgacagcaggggtcttgtgcttcctgggtacaagtacctcggccccttcaacggactcgacaagggggagcccgtcaacgcggcggacgcagcggccctcgagcacgacaaggcctacgaccagcagctcgaagcgggtgacaatccgtacctgcggtataaccacgccgacgccgagtttcaggagcgtctgcaagaagatacgtcttttgggggcancctcgggcgagcagtcttccaggccaagaagcgggttctcgaacctctcggtctggttgaggaaggcgctaagacggctcctggaaagaagagaccagtagagcagtcaccccaagaaccagactcctcctcgggcatcggcaggaaaggccaacagcccgccagaaaaagactcaattttggccagactggcgactcagagtcagttccagaccctcaacctctcggagaacctccagcagcgccctctggtgtgggacctaatacaatggcttcaggcggtggcgctccaatggcagacaataacgaaggcgccgacggagtgggtaatgcctcaggaaattggcattgcgattccacatggctgggcgacagagtcatcaccaccagcacccgcacctgggccttgcccacctacaataaccacctctacaagcaaatctccagtgcttcaacgggggccagcaacgacaaccactacttcggctacagcaccccctgggggtattttgatttcaacagattccactgccacttttcaccacgtgactggcagcgactcatcaacaacaattggggattccggcccaagagactcaacttcaaactcttcaacatccaggtcaaggaggtcacgcagaatgaaggcactaagaccatcgccaataaccttaccagcacgattcaggtatttacggactcggaataccagctgccgtacgtcctcggctccgcgcaccagggctgcctgcctccgttcccggcggacgtcttcatgattccccagtacggctaccttacactgaacaatggaagtcaagccgtaggccgttcctccttctactgcctggaatattttccatctcaaatgctgcgaactggcaacaacttccagtttacctacaccttcgaggacgtgcctttccacagcagctacgcccacagccagagcttggaccggctgatgaatcctctgattgaccagtacctgtactacttgtctcggactcagtccacaggaggaactcaaggtacccagcaattgttattttctcaagctgggcctgcaaacatgtcggctcaggctaagaactggctacctggaccttgctaccggcagcagcgagtctctacgacactgtcgcaaaacaacaacagcaactttgcttggactggtgccaccaaatatcacctgaacggaagagactctttggtaaatcccggtgtcgccatggcaacccacaaggacgacgaggaacgcttcttcccgtcgagtggagtcctgatgtttggaaaacagggtgctggaagagacaatgtggactacagcagcgttatgctaaccagcgaagaagaaattaaaaccactaaccctgtagccacagaacaatacggtgtggtggttgataacttgcagcaaaccaatacggggcctattgtgggaaatgtcaacagccaaggagccttacctggtatggtctggcagaaccgggacgtgtacctgcagggtcccatctgggccaagattcctcacacggacggcaacttccacccgtctccgctgatgggcggctttggcctgaaacatcctccgcctcagatcctcatcaaaaacacacctgtacctgcggatcctccaacggccttcaacaaggacaagctgaactctttcatcacccagtattctactggccaagtcagcgtggagatcgagtgggagctgcagaaggaaaacagcaagcgctggaacccggagatccagtacacttccaactattacaagtctaataatgttgaatttgctgttaatactgaaggtgtatatagtgaaccccgccccattggcaccagatacctgactcgtaatctgtaa

SEQ ID NO: 1975 - protein, 735 aa, Artificial Sequence
  Description of Artificial Sequence: Synthetic polypeptide
MAADGYLPDWLEDNLSEGIREWWDLKPGAPKPKANQQKQDDGRGLVLPGYKYLGPFNGLDKGEPVNAADAAALEHDKAYDRQLDSGDNPYLKYNHADAEFQERLKEDTSFGGNLGRAVFQAKKRVLEPFGLVEEGAKTAPGKKRPVEQSPQEPDSSSGIGKTGQQPAKKRLNFGQTGDSESVPDPQPLGEPPATPAAVGPTTMASGGGAPVADNNEGADGVGSSSGNWHCDSTWLGDRVITTSTRTWALPTYNNHLYKQISSASTGASNDNHYFGYSTPWGYFDFNRFHCHFSPRDWQRLINNNWGFRPKRLNFKLFNIQVKEVTTNEGTKTIANNLTSTVQVFTDSEYQLPYVLGSAHQGCLPPFPADVFMVPQYGYLTLNNGSQALGRSSFYCLEYFPSQMLRTGNNFTFSYTFEDVPFHSSYAHSQSLDRLMNPLIDQYLYYLVRTQTTGTGGTQTLAFSQAGPSSMANQARNWVPGPCYRQQRVSTTTNQNNNSNFAWTGAAKFKLNGRDSLMNPGVAMASHKDDDDRFFPSSGVLIFGKQGAGNDGVDYSQVLITDEEEIKATNPVATEEYGAVAINNQAANTQAQTGLVHNQGVIPGMVWQNRDVYLQGPIWAKIPHTDGNFHPSPLMGGFGLKHPPPQILIKNTPVPADPPLTFNQAKLNSFITQYSTGQVSVEIEWELQKENSKRWNPEIQYTSNYYKSTNVDFAVNTEGVYSEPRPIGTRYLTRNL

SEQ ID NO: 1976 - protein, 736 aa, Artificial Sequence
  Description of Artificial Sequence: Synthetic polypeptide
  MOD_RES (113)..(113): Xaa can be any naturally occurring amino acid
MAADGYLPDWLEDTLSEGIRQWWKLKPGPPPPKPAERHKDDSRGLVLPGYKYLGPFNGLDKGEPVNAADAATLEHDKAYDQQLKAGDNPYLRYNHADAEFQERLQEDTSFGGXLGRAVFQAKKRVLEPLGLVEEAAKTAPGKKRPVEPSPQRSPDSSTGIGKKGQQPARKRLNFGQTGDSESVPDPQPLGEPPAAPSGVGPNTMAAGGGAPMADNNEGADGVGSSSGNWHCDSTWLGDRVITTSTRTWALPTYNNHLYKQISSASTGASNDNHYFGYSTPWGYFDFNRFHCHFSPRDWQRLINNNWGFRPKRLNFKLFNIQVKEVTTNDGVTTIANNLTSTVQVFSDSDYQLPYVLGSAHEGCLPPFPADVFMIPQYGYLTLNNGSQALGRSSFYCLEYFPSQMLRTGNNFQFSYTFEDVPFHSSYAHSQSLDRLMNPLIDQYLYYLVRTQTTGTGGTQTLAFSQAGPSSMANQARNWVPGPCYRQQRVSTTTNQNNNSNFAWTGAAKFKLNGRDSLMNPGVAMASHKDDDDRFFPSSGVLIFGKQGAGNDGVDYSQVLITDEEEIKATNPVATEEYGAVAINNQAANTQAQTGLVHNQGVIPGMVWQDRDVYLQGPIWAKIPHTDGHFHPSPLMGGFGLKHPPPQILIKNTPVPANPPAEFSATKFASFITQYSTGQVSVEIEWELQKENSKRWNPEVQYTSNYAKSANVDFTVDNNGLYTEPRPIGTRYLTRPL

SEQ ID NO: 1977 - protein, 737 aa, Artificial Sequence
  Description of Artificial Sequence: Synthetic polypeptide
  MOD_RES (112)..(112): Xaa can be any naturally occurring amino acid
MTDGYLPDWLEDNLSEGVREWWALQPGAPKPKANQQKQDDGRGLVLPGYKYLGPFNGLDKGEPVNAADAAALEHDKAYDQQLKAGDNPYLRYNHADAEFQERLQEDTSFGGXLGRAVFQAKKRVLEPLGLVEEGAKTAPGKKRPVEPSPQRSPDSSTGIGKKGQQPARKRLNFGQTGDSESVPDPQPLGEPPAAPSGVGSLTMASGGGAPVADNNEGADGVGSSSGNWHCDSQWLGDRVITTSTRTWALPTYNNHLYKQISNSTSGGSSNDNAYFGYSTPWGYFDFNRFHCHFSPRDWQRLINNNWGFRPKRLSFKLFNIQVKEVTQNEGTKTIANNLTSTIQVFTDSEYQLPYVLGSAHQGCLPPFPADVFMIPQYGYLTLNNGSQAVGRSSFYCLEYFPSQMLRTGNNFQFTYTFEDVPFHSSYAHSQSLDRLMNPLIDQYLYYLSRTQTTGGTANTQTLGFSQGGPNTMANQAKNWLPGPCYRQQRVSTTTGQNNNSNFAWTAGTKYHLNGRNSLANPGIAMATHKDDEERFFPSNGILIFGKQNAARDNADYSDVMLTSEEEIKTTNPVATEEYGIVADNLQQQNTAPQIGTVNSQGALPGMVWQNRDVYLQGPIWAKIPHTDGNFHPSPLMGGFGLKHPPPQILIKNTPVPADPPTTLNQAKLNSFITQYSTGQVSVEIEWELQKENSKRWNPEIQYTSNYYKSTNVDFAVNTEGTYSEPRPIGTRFLTRNL

SEQ ID NO: 1978 - protein, 736 aa, Artificial Sequence
  Description of Artificial Sequence: Synthetic polypeptide
  MOD_RES (113)..(113): Xaa can be any naturally occurring amino acid
MAADGYLPDWLEDTLSEGIRQWWKLKPGPPPPKPAERHKDDSRGLVLPGYKYLGPFNGLDKGEPVNAADAAALEHDKAYDQQLEAGDNPYLRYNHADAEFQERLQEDTSFGGXLGRAVFQAKKRVLEPLGLVEEGAKTAPGKKRPVEQSPQEPDSSSGIGRKGQQPARKRLNFGQTGDSESVPDPQPLGEPPAAPSGVGPNTMASGGGAPMADNNEGADGVGNASGNWHCDSTWLGDRVITTSTRTWALPTYNNHLYKQISSASTGASNDNHYFGYSTPWGYFDFNRFHCHFSPRDWQRLINNNWGFRPKRLNFKLFNIQVKEVTQNEGTKTIANNLTSTIQVFTDSEYQLPYVLGSAHQGCLPPFPADVFMIPQYGYLTLNNGSQAVGRSSFYCLEYFPSQMLRTGNNFQFTYTFEDVPFHSSYAHSQSLDRLMNPLIDQYLYYLSRTQSTGGTQGTQQLLFSQAGPANMSAQAKNWLPGPCYRQQRVSTTLSQNNNSNFAWTGATKYHLNGRDSLVNPGVAMATHKDDEERFFPSSGVLMFGKQGAGRDNVDYSSVMLTSEEEIKTTNPVATEQYGVVVDNLQQTNTGPIVGNVNSQGALPGMVWQNRDVYLQGPIWAKIPHTDGNFHPSPLMGGFGLKHPPPQILIKNTPVPADPPTAFNKDKLNSFITQYSTGQVSVEIEWELQKENSKRWNPEIQYTSNYYKSNNVEFAVNTEGVYSEPRPIGTRYLTRNL

SEQ ID NO: 1979 - DNA, 2211 bp, Artificial Sequence
  Description of Artificial Sequence: Synthetic polynucleotide
atggccgccgacggctacctgcccgactggctggaggacaacctgagcgagggcatccgcgagtggtgggccctgaagcccggcgccccccagcccaaggccaaccagcagcaccaggacaacgcccgcggcctggtgctgcccggctacaagtacctgggccccggcaacggcctggacaagggcgagcccgtgaacgccgccgacgccgccgccctggagcacgacaaggcctacgaccagcagctgaaggccggcgacaacccctacctgaagtacaaccacgccgacgccgagttccaggagcgcctgaaggaggacaccagcttcggcggcaacctgggccgcgccgtgttccaggccaagaagcgcctgctggagcccctgggcctggtggaggaggccgccaagaccgcccccggcaagaagcgccccgtggagcagagcccccaggagcccgacagcagcgccggcatcggcaagagcggcgcccagcccgccaagaagcgcctgaacttcggccagaccggcgacaccgagagcgtgcccgacccccagcccatcggcgagccccccgccgcccccagcggcgtgggcagcctgaccatggccagcggcggcggcgcccccgtggccgacaacaacgagggcgccgacggcgtgggcagcagcagcggcaactggcactgcgacagccagtggctgggcgaccgcgtgatcaccaccagcacccgcacctgggccctgcccacctacaacaaccacctgtacaagcagatcagcaacagcaccagcggcggcagcagcaacgacaacgcctacttcggctacagcaccccctggggctacttcgacttcaaccgcttccactgccacttcagcccccgcgactggcagcgcctgatcaacaacaactggggcttccgccccaagcgcctgaacttcaagctgttcaacatccaggtgaaggaggtgaccgacaacaacggcgtgaagaccatcgccaacaacctgaccagcaccgtgcaggtgttcaccgacagcgactaccagctgccctacgtgctgggcagcgcccacgagggctgcctgccccccttccccgccgacgtgttcatgatcccccagtacggctacctgaccctgaacgacggcagccaggccgtgggccgcagcagcttctactgcctggagtacttccccagccagatgctgcgcaccggcaacaacttccagttcagctacgagttcgagaacgtgcccttccacagcagctacgcccacagccagagcctggaccgcctgatgaaccccctgatcgaccagtacctgtactacctgagcaagaccatcaacggcagcggccagaaccagcagaccctgaagttcagcgtggccggccccagcaacatggccgtgcagggccgcaactacatccccggccccagctaccgccagcagcgcgtgagcaccaccgtgacccagaacaacaacagcgagttcgcctggcccggcgccagcagctgggccctgaacggccgcaacagcctgatgaaccccggccccgccatggccagccacaaggagggcgaggaccgcttcttccccctgagcggcagcctgatcttcggcaagcagggcaccggccgcgacaacgtggacgccgacaaggtgatgatcaccaacgaggaggagatcaagaccaccaaccccgtggccaccgagagctacggccaggtggccaccaaccaccagagcgcccaggcccaggcccagaccggctgggtgcagaaccagggcatcctgcccggcatggtgtggcaggaccgcgacgtgtacctgcagggccccatctgggccaagatcccccacaccgacggcaacttccaccccagccccctgatgggcggcttcggcatgaagcacccccccccccagatcctgatcaagaacacccccgtgcccgccgacccccccaccgccttcaacaaggacaagctgaacagcttcatcacccagtacagcaccggccaggtgagcgtggagatcgagtgggagctgcagaaggagaacagcaagcgctggaaccccgagatccagtacaccagcaactactacaagagcaacaacgtggagttcgccgtgaacaccgagggcgtgtacagcgagccccgccccatcggcacccgctacctgacccgcaacctgtaa

SEQ ID NO: 1980 - DNA, 2211 bp, Artificial Sequence
  Description of Artificial Sequence: Synthetic polynucleotide
atggctgccgatggttatcttccagattggctcgaggacactctctctgaaggaataagacagtggtggaagctcaaacctggcccaccaccaccaaagcccgcagagcggcataaggacgacagcaggggtcttgtgcttcctgggtacaagtacctcggacccttcaacggactcgacaagggagagccggtcaacgaggcagacgccgcggccctcgagcacgacaaggcctacgaccagcagctcaaggccggagacaacccgtacctcaagtacaaccacgccgacgccgagttccaggagcggctcaaagaagatacgtcttttgggggcaacctcggacgagcagtcttccaggccaagaagcgggttctcgaacctctcggtctggttgaggaaggcgctaagacggctcctggaaagaaacgtccggtagagcagtcgccacaagagccagactcctcctcgggcattggcaagacaggccagcagcccgctaaaaagagactcaattttggtcagactggcgactcagagtcagtccccgacccacaacctctcggagaacctccagcaacccccgctgctgtgggacctactacaatggcttcaggcggtggcgcaccaatggcggacaataacgaaggcgccgatggagtgggtagttcctcgggaaattggcattgcgattcccaatggctgggggacagagtcatcaccaccagcacccgaacatgggccttgcccacctataacaaccacctctacaagcaaatctccagtgcttcaacgggggccagcaacgacaaccactacttcggctacagcaccccctgggggtattttgacttcaacagattccactgccacttctcaccacgtgactggcagcgactcatcaacaacaactggggattccgacccaagagactcaacttcaagctctttaacattcaagtcaaggaggtcacgcagaatgaaggcaccaagaccatcgccaataacctcaccagcaccatccaggtgtttacggactcggagtaccagctgccgtacgttctcggctccgcccaccagggctgcctgcctccgttcccggcggacgtgttcatgattccccagtacggctacctaacactcaacaacggtagtcaggccgtgggacgctcctccttctactgcctggaatactttccttcgcagatgctgagaaccggcaacaacttccagtttacttacaccttcgaggacgtgcctttccacagcagctacgcccacagccagagcttggaccggctgatgaatcctctgattgaccagtacctgtactacttgtctcggactcaaacaacaggaggcacggcaaatacgcagactctgggcttcagccaaggtgggcctaatacaatggccaatcaggcaaagaactggctgccaggaccctgttaccgccaacaacgcgtctcaacgacaaccgggcaaaacaacaatagcaactttgcctggactgctgggaccaaataccatctgaatggaagaaattcattggctaatcctggcatcgctatggcaacacacaaagacgacaaggagcgtttttttcccagtaacgggatcctgatttttggcaaacaaaatgctgccagagacaatgcggattacagcgatgtcatgctcaccagcgaggaagaaatcaaaaccactaaccctgtggctacagaggaatacggtatcgtggcagataacttgcagcagcaaaacacggctcctcaaattggaactgtcaacagccagggggccttacccggtatggtctggcagaaccgggacgtgtacctgcagggtcccatctgggccaagattcctcacacggacggcaacttccacccgtctccgctgatgggcggctttggcctgaaacatcctccgcctcagatcctgatcaagaacacgcctgtacctgcggatcctccgaccaccttcaaccagtcaaagctgaactctttcatcacgcaatacagcaccggacaggtcagcgtggaaattgaatgggagctgcagaaagaaaacagcaaacgctggaacccagagattcaatacacttccaactactacaaatctacaagtgtggactttgctgttaatacagaaggcgtgtactctgaaccccaccccattggcacccgttacctcacccgtcccctgtaa

SEQ ID NO: 1981 - DNA, 2211 bp, Artificial Sequence
  Description of Artificial Sequence: Synthetic polynucleotide
atggctgccgatggttatcttccagattggctcgaggacaacctctctgagggcattcgcgagtggtgggcgctgaaacctggagccccgaagcccaaagccaaccagcaaaagcaggacgacggccggggtctggtgcttcctggctacaagtacctcggacccttcaacggactcgacaagggggagccggtcaacgcagcagacgcggcggccctcgagcacgacaaggcctacgaccagcagctcaaggccggagacaacccgtacctcaagtacaaccacgccgacgccgagttccaggagcggctcaaagaagatacgtcttttgggggcaacctcgggcgagcagtcttccaggccaaaaagaggcttcttgaacctcttggtctggttgaggaagcggctaagacggctcctggaaagaagaggcctgtagagcagtctcctcaggaaccggactcctccgcgggtattggcaaatcgggtgcacagcccgctaaaaagagactcaattttggtcagactggcgactcagagtcagtccccgacccacaacctctcggagaacctccagcaacccccgctgctgtgggacctactacaatggcttcaggcggtggcgcaccaatggcagacaataacgaaggcgccgacggagtgggtaatgcctcaggaaattggcattgcgattccacatggctgggcgacagagtcatcaccaccagcacccgaacctgggccctgcccacctacaataaccacctctacaagcaaatctccagtgcttcaacgggggccagcaacgacaaccactacttcggctacagcaccccctgggggtattttgatttcaacagattccactgccacttttcaccacgtgactggcagcgactcatcaacaacaattggggattccggcccaagagactcaacttcaaactcttcaacatccaagtcaaggaggtcacgcagaatgaaggcaccaagaccatcgccaataacctcaccagcaccatccaggtgtttacggactcggagtaccagctgccgtacgttctcggctctgcccaccagggctgcctgcctccgttcccggcggacgtgttcatgattccccagtacggctacctaacactcaacaacggtagtcaggccgtgggacgctcctccttctactgcctggaatactttccttcgcagatgctgagaaccggcaacaacttccagtttacttacaccttcgaggacgtgcctttccacagcagctacgcccacagccagagcttggaccggctgatgaatcctctgattgaccagtacctgtactacttgtctcggactcaaacaacaggaggcacggcaaatacgcagactctgggcttcagccaaggtgggcctaatacaatggccaatcaggcaaagaactggctgccaggaccctgttaccgccaacaacgcgtctcaacgacaaccgggcaaaacaacaatagcaactttgcctggactgctgggaccaaataccatctgaatggaagaaattcattggctaatcctggcatcgctatggcaacacacaaagacgacaaggagcgtttttttcccagtaacgggatcctgatttttggcaaacaaaatgctgccagagacaatgcggattacagcgatgtcatgctcaccagcgaggaagaaatcaaagccactaaccctgtggctacagaggaatacggtatcgtggcagataacttgcagcagcaaaacacggctcctcaaattggaactgtcaacagccagggggccttacccggtatggtttggcagaaccgggacgtgtacctgcagggtcccatctgggccaagattcctcacacggacggcaacttccacccgtctccgctgatgggcggctttggcctgaaacatcctccgcctcagatcctgatcaagaacacgcctgtacctgcggatcctccgaccaccttcaaccagtcaaagctgaactctttcatcacgcaatacagcaccggacaggtcagcgtggaaattgaatgggagctgcagaaggaaaacagcaagcgctggaaccccgagatccagtacacctccaactactacaaatctacaagtgtggactttgctgttaatacagaaggcgtgtactctgaaccccaccccattggcacccgttacctcacccgtcccctgtaa

SEQ ID NO: 1982 - DNA, 2214 bp, Artificial Sequence
  Description of Artificial Sequence: Synthetic polynucleotide
atggctgccgatggttatcttccagattggctcgaggacaacctctctgagggcattcgcgagtggtgggacttgaaacctggagccccgaagcccaaagccaaccagcaaaagcaggacgacggccggggtctggtgcttcctggctacaagtacctcggacccttcaacggactcgacaagggggagcccgtcaacgcggcggacgcagcggccctcgagcacgacaaggcctacgaccagcagctcaaagcgggtgacaatccgtacctgcggtataaccacgccgacgccgagtttcaggagcgtctgcaagaagatacgtcttttgggggcaacctcgggcgagcagtcttccaggccaagaagcgggttctcgaacctctcggtctggttgaggaaggcgctaatacggctcctggaaagaaacgtccggtagagcagtcgccacaagagccagactcctccgcgggtattggcaaatcgggtgcacagcccgctaaaaagagactcaatttcggtcagactggcgacacagagtcagtcccagaccctcaaccaatcggagaacctcccgcagccccctcaggtgtgggatctcttacaatggcttcaggtggtggcgcaccagtggcagacaataacgaaggtgccgatggagtgggtagttcctcgggaaattggcattgcgattcccaatggctgggggacagagtcatcaccaccagcacccgaacctgggccctgcccacctacaacaatcacctctacaagcaaatctccaacagcacatctggaggatcttcaaatgacaacgcctacttcggctacagcaccccctgggggtattttgacttcaacagattccactgccacttctcaccacgtgactggcagcgactcatcaacaacaactggggattccggcctaagcgactcaacttcaagctcttcaacattcaggtcaaagaggttacggacaacaatggagtcaagaccatcgccaataacctcaccagcaccatccaggtgtttacggactcggagtaccagctgccgtacgttctcggctccgcccaccagggctgcctgcctccgttcccggcggacgtgttcatgattccccagtacggctacctaacactcaacaacggtagtcaggccgtgggacgctcctccttctactgcctggaatactttccttcgcagatgctgagaaccggcaacaacttccagtttacttacaccttcgaggacgtgcctttccacagcagctacgcccacagccagagcttggaccggctgatgaatcctctgattgaccagtacctgtactacttgtctcggactcaaacaacaggaggcacggcaaatacgcagactctgggcttcagccaaggtgggcctaatacaatggccaatcaggcaaagaactggctgccaggaccctgttaccgccaacaacgcgtctcaacgacaaccgggcaaaacaacaatagcaactttgcctggactgctgggaccaaataccatctgaatggaagaaattcattggctaatcctggcatcgctatggcctcacacaaagacgacaaggagcgtttttttcccagtaacgggatcctgatttttggcaaacaaaatgctgccagagacaatgcggattacagcgatgtcatgctcaccagcgaggaagaaatcaaaaccactaaccctgtggctacagaggaatacggtatcgtggcagataacttgcagcagcaaaacacggctcctcaaattggaactgtcaacagtcaaggagccttacctggcatggtctggcagaaccgggacgtgtacctgcagggtcccatctgggccaagattcctcacacggacggcaacttccacccgtctccgctgatgggcggctttggcctgaaacatcctccgcctcagatcctgatcaagaacacgcctgtacctgcggatcctccgaccaccttcaaccagtcaaagctgaactctttcatcacgcaatacagcaccggacaggtcagcgtggaaattgaatgggagctgcagaaggaaaacagcaagcgctggaaccccgagatccagtacaccaccaactactacaaatctacaagtgtggactttgctgttaatacagaaggcgtgtactctgaaccccaccccattggcacccgttacctcacccgtcccctgtaa

SEQ ID NO: 1983 - DNA, 2211 bp, Artificial Sequence
  Description of Artificial Sequence: Synthetic polynucleotide
atggctgccgatggttatcttccagattggctcgaggacaacctctctgagggcattcgcgagtggtgggcgctgaaacctggagccccgaagcccaaagccaaccagcaaaagcaggacgacggccggggtctggtgcttcctggctacaagtacctcggacccttcaacggactcgacaaaggagagccggtcaacgaggcggacgcggcagccctcgaacacgacaaagcttacgaccagcagctcaaggccggtgacaatccgtacctgcggtataaccacgccgacgccgagtttcaggagcgtcttcaagaagatacgtcttttgggggcaacctcgggcgagcagtcttccaggccaagaagcgggttctcgaacctctcggtctggttgaggaaggcgctaagacggctcctggaaagaaacgtccggtagagcagtcgccacaagagccagactcctcctcgggcatcggcaagacaggccagcagcccgctaaaaagagactcaattttggtcagactggcgactcagagtcagtccccgacccacaacctctcggagaacctccagcaacccccgctgctgtgggacctactacaatggcttcaggcggtggcgcaccaatggcagacaataacgaaggcgccgacggagtgggtaatgcctcaggaaattggcattgcgattccacatggctgggcgacagagtcatcaccaccagcacccgcacctgggccttgcccacctacaataaccacctctacaagcaaatctccagtgcttcaacgggggccagcaacgacaaccactacttcggctacagcaccccctgggggtattttgactttaacagattccactgccacttttcaccacgtgactggcaaagactcatcaacaacaactggggattccggcccaagagactcaacttcaagctcttcaacatccaggtcaaggaggtcacgcagaatgaaggcaccaagaccatcgccaataaccttaccagcacgattcaggtctttacggactcggaataccagctcccgtacgtcctcggctctgcgcaccagggctgcctccctccgttcccggcggacgtgttcatgattccgcagtacggctacctaacactcaacaacggtagtcaggccgtgggacgctcctccttctactgcctggaatactttccttcgcagatgctgagaaccggcaacaacttccagtttacttacaccttcgaggacgtgcctttccacagcagctacgcccacagccagagcttggaccggctgatgaatcctctgattgaccagtacctgtactacttgtctcggactcaaacaacaggaggcacggcaaatacgcagactctgggcttcagccaaggtgggcctaatacaatggccaatcaggcaaagaactggctgccaggaccctgttaccgccaacaacgcgtctcaacgacaaccgggcaaaacaacaatagcaactttgcctggactgctgggaccaaataccatctgaatggaagaaattcattggctaatcctggcatcgctatggcaacacacaaagacgacaaggagcgtttttttcccagtaacgggatcctgatttttggcaaacaaaatgctgccagagacaatgcggattacagcgatgtcatgctcaccagcgaggaagaaatcaaaaccactaaccctgtggctacagaggaatacggtatcgtggcagataacttgcagcagcaaaacacggctcctcaaattggaactgtcaacagccagggggccttacccggtatggtctggcagaaccgggacgtgtacctgcagggtcccatctgggccaagattcctcacacggacggcaacttccacccgtctccgctgatgggcggctttggcctgaaacatcctccgcctcagatcctgatcaagaacacgcctgtacctgcggatcctccgaccaccttcaaccagtcaaagctgaactctttcatcacgcaatacagcaccggacaggtcagcgtggaaattgaatgggagctgcagaaggaaaacagcaagcgctggaaccccgagatccagtacacctccaactactacaaatctacaagtgtggactttgctgttaatacagaaggcgtgtactctgaaccccaccccattggcacccgttacctcacccgtcccctgtaa

SEQ ID NO: 1984 - DNA, 2211 bp, Artificial Sequence
  Description of Artificial Sequence: Synthetic polynucleotide
atggctgccgatggttatcttccagattggctcgaggacaacctctctgagggcattcgcgagtggtgggcgctgaaacctggagccccgaagcccaaagccaaccagcaaaagcaggacgacggccggggtctggtgcttcctggctacaagtacctcggacccttcaacggactcgacaaaggagagccggtcaacgaggcggacgcggcagccctcgaacacgacaaagcttacgaccagcagctcaaagcgggtgacaatccgtacctgcggtataaccacgccgacgccgagtttcaggagcgtctgcaagaagatacgtcttttgggggcaacctcgggcgagcagtcttccaggccaagaagagggttctcgaaccttttggtctggttgaggaaggtgctaagacggctcctggaaagaaacgtccggtagagcagtcgccacaagagccagactcctcctcgggcattggcaagacaggccagcagcccgctaaaaagagactcaattttggtcagactggcgactcagagtcagtccccgacccacaacctctcggagaacctccagcaacccccgctgctgtgggacctactacaatggcttcaggcggtggcgcaccaatggcagacaataacgaaggcgccgacggagtgggtaatgcctcaggaaattggcattgcgattcccaatggctgggcgacagagtcatcaccaccagcaccagaacctgggccttgcccacctataacaaccacctctacaagcaaatctccagtgcttcaacgggggccagcaacgacaaccactacttcggctacagcaccccctgggggtattttgatttcaacagattccactgccacttctcaccacgtgactggcagcgactcatcaacaacaactggggattccggcctaagcgactcaacttcaagctcttcaacattcaggtcaaagaggttacggacaacaatggagtcaagaccatcgccaataaccttaccagcacggttcaagtcttctcggactcggagtaccagttgccgtacgtcctcggctctgcgcaccagggctgcctccctccgttcccggcggacgtgttcatgattccccagtacggctacctaacactcaacaacggtagtcaggccgtgggacgctcctccttctactgcctggaatactttccttcgcagatgctgagaaccggcaacaacttccagtttacttacaccttcgaggacgtgcctttccacagcagctacgcgcacagccagagcttggaccggctgatgaatcctctgattgaccagtacctgtactacttgtctcggactcaaacaacaggaggcacggcaaatacgcagactctgggcttcagccaaggtgggcctaatacaatggccaatcaggcaaagaactggctgccaggaccctgttaccgccaacaacgcgtctcaacgacaaccgggcaaaacaacaatagcaactttgcctggactgctgggaccaaataccatctgaatggaagaaattcattggctaatcctggcatcgctatggcaacacacaaagacgacaaggagcgtttttttcccagtaacgggatcctgatttttggcaaacaaaatgctgccagagacaatgcggattacagcgatgtcatgctcaccagcgaggaagaaatcaaaaccactaaccctgtggctacagaggaatacggtatcgtggcagataacttgcagcagcaaaacacggctcctcaaattggaactgtcaacagccagggggccttacccggtatggtctggcagaaccgggacgtgtacctgcagggtcccatctgggccaagattcctcacacggacggcaacttccacccgtctccgctgatgggcggctttggcctgaaacatcctccgcctcagatcctgatcaagaacacgcctgtacctgcggatcctccgaccaccttcaaccagtcaaagctgaactctttcatcacgcaatacagcaccggacaggtcagcgtggaaattgaatgggagctgcagaaggaaaacagcaagcgctggaaccccgagatccagtacacctccaactactacaaatctacaagtgtggactttgctgttaatacagaaggcgtgtactctgaaccccaccccattggcacccgttacctcacccgtcccctgtaa

SEQ ID NO: 1985 - DNA, 2244 bp, Artificial Sequence
  Description of Artificial Sequence: Synthetic polynucleotide
  misc_feature (2241)..(2241): n is a, c, g, or t
atggctgccgatggttatcttccagattggctcgaggacactctctctgaaggaataagacagtggtggaagctcaaacctggcccaccaccaccaaagcccgcagagcggcataaggacgacagcaggggtcttgtgcttcctgggtacaagtacctcggacccttcaacggactcgacaagggagagccggtcaacgaggcagacgccgcggccctcgagcacgacaaagcctacgaccggcagctcgacagcggagacaacccgtacctcaagtacaaccacgccgacgcggagtttcaggagcgccttaaagaagatacgtcttttgggggcaacctcgggcgagcagtcttccaggccaagaagagggttctcgaaccttttggtctggttgaggaaggtgctaagacggctcctggaaagaaacgtccggtagagcagtcgccacaagagccagactcctcctcgggcattggcaagacaggccagcagcccgctaaaaagagactcaattttggtcagactggcgactcagagtcagtccccgacccacaacctctcggagaacctccagcaacccccgctgctgtgggacctactacaatggcttcaggcggtggcgcaccaatggcagacaataacgaaggcgccgacggagtgggtaatgcctcaggaaattggcattgcgattccacatggctgggcgacagagtcatcaccaccagcacccgaacatgggccttgcccacctataacaaccacctctacaagcaaatctccagtgcttcaacgggggccagcaacgacaaccactacttcggctacagcaccccctgggggtattttgacttcaacagattccactgccacttctcaccacgtgactggcagcgactcatcaacaacaactggggattccggcctaagcgactcaacttcaagctcttcaacattcaggtcaaagaggttacggacaacaatggagtcaagaccatcgccaataaccttaccagcacggtccaggtcttcacggactcagactatcagctcccgtacgtgctcgggtcggctcacgagggctgcctcccgccgttcccagcggacgttttcatgattcctcagtacggctacctaacactcaacaacggtagtcaggccgtgggacgctcctccttctactgcctggaatactttccttcgcagatgctgagaaccggcaacaacttccagtttacttacaccttcgaggacgtgcctttccacagcagctacgcgcacagccagagcttggaccggctgatgaatcctctgattgaccagtacctgtactacttgtctcggactcaaacaacaggaggcacggcaaatacgcagactctgggcttcagccaaggtgggcctaatacaatggccaatcaggcaaagaactggctgccaggaccctgttaccgccaacaacgcgtctcaacgacaaccgggcaaaacaacaatagcaactttgcctggactgctgggaccaaataccatctgaatggaagaaattcattggctaatcctggcatcgctatggcaacacacaaagacgacaaggagcgtttttttcccagtaacgggatcctgatttttggcaaacaaaatgctgccagagacaatgcggattacagcgatgtcatgctcaccagcgaggaagaaatcaaaaccactaaccctgtggctacagaggaatacggtatcgtggcagataacttgcagcagcaaaacacggctcctcaaattggaactgtcaacagccagggggccttacccggtatggtctggcagaaccgggacgtgtacctgcagggtcccatctgggccaagattcctcacacggacggcaacttccacccgtctccgctgatgggcggctttggcctgaaacatcctccgcctcagatcctgatcaagaacacgcctgtacctgcggatcctccgaccaccttcaaccagtcaaagctgaactctttcatcacgcaatacagcaccggacaggtcagcgtggaaattgaatgggagctgcagaaggaaaacagcaagcgctggaaccccgagatccagtacacctccaactactacaaatctacaagtgtggactttgctgttaatacagaaggcgtgtactctgaaccccaccccattggcaccagatacctgactcgtaatctgtaattgcttgttaatcaataaaccgtttaattnttt

SEQ ID NO: 1986 - DNA, 2217 bp, Artificial Sequence
  Description of Artificial Sequence: Synthetic polynucleotide
atggctgccgatggttatcttccagattggctcgaggacaacctctctgagggcattcgcgagtggtgggacttgaaacctggagccccgaaacccaaagccaaccagcaaaagcaggacgacggccggggtctggtgcttcctggctacaagtacctcggacccttcaacggactcgacaagggggagcccgtcaacgcggcggacgcagcggccctcgagcacgacaaggcctacgaccagcagctccaagcgggtgacaatccgtacctgcggtataaccacgccgacgccgagtttcaggagcgtctgcaagaagatacgtcttttgggggcaacctcggacgagcagtcttccaggcgaaaaagagggttctcgaacctctcggtctggttgaggaaggcgctaagacggctcctggaaagaagagaccggtagagccatcaccccagcgttctccagactcctctacgggcatcggcaagaaaggccaacagcccgccagaaaaagactcaattttggtcagactggcgactcagagtcagttccagaccctcaacctctcggagaacctccagcagcgccctctggtgtgggacctaatacaatggctgcaggcggtggcgcaccaatggcagacaataacgaaggcgccgacggagtgggtagttcctcgggaaattggcattgcgattcccaatggctgggggacagagtcatcaccaccagcacccgaacctgggccctgcccacctacaacaatcacctctacaagcaaatctccaacagcacatctggaggatcttcaaatgacaacgcctacttcggctacagcaccccctgggggtattttgacttcaaccgcttccactgccacttctcaccacgtgactggcagcgactcatcaacaacaactggggattccggcccaagagactcagcttcaaactcttcaacatccaggtcaaggaggtcacgcagaatgaaggcaccaagaccatcgccaataacctcaccagcaccatccaggtgtttacggactcggagtaccagctgccgtacgttctcggctctgcccaccagggctgcctgcctccgttcccggcggacgtgttcatgattcctcagtacggctacctaacgctcaacaatggcagccaggcagtgggacggtcatccttttactgcctggaatatttcccatcgcagatgctgagaacgggcaacaactttaccttcagctacacctttgaggacgttcctttccacagcagctacgctcacagccagagtctggaccgtctcatgaatcctctgattgaccagtacctgtactacttgtctcggactcaaacaacaggaggcacggcaaatacgcagactctgggcttcagccaaggtgggcctaatacaatggccaatcaggcaaagaactggctgccaggaccctgttaccgccaacaacgcgtctcaacgacaaccgggcaaaacaacaatagcaactttgcctggactgctgggaccaaataccatctgaatggaagaaattcattggctaatcctggcatcgctatggcaacacacaaagacgacaaggagcgtttttttcccagtaacgggatcctgatttttggcaaacaaaatgctgccagagacaatgcggattacagcgatgtcatgctcaccagcgaggaagaaatcaaaaccactaaccctgtggctacagaggaatacggtatcgtggcagataacttgcagcagcaaaacacggctcctcaaattggaactgtcaacagccagggggccttacccggtatggtctggcagaaccgggacgtgtacctgcagggtcccatctgggccaagattcctcacacggacggcaacttccacccgtctccgctgatgggcggctttggacttaagcacccgcctcctcagatcctcatcaaaaacacgcctgttcctgcggatcctccgaccaccttcaaccagtcaaagctgaactctttcatcacgcaatacagcaccggacaggtcagcgtggaaattgaatgggagctgcagaaggaaaacagcaagcgctggaaccccgagatccagtacacctccaactactacaaatctacaagtgtggactttgctgttaatacagaaggcgtgtactctgaaccccaccccattggcacccgttacctcacccgtcccctgtaa

SEQ ID NO: 1987 - DNA, 2214 bp, Artificial Sequence
  Description of Artificial Sequence: Synthetic polynucleotide
atggctgccgatggttatcttccagattggctcgaggacaacctctctgagggcattcgcgagtggtgggacttgaaacctggagccccgaagcccaaagccaaccagcaaaagcaggacgacggccggggtctggtgcttcctggctacaagtacctcggacccttcaacggactcgacaagggggagcccgtcaacgcggcggatgcagcggccctcgagcacgacaaagcctacgaccagcagctcaaagcgggtgacaatccgtacctgcggtataaccacgccgacgccgagtttcaggagcgtctgcaagaagatacgtcttttgggggcaacctcgggcgagcagtcttccaggccaagaagagggttctcgaaccttttggtctggttgaggaaggtgctaagacggctcctggaaagaaacgtccggtagagcagtcgccacaagagccagactcctcctcgggcattggcaagacaggccagcagcccgctaaaaagagactcaattttggtcagactggcgactcagagtcagtccccgacccacaacctctcggagaacctccagcaacccccgctgctgtgggacctactacaatggcttcaggcggtggcgcacccatgcaagacaataacgaaggcgccgacggagtgggtagttcctcgggaaattggcattgcgattccacatggctgggcgacagagtcatcaccaccagcacccgaacctgggccctgcccacctacaacaaccacctctacaagcaaatctccaacgggacatcgggaggagccaccaacgacaacacctacttcggctacagcaccccctgggggtattttgactttaacagattccactgccacttttcaccacgtgactggcagcgactcatcaacaacaactggggattccggcccaagagactcaacttcaagctcttcaacatccaggtcaaggaggtcacgcagaatgaaggcaccaagaccatcgccaataaccttaccagcacgattcaggtctttacggattcggaataccagctcccgtacgtcctcggctctgcgcaccagggctgcctccctccgttcccggcggacgtgttcatgattccgcagtacggctacctaacgctcaacaatggtagccaggcagtgggacggtcatccttttactgcctggaatatttcccatcgcagatgctgagaacgggcaacaactttaccttcagctacacctttgaggacgttcctttccacagcagctacgctcacagccagagtctggaccgtctcatgaatcctctgattgaccagtacctgtactacttgtctcggactcaaacaacaggaggcacggcaaatacgcagactctgggcttcagccaaggtgggcctaatacaatggccaatcaggcaaagaactggctgccaggaccctgttaccgccaacaacgcgtctcaacgacaaccgggcaaaacaacaatagcaactttgcctggactgctgggaccaaataccatctgaatggaagaaattcattggctaatcctggcatcgctatggcaacacacaaagacgacaaggagcgtttttttcccagtaacgggatcctgatttttggcaaacaaaatgctgccagagacaatgcggattacagcgatgtcatgctcaccagcgaggaagaaatcaaaaccactaaccctgtggctacagaggaatacggtatcgtggcagataacttgcagcagcaaaacacggctcctcaaattggaactgtcaacagccagggggccttacccggtatggtctggcagaaccgggacgtgtacctgcagggtcccatctgggccaagattcctcacacggacggcaacttccacccgtctccgctgatgggcggctttggcctgaaacatcctccgcctcagatcctgatcaagaacacgcctgtacctgcggatcctccgaccaccttcaaccagtcaaagctgaactctttcatcacgcaatacagcaccggacaggtcagcgtggaaattgaatgggagctgcagaaggaaaacagcaagcgctggaaccccgagatccagtacacctccaactactacaaatctacaagtgtggactttgctgttaatacagaaggcgtgtactctgaaccccaccccattggcacccgttacctcacccgtcccctgtaa

SEQ ID NO: 1988 - DNA, 2211 bp, Artificial Sequence
  Description of Artificial Sequence: Synthetic polynucleotide
atggctgccgatggttatcttccagattggctcgaggacaacctctctgagggcattcgcgagtggtgggcgctgaaacctggagccccgaagcccaaagccaaccagcaaaagcaggacgacggccggggtctggtgcttcctggctacaagtacctcggacccttcaacggactcgacaagggggagcccgtcaacgcggcggacgcagcggccctcgagcacgacaaggcctacgaccagcagctcaaagcgggtgacaatccgtacctgcggtataaccacgccgacgccgagtttcaggagcgtctgcaagaagatacgtcttttgggggcaacctcgggcgagcagtcttccaggccaagaagcgggttctcgaacctctcggtctggttgaggaaggcgctaagacggctcctggaaagaaacgtccggtagagcagtcgccacaagagccagactcctcctcgggcatcggcaagacaggccagcagcccgctaaaaagagactcaattttggtcagactggcgactcagagtcagtccccgacccacaacctctcggagaacctccagcaacccccgctgctgtgggacctactacaatggcttcaggcggtggcgcaccaatggcagacaataacgaaggcgccgacggagtgggtagttcctcgggaaattggcattgcgattccacatggctgggcgacagagtcatcaccaccagcacccgcacctgggccttgcccacctacaataaccacctctacaagcaaatctccagtgcttcaacgggggccagcaacgacaaccactacttcggctacagcaccccctgggggtattttgacttcaacagattccactgccacttctcaccacgtgactggcagcgactcatcaacaacaactggggattccggcctaagcgactcaacttcaagctcttcaacattcaggtcaaagaggttacggacaacaatggagtcaagaccatcgccaataaccttaccagcacggtccaggtcttcacggactcagactatcagctcccgtacgtgctcgggtcggctcacgagggctgcctcccgccgttcccagcggacgttttcatgattcctcagtacgggtatctgacgctcaacaatggcagccaggcagtgggacggtcatccttttactgcctggaatatttcccatcgcagatgctgagaacgggcaataactttaccttcagctacaccttcgaggacgtgcctttccacagcagctacgcgcacagccagagcctggaccggctgatgaatcctctgattgaccagtacctgtactacttgtctcggactcaaacaacaggaggcacggcaaatacgcagactctgggcttcagccaaggtgggcctaatacaatggccaatcaggcaaagaactggctgccaggaccctgttaccgccaacaacgcgtctcaacgacaaccgggcaaaacaacaatagcaactttgcctggactgctgggaccaaataccatctgaatggaagaaattcattggctaatcctggcatcgctatggcaacacacaaagacgacaaggagcgtttttttcccagtaacgggatcctgatttttggcaaacaaaatgctgccagagacaatgcggattacagcgatgtcatgctcaccagcgaggaagaaatcaaaaccactaaccctgtggctacagaggaatacggtatcgtggcagataacttgcagcagcaaaacacggctcctcaaattggaactgtcaacagccagggggccttacccggtatggtctggcagaaccgggacgtgtacctgcagggtcccatctgggccaagattcctcacacggacggcaacttccacccgtctccgctgatgggcggctttggcctgaaacatcctccgcctcagatcctgatcaagaacacgcctgtacctgcggatcctccgaccaccttcaaccagtcaaagctgaactctttcatcacgcaatacagcaccggacaggtcagcgtggaaattgaatgggagctgcagaaggaaaacagcaagcgctggaaccccgagatccagtacacctccaactactacaaatctacaagtgtggactttgctgttaatacagaaggcgtgtactctgaaccccaccccattggcacccgttacctcacccgtcccctgtaa

SEQ ID NO: 1989 - DNA, 2214 bp, Artificial Sequence
  Description of Artificial Sequence: Synthetic polynucleotide
atggctgccgatggttatcttccagattggctcgaggacaacctctctgagggcattcgcgagtggtgggacttgaaacctggagccccgaaacccaaagccaaccagcaaaagcaggacgacggccggggtctggtgcttcctggctacaagtacctcggacccttcaacggactcgacaagggggagcccgtcaacgcggcggatgcagcggccctcgagcacgacaaggcctacgaccagcagctcaaagcgggtgacaatccgtacctgcggtataaccacgccgacgccgagtttcaggagcgtctgcaagaagatacgtcttttgggggcaacctcgggcgagcagtcttccaggccaagaagcgggttctcgaacctctcggtctggttgaggaaggcgctaagacggctcctggaaagaagagaccggtagagccatcaccccagcgttctccagactcctctacgggcatcggcaagaaaggccaacagcccgccagaaaaagactcaattttggtcagactggcgactcagagtcagtccccgacccacaacctctcggagaacctccagcaacccccgctgctgtgggacctactacaatggcttcaggcggtggcgcaccaatggcagacaataacgaaggcgccgacggagtgggtaatgcctcaggaaattggcattgcgattccacatggctgggcgacagagtcatcaccaccagcacccgaacatgggccttgcccacctataacaaccacctctacaagcaaatctccagtgcttcaacgggggccagcaacgacaaccactacttcggctacagcaccccctgggggtattttgatttcaacagattccactgccatttctcaccacgtgactggcagcgactcatcaacaacaatttgggatcccggcccaagagactcaacttcaagctcttcatcatccaagtcaaggaggtcacgacgaatgatggcgtcacgaccatcgctaataaccttaccagcacggttcaagtcttctcggactcggagtaccagttgccgtacgtcctcggctctgcgcaccagggctgcctccctccgttcccggcggacgtgttcatgattccgcagtacggctacctaacgctcaacaatggcagccaggcagtgggacggtcatccttttactgcctggaatatttcccatcgcagatgctgagaacgggcaataactttaccttcagctacaccttcgaggacgtgcctttccacagcagctacgcgcacagccagagcctggaccggctgatgaatcctctcatcgaccagtacctgtattacctgaacagaactcagaatcagtccggaagtgcccaaaacaaggacttgctgtttagccgggggtctccagctggcatgtctgttcagcccaaaaactggctacctggaccctgttaccggcagcagcgcgtttctaaaacaaaaacagacaacaacaacagcaactttacctggactggtgcttcaaaatataaccttaatgggcgtgaatctataatcaaccctggcactgctatggcctcacacaaagacgacaaagacaagttctttcccatgagcggtgtcatgatttttggaaaggagagcgccggagcttcaaacactgcattggacaatgtcatgatcacagacgaagaggaaatcaaagccactaaccccgtggccaccgaaagatttgggactgtggcagtcaatctccagagcagcagcacagaccctgcgaccggagatgtgcatgttatgggagccttacctggaatggtgtggcaagacagagacgtatacctgcagggtcctatttgggccaaaattcctcacacggatggacactttcacccgtctcctctcatgggcggctttggacttaagcacccgcctcctcagatcctcatcaaaaacacgcctgttcctgcgaatcctccggcagagttttcggctacaaagtttgcttcattcatcacccagtattccacaggacaagtgagcgtggagattgaatgggagctgcagaaagaaaacagcaaacgctggaatcccgaagtgcagtatacatctaactatgcaaaatctgccaacgttgatttcactgtggacaacaatggactttatactgagcctcgccccattggcacccgttacctcacccgtcccctgtaa

SEQ ID NO: 1990 - DNA, 2211 bp, Artificial Sequence
  Description of Artificial Sequence: Synthetic polynucleotide
atggctgccgatggttatcttccagattggctcgaggacaacctctctgagggcattcgcgagtggtgggcgctgaaacctggagccccgaaacccaaagccaaccagcaaaagcaggacgacggccggggtctggtgcttcctggctacaagtacctcggacccttcaacggactcgacaagggggagcccgtcaacgcggcggacgcagcggccctcgagcacgacaaggcctacgaccagcagctcaaggcgggtgacaatccgtacctgcggtataaccacgccgacgccgagtttcaggagcgtctgcaagaagatacgtcttttgggggcaacctcgggcgagcagtcttccaggccaaaaagaggcttcttgaacctcttggtctggttgaggaagcggctaagacggctcctggaaagaaacgtccggtagagcagtcgccacaagagccagactcctcctcgggcattggcaagacaggccagcagcccgctaaaaagagactcaactttgggcagactggcgactcagagtcagtgcccgaccctcaaccaatcggagaacctccagcaacccccgctgctgtgggacctactacaatggcttcaggcggtggcgcaccaatggcggacaataacgaaggcgccgatggagtgggtaattcctcgggaaattggcattgcgattccacatggctgggcgacagagtcatcaccaccagcacccgaacctgggccctgcccacctacaacaatcacctctacaagcaaatctccagtgcttcaacgggggccagcaacgacaaccactacttcggctacagcaccccctgggggtattttgatttcaacagattccactgccacttttcaccacgtgactggcagcgactcatcaacaacaactggggattccggcccaagagactcaacttcaagctcttcaacatccaggtcaaggaggtcacgcagaatgaaggcaccaagaccatcgccaataacctcaccagcaccatccaggtgtttacggactcggagtaccagctgccgtacgttctcggctccgcccaccagggctgcctgcctccgttcccggcggacgtgttcatgattccgcagtacggctacctaacgctcaacaatggcagccaggcagtgggacggtcatccttttactgcctggaatatttcccatcgcagatgctgagaacgggcaacaactttaccttcagctacacctttgaggacgttcctttccacagcagctacgctcacagccagagtctggaccgtctcatgaatcctctgattgaccagtacctgtactacttgtctcggactcaaacaacaggaggcacggcaaatacgcagactctgggcttcagccaaggtgggcctaatacaatggccaatcaggcaaagaactggctgccaggaccctgttaccgccaacaacgcgtctcaacgacaaccgggcaaaacaacaatagcaactttgcctggactgctgggaccaaataccatctgaatggaagaaattcattggctaatcctggcatcgctatggcaacacacaaagacgacaaggagcgtttttttcccagtaacgggatcctgatttttggcaaacaaaatgctgccagagacaatgcggattacagcgatgtcatgctcaccagcgaggaagaaatcaaaaccactaaccctgtggctacagaggaatacggtatcgtggcagataacttgcagcagcaaaacacggctcctcaaattggaactgtcaacagccagggggccttacccggtatggtctggcagaaccgggacgtgtacctgcagggtcccatctgggccaagattcctcacacggacggcaacttccacccgtctccgctgatgggcggctttggcctgaaacatcctccgcctcagatcctgatcaagaacacgcctgtacctgcggatcctccgaccaccttcaaccagtcaaagctgaactctttcatcacgcaatacagcaccggacaggtcagcgtggaaattgaatgggagctgcagaaggaaaacagcaagcgctggaaccccgagatccagtacacctccaactactacaaatctacaagtgtggactttgctgttaatacagaaggcgtgtactctgatccccaccccattggcacccgttacctcacccgtcccctgtaa

SEQ ID NO: 1991 - DNA, 2211 bp, Artificial Sequence
  Description of Artificial Sequence: Synthetic polynucleotide
atggctgccgatggttatcttccagattggctcgaggacaacctctctgagggcattcgcgagtggtgggcgctgaaacctggagccccgaagcccaaagccaaccagcaagagcaggacgacggccggggtctggtgcttcctggctacaagtacctcggacccttcaacggactcgacaagggagagcccgtcaacgcggcggatgcagcggccctcgagcacgacaaagcctacgaccagcagctcaaagcgggtgacaatccgtacctgcggtataaccacgccgacgccgagtttcaggagcgtctgcaagaagatacgtcttttgggggcaacctcgggcgagcagtcttccaggccaagaagagggttctcgaaccttttggtctggttgaggaaggtgctaagacggctcctggaaagaaacgtccggtagagcagtcgccacaagagccagactcctcctcgggcattggcaagacaggccagcagcccgctaaaaagagactcaattttggtcagactggcgactcagagtcagttccagaccctcaacctctcggagaacctccagcagcgccctctggtgtgggacctaatacaatggctgcaggcggtggcgcaccaatggcagacaataacgaaggcgccgacggagtgggtagttcctcgggaaattggcattgcgattccacatggctgggcgacagagtcatcaccaccagcacccgaacctgggccctgcccacctacaacaaccacctctacaagcaaatctccagtgcttcaacgggggccagcaacgacaaccactacttcggctacagcaccccctgggggtattttgactttaacagattccactgccacttttcaccacgtgactggcagcgactcatcaacaacaactggggattccggcccaagagactcaacttcaagctcttcaacatccaggtcaaggaggtcacgcagaatgaaggcaccaagaccatcgccaataaccttaccagcacgattcaggtctttacggattcggaataccagctcccgtacgtcctcggctctgcgcaccagggctgcctccctccgttcccggcggacgtgttcatgattccgcagtacggctacctaacgctcaacaatggtagccaggcagtgggacggtcatcctttttctgcctggaatatttcccatcgcagatgctgagaacgggcaacaactttaccttcagctacacctttgaggacgttcctttccacagcagctacgctcacagccagagtctggaccgtctcatgaatcctctgattgaccagtacctgtactacttgtctcggactcaaacaacaggaggcacggcaaatacgcagactctgggcttcagccaaggtgggcctaatacaatggccaatcaggcaaagaactggctgccaggaccctgttaccgccaacaacgcgtctcaacgacaaccgggcaaaacaacaatagcaactttgcctggactgctgggaccaaataccatctgaatggaagaaattcattggctaatcctggcatcgctatggcaacacacaaagacgacaaggagcgtttttttcccagtaacgggatcctgatttttggcaaacaaaatgctgccagagacaatgcggattacagcgatgtcatgctcaccagcgaggaagaaatcaaaaccactaaccctgtggctacagaggaatacggtatcgtggcagataacttgcagcagcaaaacacggctcctcaaattggaactgtcaacagccagggggccttacccggtatggtctggcagaaccgagacgtgtacctgcagggtcccatctgggccaagattcctcacacggacggcaacttccacccgtctccgctgatgggcggctttggcctgaaacatcctccgcctcagatcctgatcaagaacacgcctgtacctgcggatcctccgaccaccttcaaccagtcaaagctgaactctttcatcacgcaatacagcaccggacaggtcagcgtggaaattgaatgggagctgcagaaggaaaacagcaagcgctggaaccccgagatccagtacacctccaactactacaaatctacaagtgtggactttgctgttaatacagaaggcgtgtactctgaaccccaccccattggcacccgttacctcacccgtcccctgtaa

SEQ ID NO: 1992 - DNA, 2211 bp, Artificial Sequence
  Description of Artificial Sequence: Synthetic polynucleotide
atggctgccgatggttatcttccagattggctcgaggacaacctctctgagggcattcgcgagtggtgggacttgaaacctggagccccgaagcccaaagccaaccagcaaaagcaggacgacggccggggtctggtgcttcctggctacaagtacctcggacccttcaacggactcgacaagggggagcccgtcaacgcggcggacgcagcggccctcgagcacgacaaggcctacgaccagcagctcaaagcgggtgacaatccgtacctgcggtataaccacgccgacgccgagtttcaggagcgtctgcaagaagatacgtcttttgggggcaacctcgggcgagcagtcttccaggccaagaagcgggttctcgaacctctcggtctggttgaggaaggcgctaagacggctcctggaaagaaacgtccggtagagcagtcaccacaagagccagactcctcctcgggcatcggcaagacaggccagcagcccgctaaaaagagactcaattttggtcagactggcgactcagagtcagtccccgacccacaacctctcggagaacctccagcaacccccgctgctgtgggacctactacaatggcttcaggcggtggcgcaccaatggcggacaataacgaaggcgccgacggagtgggtaatgcctcaggaaattggcattgcgattccacatggctgggcgacagagtcatcaccaccagcacccgaacatgggccttgcccacctataacaaccacctctacaagcaaatctccagtgcttcaacgggggccagcaacgacaaccactacttcggctacagcaccccctgggggtattttgatttcaacagattccactgccatttctcaccacgtgactggcagcgactcatcaacaacaattggggattccggcccaagagactcaacttcaagctcttcaacatccaagtcaaggaggtcacgacgaatgatggcgtcacgaccatcgctaataaccttaccagcacggttcaagtcttctcggactcggagtaccagttgccgtacgtcctcggctctgcgcaccagggctgcctccctccgttcccggcggacgtgttcatgattccgcagtacggctacctaacgctcaacaatggcagccaggcagtgggacggtcatccttttactgcctggaatatttcccatcgcagatgctgagaacgggcaataactttaccttcagctacaccttcgaggacgtgcctttccacagcagctacgcgcacagccagagcctggaccggctgatgaatcctctcatcgaccagtacctgtattacctgaacagaactcagaatcagtccggaagtgcccaaaacaaggacttgctgtttagccgggggtctccagctggcatgtctgttcagcccaaaaactggctacctggaccctgttaccggcagcagcgcgtttctaaaacaaaaacagacaacaacaacagcaactttacctggacaggtgcttcaaaatataaccttaatgggcgtgaatctataatcaaccctggcactgctatggcctcacacaaagacgacaaagacaagttctttcccatgagcggtgtcatgatttttggaaaggagagcgccggagcttcaaacactgcattggacaatgtcatgatcacagacgaagaggaaatcaaagccactaaccccgtggccaccgaaagatttgggactgtggcagtcaatctccagaacagcagcacagaccctgcgaccggagatgtgcatgttatgggagccttacctggaatggtgtggcaagacagagacgtatacctgcagggtcctatttgggccaaaattcctcacacggatggacactttcacccgtctcctctcatgggcggctttggacttaagcacccgcctcctcagatcctcatcaaaaacacgcctgttcctgcgaatcctccggcagagttttcggctacaaagtttgcttcattcatcacccagtattccacaggacaagtgagcgtggagattgaatgggagctgcagaaagaaaacagcaaacgctggaatcccgaagtgcagtatacatctaactatgcaaaatctgccaacgttgatttcactgtagacaacaatggactttatactgtgcctcgccccattggcacccgttacctcacccgtcccctgtaa

SEQ ID NO: 1993 - DNA, 2211 bp, Artificial Sequence
  Description of Artificial Sequence: Synthetic polynucleotide
atggctgccgatggttatcttccagattggctcgaggacaacctctctgagggcattcgcgagtggtgggcgctgaaacctggagccccgaagcccaaagccaaccagcaaaagcaggacgacggccggggtctggtgcttcctggctacaagtacctcggacccttcaacggactcgacaaaggagagccggtcaacgcggcggacgcggcggccctcgaacacgacaaggcttacgaccagcagctcaaggcgggtgacaacccctacctgcggtataaccacgccgacgccgagttccaggagcggctgcaagaagatacgtcttttgggggcaacctcgggcgagcagtcttccaggccaaaaagaggcttcttgaacctcttggtctggttgaggaaggcgctaagacggctcctggaaagaagaggcctgtagagcagtctcctcaagaaccggactcctcctcgggtattggcaaaacaggtgagcagcccgctaaaaagagactcaattttggtcagactggcgactcagagtcagtccccgacccacaacctctcggagaacctccagcaacccccgctgctgtgggacctactacaatggcttcaggcggtggcgcaccaatggcagacaataacgaaggcgccgacggagtgggtagtgcctcaggaaattggcattgcgattccacatggctgggcgacagagtcatcaccaccagcacccgaacctgggccctgcccacctataacaaccatctctacaagcaaatctccagtgcttcaacgggggccagcaacgacaaccactacttcggctacagcaccccctgggggtattttgacttcaacagattccactgccacttctcaccacgtgactggcagcgactcatcaacaacaactggggattccggcctaagcgactcaacttcaagctcttcaacattcaggtcaaagaggttacggacaacaatggagtcaagaccatcgccaataacctcaccagcaccatccaggtgttcacggactcagagtatcagctgccgtacgtgctcgggtcggctcaccagggctgcctccctccgttcccagcggacgtgttcatgattcctcagtacgggtatctgacactcaacaacggcagtcaggcagtgggacggtcatccttctactgcctggaatattttccatcgcagatgctgagaaccggcaacaactttccgttcagttacaccttcgaggacgtgcctttccacagcagctacgcgcacagccagagcctggaccggctgatgaatcctctgattgaccagtacctgtactacttgtctcggactcaaacaacaggaggcacggcaaatacgcagactctgggcttcagccaaggtgggcctaatacaatggccaatcaggcaaagaactggctgccaggaccctgttaccgccaacaacgcgtctcaacgacaaccgggcaaaacaacaatagcaactttgcctggactgctgggaccaaataccatctgaatggaagaaattcattggctaatcctggcatcgctatggcaacacacaaagacgacaaggagcgtttttttcccagtaacgggatcctgatttttggcaaacaaaatgctgccagagacaatgcggattacagcgatgtcatgctcaccagcgaggaagaaatcaaaaccactaaccctgtggctacagaggaatacggtatcgtggcagataacttgcagcagcaaaacacggctcctcaaattggaactgtcaacagccagggggccttacccggtatggtctggcagaaccgggacgtgtacctgcagggtcccatctgggccaagattcctcacacggacggcaacttccacccgtctccgctgatgggcggctttggcctgaaacatcctccgcctcagatcctgatcaagaacacgcctgtacctgcggatcctccgaccaccttcaaccagtcaaagctgaactctttcatcacgcaatacagcaccggacaggtcagcgtggaaattgaatgggagctgcagaaggaaaacagcaagcgctggaaccccgagatccagtacacctccaactactacaaatctacaagtgtggactttgctgttaatacagaaggcgtgtactctgaaccccaccccattggcacccgttacctcacccgtcccctgtaa

SEQ ID NO: 1994 - DNA, 2211 bp, Artificial Sequence
  Description of Artificial Sequence: Synthetic polynucleotide
atggctgccgatggttatcttccagattggctcgaggacaacctctctgagggcattcgcgagtggtgggcgctgaaacctggagccccgaagcccaaagccaaccagcaaaagcaggacgacggccggggtctggtgcttcctggctacaagtacctcggacccttcaacggactcgacaagggggagcccgtcaacgcggcggacgcagcggccctcgagcacgacaaggcctacgaccagcagctcaaagcgggtgacaatccgtacctgcggtataaccacgccgacgccgagtttcaggagcgtctgcaagaagatacgtcttttgggggcaacctcgggcgagcagtcttccaggccaagaagcgggttctcgaacctctcggtctggttgaggaaggcgctaagacggctcctggaaagaaacgtccggtagaacagtcgccacaagagccagactcctcctcgggcatcggcaagacaggccagcagcccgctaaaaagagactcaattttggtcagactggcgactcagagtcagtccccgatccacaacctctcggagaacctccagcaacccccgctgctgtgggacctactacaatggcttcaggcggtggcgcaccaatggcagacaataacgaaggcgccgacggagtgggtagttcctcgggaaattggcattgcgattcccaatggctgggggacagagtcatcaccaccagcacccgaacctgggccctgcccacctacaacaaccacctctacaagcaaatctccagtgcttcaacgggggccagcaacgacaaccactacttcggctacagcaccccctgggggtattttgatttcaacagattccactgccatttctcaccacgtgactggcagcgactcatcaacaacaactggggattccggcctaagcgactcaacttcaagctcttcaacattcaggtcaaagaggttacggacaacaatggagtcaagaccatcgccaataaccttaccagcacggtccaggtcttcacggactcggagtaccagttgccgtacgtcctcggctctgcgcaccaggactgcctccctccgttcccggcggacgtgttcatgattccgcagtacggctacctaacgctcaacaatggcagccaggcagtgggacggtcatccttttactgcctggaatatttcccatcgcagatgctgagaacgggcaacaactttaccttcagctacacctttgaggacgttcctttccacagcagctacgctcacagccagagtctggaccgtctcatgaatcctctgattgaccagtacctgtactacttgtctcggactcaaacaacaggaggcacggcaaatacgcagactctgggcttcagccaaggtgggcctaatacaatggccaatcaggcaaagaactggctgccaggaccctgttaccgccaacaacgcgtctcaacgacaaccggacaaaacaacaatagcaactttgcctggactgctgggaccaaataccatctgaatggaagaaattcattggctaatcctggcatcgctatggcaacacacaaagacgacaaggagcgtttttttcccagtaacgggatcctgatttttggcaaacaaaatgctgccagagacaatgcggattacagcgatgtcatgctcaccagcgaggaagaaatcaaaaccactaaccctgtggctacagaggaatacggtatcgtggcagataacttgcagcagcaaaacacggctcctcaaattggaactgtcaacagccagggggccttacccggtatggtctggcagaaccgggacgtgtacctgcagggtcccatctgggccaagattcctcacacggacggcaacttccacccgtctccgctgatgggcggctttggcctgaaacatcctccgcctcagatcctgatcaagaacacgcctgtacctgcggatcctccgaccaccttcaaccagtcaaagctgaactctttcatcacgcaatacagcaccggacaggtcagcgtggaaattgaatgggagctgcagaaggaaaacagcaagcgctggaaccccgagatccagtacacctccaactactacaaatctacaagtgtggactttgctgttaatacagaaggcgtgtactctgaaccccaccccattggcacccgttacctcacccgtcccctgtaa

SEQ ID NO: 1995 - DNA, 2211 bp, Artificial Sequence
  Description of Artificial Sequence: Synthetic polynucleotide
atggctgccgatggttatcttccagattggctcgaggacaacctctctgagggcattcgcgagtggtgggacttgaaacctggagccccgaagcccaaagccaaccagcaaaagcaggacgacggccggggtctggtgcttcctggctacaagtacctcggacccttcaacggactcgacaagggggagcccgtcaacgcggcggacgcagcggccctcgagcacgacaaggcctacgaccagcagctcaaagcgggtgacaatccgtacctgcggtataaccacgccgacgccgagtttcaggagcgtctgcaagaagatacgtcttttgggggcaacctcgggcgagcagtcttccaggccaagaagcgggttctcgaacctctcggtctggttgaggaaggcgctaagacggctcctggaaagaaacgtccggtagagcagtcaccacaagagccagactcctcctcgggcatcggcaagacaggccagcagcccgctaaaaagagactcaattttggtcagactggcgactcagagtcagtccccgacccacaacctctcggagaacctccagcaacccccgctgctgtgggacctactacaatggcttcaggcggtggcgcaccaatggcagacaataacgaaggtgccgacggagtgggtaatgcctcaggaaattggcattgcgattccacatggctgggcgactgagtcatcaccaccagcacccgcacctgggccttgcccacctacaataaccacctctacaagcaaatctccagtgcttcaacgggggccagcaacgacaaccactacttcggctacagcaccccctgggggtattttgatttcaacagattccactgccacttttcaccacgtgactggcagcgactcatcaacaacaattggggattccggcccaagagactcaacttcaaactcttcaacatccaagtcaaggaggtcacgcagaatgaaggcaccaagaccatcgccaataacctcaccagcaccatccaggtgtttacggactcggagtaccagctgccgtacgttctcggctctgcccaccagggctgcctgcctccgttcccggcggacgtgttcatgattccccagtacggctacctaacgctcaacaatggcagccaggcagtgggacggtcatccttttactgcctggaatactttccttcgcagatgctgagaaccggcaacaacttccagtttacttacaccttcgaggacgtgcctttccacagcagctacgcccacagccagagcttggaccggctgatgaatcctctgattgaccagtacctgtactacttgtctcggactcaaacaacaggaggcacggcaaatacgcagactctgggcttcagccaaggtgggcctaatacaatggccaatcaggcaaagaactggctgccaggaccctgttaccgccaacaacgcgtctcaacgacaaccgggcaaaacaacaatagcaactttgcctggactgctgggaccaaataccatctgaatggaagaaattcattggctaatcctggcatcgctatggcaacacacaaagacgacaaggagcgtttttttcccagtaacgggatcctgatttttggcaaacaaaatgctgccagagacaatgcggattacagcgatgtcatactcaccagcgaggaagaaatcaaaaccactaaccctgtggctacagaggaatacggtatcgtggcagataacttgcagcagcaaaacacggctcctcaaattggaactgtcaacagccagggggccttacccggtatggtctggcagaaccgggacgtgtacctgcagggtcccatctgggccaagattcctcacacggacggcaacttccacccgtctccgctgatgggcggctttggcctgaaacatcctccgcctcagatcctgatcaagaacacgcctgtacctgcggatcctccgaccaccttcaaccagtcaaagctgaactctttcatcacgcaatacagcaccggacaggtcagcgtggaaattgaatgggagctgcagaaggaaaacagcaagcgctggaaccccgagatccagtacacctccaactactacaaatctacaagtgtggactttgctgttaatacagaaggcgtgtactctgaaccccaccccattggcacccgttacctcacccgtcccctgtaa

SEQ ID NO: 1996 - DNA, 2211 bp, Artificial Sequence
  Description of Artificial Sequence: Synthetic polynucleotide
atggctgccgatggttatcttccagattggctcgaggacactctctctgaaggaataagacagtggtggaagctcaaacctggcccaccaccaccaaagcccgcagagcggcataaggacgacagcaggggtcttgtgcttcctgggtacaagtacctcggacccttcaacggactcgacaagggagagccggtcaacgaggcagacgccgcggccctcgagcacgacaaagcctacgaccggcagctcgacagcggagacaacccgtacctcaagtacaaccacgccgacgcggagtttcaggagcgccttaaagaagatacgtcttttgggggcaacctcgggcgagcagtcttccaggccaagaagagggttctcgaaccttttggtctggttgaggaaggtgctaagacggctcctggaaagaaacgtccggtagagcagtcgccacaagagccagactcctcctcgggcattggcaagacaggccagcagcccgctaaaaagagactcaattttggtcagactggcgactcagagtcagtccccgacccacaacctctcggagaacctccagcaacccccgctgctgtgggacctactacaatggcttcaggcggtggcgcaccaatggcagacaataacgaaggcgccgacggagtgggtaatgcctcaggaaattggcattgcgattccacatggctgggcgacagagtcatcaccaccagcacccgaacatgggccttgcccacctataacaaccacctctacaagcaaatctccagtacttcaacgggggccagtaacgacaaccactacttcggctacagcaccccctgggggtattttgacttcaacagattccactgccacttctcaccacgtgactggcagcgactcatcaacaacaactggggattccggcctaagcgactcaacttcaagctcttcaacattcaggtcaaagaggttacggacaacaatggagtcaagaccatcgccaataaccttaccagcacggtccaggtcttcacggactcggagtaccagttgccgtacgtcctcggctctgcgcaccagggctgcctgcctccgttcccggcggacgtgttcatgattccgcagtacggctacctaacgctcaacaatggcagccaggcagtgggacggtcatccttttactgcctggaatatttcccatcgcagatgctgagaacgggcaacaactttaccttcagctacacttttgaggacgttcctttccacagcagctacgctcacagccagagtctggaccgtctcatgaatcctctgattgaccagtacctgtactacttgtctcggactcaaacaacaggaggcacggcaaatacgcagactctgggcttcagccaaggtgggcctaatacaatggccaatcaggcaaagaactggctgccaggaccctgttaccgccaacaacgcgtctcaacgacaaccggacaaaacaacaatagcaactttgcctggactgctgggaccaaataccatctgaatggaagaaattcattggctaatcctggcatcgctatggcaacacacaaagacgacaaggagcgtttttttcccagtaacgggatcctgatttttggcaaacaaaatgctgccagagacaatgcggattacagcgatgtcatgctcaccagcgaggaagaaatcaaaaccactaaccctgtggctacagaggaatacggtatcgtggcagataacttgcagcagcaaaacacggctcctcaaattggaactgtcaacagccagggggccttacccggtatggtctggcagaaccgggacgtgtacctgcagggtcccatctgggccaagattcctcacacggacggcaacttccacccgtctccgctgatgggcggctttggcctgaaacatcctccgcctcagatcctgatcaagaacacgcctgtacctgcggatcctccgaccaccttcaaccagtcaaagctgaactctttcatcacgcaatacagcaccggacaggtcagcgtggaaattgaatgggagctgcagaaggaaaacagcaagcgctggaaccccgagatccagtacacctccaactactacaaatctacaagtgtggactttgctgttaatacagaaggcgtgtactctgaaccccaccccattggcacccgttacctcacccgtcccctgtaa

SEQ ID NO: 1997 - DNA, 2208 bp, Artificial Sequence
  Description of Artificial Sequence: Synthetic polynucleotide
atggctgccgatggttatcttccagattggctcgaggacaacctctctgagggcattcgcgagtggtgggacttgaaacctggagccccgaagcccaaagccaaccagcaaaagcaggacgacggccggggtctggtgcttcctggctacaagtacctcggacccttcaacggactcgacaagggggagcccgtcaacgcggcggatgcagcggccctcgagcacgacaaggcctacgaccggcagctcgacagcggagacaacccgtacctgcggtataaccacgccgacgcggagtttcaggagcgccttaaagaagatacgtcttttgggggcaacctcgggcgagcagtcttccaggccaagaagagggttctcgaaccttttggtctggttgaggaaggtgctaagacggctcctggaaagaaacgtccggtagagcagtcgccacaagagccagactcctcctcgggcattggcaagacaggccagcagcccgctaaaaagagactcaattttggtcagactggcgactcagagtcagtccccgacccacaacctctcggagaacctccagcaacccccgctgctgtgggacctactacaatggcttcaggcggtggcgcaccaatggcagacaataacgaaggcgccgacggagtgggtaatgcctcaggaaattggcattgcgattccacatggctgggcgacagagtcatcaccaccagcacccgcacctgggccttgcccacctacaataaccacctctacaagcaaatctccagtgcttcaacgggggccagcaacgacaaccactacttcggctacagcaccccctgggggtattttgactttaacagattccactgccacttttcaccacgtgactggcaaagactcatcaacaacaactggggattccggcccaagagactcaacttcaagctcttcaacatccaggtcaaggaggtcacgcagaatgaaggcaccaagaccatcgccaataaccttaccagcacgattcaggtctttacggactcggaataccagctcccgtacgtcctcggctctgcgcaccagggctgcctccctccgttcccggcggacgtgttcatgattccgcagtacggctacctaacactcaacaacggtagtcaggccgtgggacgctcctccttctactgcctggaatactttccttcgcagatgctgagaaccggcaacaacttccagtttacttacaccttcgaggacgtgcctttccacagcagctacgcccacagccagagcttggaccggctgatgaatcctctgattgaccagtacctgtactacttgtctcggactcaaacaacaggaggcacggcaaatacgcagactctgggcttcagccaaggtgggcctaatacaatggccaatcaggcaaagaactggctgccaggaccctgttaccgccaacaacgcgtctcaacgacaaccgggcaaaacaacaatagcaactttgcctggactgctgggaccaaataccatctgaatggaagaaattcactggctaatcctggcatcgctatggcaacacacaaagacgacaggagcgtttttttccagtaccgggatcctgattttggcaaacaaaatgctgccagagacaatgcggattacagcgatgtcatgctcaccagcgaggaagaaatcaaaaccactaaccctgtggctacagaggaatacggtatcgtggcagataacttgcagcagcaaaacacggctcctcaaattggaactgtcaacagccagggggccttacccggtatggtctggcagaaccgggacgtgtacctgcagggtcccatctgggccaagattcctcacacggacggcaacttccacccgtctccgctgatgggcggctttggcctgaaacatcctccgcctcagatcctgatcaagaacacgcctgtacctgcggatcctccgaccaccttcaaccagtcaaagctgaactctttcatcacgcaatacagcaccggacaggtcagcgtggaaattgaatgggagctgcagaaggaaaacagcaagcgctggaaccccgagatccagtacacctccaactactacaaatctacaagtgtggactttgctgttaatacagaaggcgtgtactctgaaccccaccccattggcacccgttacctcacccgtcccctgtaa

SEQ ID NO: 1998 - DNA, 2211 bp, Artificial Sequence
  Description of Artificial Sequence: Synthetic polynucleotide
atggctgccgatggttatcttccagattggctcgaggacaacctctctgagggcattcgcgagtggtgggcgctgaaacctggagccccgaagcccaaagccaaccagcaaaagcaggacgacggccggggtctggtgcttcctggctacaagtacctcggacccttcaacggactcgacaagggggagcccgtcaacgcggcggatgcagcagccctcgaacacgacaaagcttacgaccagcagctcaaggccggtgacaacccctacctcaagtataaccacgccgacgccgagtttcaggagcgtcttcaaggagatacgtcttttgggggcaacctcggacgagcagtcttccaggccaagaagcgggttctcgaacctcttggtctggttgaggaagcggctaagacggctcctggaaagaagaggcctgtagagcagtctcctcaggaaccggactcctccgcgggtattggcaaatcgggtgcacagcccgctaaaaagagactcaatttcggtcagactggcgacacagagtcagtcccagaccctcaacctctcggagaacctccagcagcgccctctggtgtgggacctaatacaatggctgcaggcggtggcgcaccaatggcagacaataacgaaggtgccgatggagtgggtagttcctcgggaaattggcattgcgattcccaatggctgggggacagagtcatcaccaccagcacccgaacctgggccctgcccacctacaacaaccacctctacaagcaaatctccagtgcttcaacgggggccagcaacgacaaccactacttcggctacagcaccccttgggggtattttgacttcaacagattccactgccacttttcaccacgtgactggcagcgactcatcaacaacaactggggattccggcctaagcgactcaacttcaagctcttcaacattcaggtcaaagaggttacggacaacaatggagtcaagaccatcgccaataaccttaccagcacggtccaggtcttcacggactcagactatcagctcccgtacgtgctcgggtcggctcacgagggctgcctccctccgttcccggcggacgtgttcatgattccgcagtacggctacctaacgctcaacaatggcagccaggcagtgggacggtcatccttttactgcctggaatactttccttcgcagatgctgagaaccggcaacaacttccagtttacttacaccttcgaggacgtgcctttccacagcagctacgctcacagccagagtctggaccgtctcatgaatcctctgattgaccagtacctgtactacttgtctcggactcaaacaacaggaggcacggcaaatacgcagactctgggcttcagccaaggtgggcctaatacaatggccaatcaggcaaagaactggctgccaggaccctgttaccgccaacaacgcgtctcaacgacaaccgggcaaaacaacaatagcaactttgcctggactgctgggaccaaataccatctgaatggaagaaattcattggctaatcctggcatcgctatggcaacacacaaagacgacaaggagcgtttttttcccagtaacgggatcctgatttttggcaaacaaaatgctgccagagacaatgcggattacagcgatgtcatgctcaccagcgaggaagaaatcaaaaccactaaccctgtggctacagaggaatacggtatcgtagcagataacttgcagcagcaaaacacggctcctcaaattggaactgtcaacagccagggggccttacccggtatggtctggcagaaccgggacgtgtacctgcagggtcccatctgggccaagattcctcacacggacggcaacttccacccgtctccgctgatgggcggctttggcctgaaacatcctccgcctcagatcctgatcaagaacacgcctgtacctgcggatcctccgaccaccttcaaccagtcaaagctgaactctttcatcacgcaatacagcaccggacaggtcagcgtggaaattgaatgggagctgcagaaggaaaacagcaagcgctggaaccccgagatccagtacacctccaactactacaaatctacaagtgtggactttgctgttaatacagaaggcgtgtactctgaaccccaccccattggcacccgttacctcacccgtcccctgtaa

SEQ ID NO: 1999 - DNA, 2211 bp, Artificial Sequence
  Description of Artificial Sequence: Synthetic polynucleotide
atggctgccgatggttatcttccagattggctcgaggacactctctctgaaggaataagacagtggtggaagctcaaacctggcccaccaccaccaaagcccgcagagcggcataaggacgacagcaggggtcttgtgcttcctgggtacaagtacctcggacccttcaacggactcgacaagggagagccggtcaacgaggcagacgccgcggccctcgagcacgacaaagcctacgaccggcagctcgacagcggagacaacccgtacctcaagtacaaccacgccgacgcggagtttcaggagcgccttaaagaagatacgtcttttgggggcaacctcgggcgagcagtcttccaggccaagaagagggttctcgaaccttttggtctggttgaggaagcggctaagacggctcctggaaagaaacgtccggtagagcagtcgccacaagagccagactcctcctcgggcattggcaagacaggccagcagcccgctaaaaagagactcaattttggtcagactggcgactcagagtcagtccccgacccacaacctctcggagaacctccagcaacccccgctgctgtgggacctactacaatggcttcaggcggtggcgcaccaatggcagacaataacgaaggcgccgacggagtgggtaatgcctcaggaaattggcattgcgattccacatggctgggcgacagagtcatcaccaccagcacccgaacatgggccttgcccacctataacaaccacctctacaagcaaatctccagtgcttcaacgggggccagcaacgacaaccactacttcggctacagcaccccctgggggtattttgacttcaacagattccactgccacttctcaccacgtgactggcagcgactcatcaacaacaactggggattccggcctaagcgactcaacttcaagctcttcaacattcaggtcaaagaggttacggacaacaatggagtcaagaccatcgccaataaccttaccagcacggtccaggtcttcacggactcagactatcagctcccgtacgtgctcgggtcggctcacgagggctgcctcccgccgttcccagcggacgttttcatgattcctcagtacggctacctaacactcaacaacggtagtcaggccgtgggacgctcctccttctactgcctggaatactttccttcgcagatgctgagaacgggcaacaactttaccttcagctacacctttgaggacgttcctttccacagcagctacgctcacagccagagtctggaccgtctcatgaatcctctgattgaccagtacctgtactacttgtctcggactcaaacaacaggaggcacggcaaatacgcagactctgggcttcagccaaggtgggcctaatacaatggccaatcaggcaaagaactggctgccaggaccctgttaccgccaacaacgcgtctcaacgacaaccgggcaaaacaacaatagcaactttgcctggactgctgggacaaaataccatctgaatggaagaaattcattggctaatcctggcatcgctatggcaacacacaaagacgacaaggagcgtttttttcccagtaacgggattctgatttttggcaaacaaaatgctgccagagacaatgcggattacagcgatgtcatgctcaccagcgaggaagaaatcaaaaccactaaccctgtggctacagaggaatacggtatcgtggcagataacttgcagcagcaaaacacggctcctcaaattggaactgtcaacagccagggggccttacccggtatggtctggcagaaccgggacgtgtacctgcagggtcccatctgggccaagattcctcacacggacggcaacttccacccgtctccgctgatgggcggctttggacttaagcacccgcctcctcagatcctcatcaaaaacacgcctgttcctgcggatcctccgaccaccttcaaccagtcaaagctgaactctttcatcacgcaatacagcaccggacaggtcagcgtggaaattgaatgggagctgcagaaggaaaacagcaagcgctggaaccccgagatccagtacacctccaactactacaaatctacaagtgtggactttgctgttaatacagaaggcgtgtactctgaaccccaccccattggcacccgttacctcacccgtcccctgtaa

SEQ ID NO: 2000 - DNA, 2211 bp, Artificial Sequence
  Description of Artificial Sequence: Synthetic polynucleotide
atggctgccgatggttatcttccagattggctcgaggacaacctctctgagggcattcgcgagtggtgggcgctgaaacctggagccccgaagcccaaagccaaccagcaaaagcaggacgacggccggggtctggtgcttcctggctacaagtacctcggacccttcaacggactcgacaaaggagagccggtcaacgcggcggacgcagcggccctcgagcacgacaaggcctacgaccagcagctcaaagcgggtgacaatccgtacctgcggtataaccacgccgacgccgagtttcaggagcgtctgcaagaagatacgtcttttgggggcaacctcgggcgagcagtcttccaggccaagaagcgggttctcgaacctctcggtctggttgaggaaggcgctaagacggctcctggaaagaaacgtccggtagagcagtcgccacaagagccagactcctcctcgggcatcggcaagacaggccagcagcccgctaaaaagagactcaattttggtcagactggcgactcagagtcagtccccgacccacaacctctcggagaacctccagcaacccccgctgctgtgggacctactacaatggcttcaggcggtggcgcaccaatggcagacaataacgaaggcgccgacggagtgggtagttcctcgggaaattggcattgcgattccacatggctgggcgacagagtcatcaccaccagcacccgcacctgggccttgcccacctacaataaccacctctacaagcaaatctccagtgcttcaacgggggccagcaacgacaaccactacttcggctacagcaccccctgggggtattttgacttcaacagattccactgccacttctcaccacgtgactggcagcgactcatcaacaacaactggggattccggcctaagcgactcaacttcaagctcttcaacattcaggtcaaagaggttacggacaacaatggagtcaagaccatcgccaataaccttaccagcacggtccaggtcttcacggactcggagtaccagttgccgtacgtcctcggctctgcgcaccagggctgcctccctccgttcccggcggacgtgttcatgattccgcagtacggctacctaacgctcaacaatggcagccaggcagtgggacggtcatccttttactgcctggaatatttcccatcgcagatgctgagaacgggcaacaactttaccttcagctacacctttgaggacgttcctttccacagcagctacgctcacagccagagtctggaccgtctcatgaatcctctgattgaccagtacctgtactacttgtctcggactcaaacaacaggaggcacggcaaatacgcagactctgggcttcagccaaggtgggcctaatacaatggccaatcaggcaaagaactggctgccaggaccctgttaccgccaacaacgcgtctcaacgacaaccgggcaaaacaacaatagcaactttgcctggactgctgggaccaaataccatctgaatggaagaaattcattggctaatcctggcatcgctatggcaacacacaaagacgacaaggagcgtttttttcccagtaacgggatcctgatttttggcaaacaaaatgctgccagagacaatgcggattacagcgatgtcatgctcaccagcgaggaagaaatcaaaaccactaaccctgtggctacagaggaatacggtatcgtggcagataacttgcagcagcaaaacacggctcctcaaattggaactgtcaacagccagggggccttacccggtatggtctggcagaaccgggatgtgtacctgcagggtcccatctgggccaagattcctcacacggacggcaacttccacccgtctccgctgatgggcggctttggcctgaaacatcctccgcctcagatcctgatcaagaacacgcctgtacctgcggatcctccgaccaccttcaaccagtcaaagctgaactctttcatcacgcaatacagcaccggacaggtcagcgtggaaattgaatgggagctgcagaaggaaaacagcaagcgctggaaccccgagatccagtacacctccaactactacaaatctacaagtgtggactttgctgttaatacagaaggcgtgtactctgaaccccaccccattggcacccgttacctcacccgtcccctgtaa

SEQ ID NO: 2001 - DNA, 2214 bp, Artificial Sequence
  Description of Artificial Sequence: Synthetic polynucleotide
atggctgccgatggttatcttccagattggctcgaggacaaccttagtgaaggaattcgcgagtggtgggcgctgaaacctggagccccgaagcccaaagccaaccagcaaaagcaggacgacggccggggtctggtgcttcctggctacaagtacctcggacccttcaacggactcgacaagggggagcccgtcaacgcggcggacgcagcggccctcgagcacgacaaggcctacgaccagcagctcaaagcgggtgacaatccgtacctgcggtataaccacgccgacgccgagtttcaggagcgtctgcaagaagatacgtcttttgggggcaacctcgggcgagcagtcttccaggccaagaagcgggttctcgaacctctcggtctggttgaggaaggcgctaagacggctcctggaaagaaacgtccggtagagcagtcgccacaagagccagactcctcctcgggcatcggcaagacaggccagcagcccgctaaaaagagactcaatttcggtcagactggcgacacagagtcagtcccagaccctcaaccaatcggagaacctcccgcagccccctcaggtgtgggatctcttacaatggcttcaggtggtggcgcaccagtggcagacaataacgaaggtgccgatggagtgggtagttcctcgggaaattggcattgcgattcccaatggctgggggacagagtcatcaccaccagcaccagaacctgggccttgcccacctacaataaccacctctacaagcaaatctccaacagcacatctggaggatcttcaaatgacaacgcctacttcggctacagcaccccctgggggtattttgactttaacagattccactgccacttttcaccacgtgactggcagcgactcatcaacaacaactggggattccgacccaagagactcaacttcaagctcttcaacatccaggtcaaggaggtcacgcagaacgaaggcaccaagaccatcgccaataacctcaccagcaccatccaggtgtttacggactcggagtaccagctgccgtacgttctcggctccgcccaccagggctgcctgcctccgttcccggcggacgtgttcatgattccccagtacggctacctaacgctcaacaacggtagtcaggccgtgggacgctcctccttctactgcctggaatactttccttcgcagatgctgagaaccggcaacaacttccagtttacttacaccttcgaggacgtgcctttccacagcagctacgcgcacagccagagcttggaccggctgatgaatcctctgattgaccagtacctgtactacttgtctcggactcaaacaacaggaggcacggcaaatacgcagactctgggcttcagccaaggtgggcctaatacaatggccaatcaggcaaagaactggctgccaggaccctgttaccgccaacaacgcgtctcaacgacaaccgggcaaaacaacaatagcaactttgcctggactgctgggaccaaataccatctgaatggaagaaattcattggctaatcctggcatcgctatggcaacacacaaagacgacaaggagcgtttttttcccagtaacgggatcctgatttttggcaaacaaaatgctgccagagacaatgcggattacagcgatgtcatgctcaccagcgaggaagaaatcaaaaccactaaccctgtggctacagaggaatacggtatcgtggcagataacttgcagcagcaaaacacggctcctcaaattggaactgtcaacagccagggggccttacccggtatggtctggcagaaccgggacgtgtacctgcagggtcccatctgggccaagattcctcacacggacggcaacttccacccgtctccgctgatgggcggctttggcctgaaacatcctccgcctcagatcctgatcaagaacacgcctgtacctgcggatcctccgaccaccttcaaccagtcaaagctgaactctttcatcacgcaatacagcaccggacaggtcagcgtggaaattgaatgggagctgcagaaggaaaacagcaagcgctggaaccccgagatccagtacacctccaactactacaaatctacaagtgtggactttgctgttaatacagaaggcgtgtactctgaaccccaccccattggcactcgttacctcacccgtcccctgtaa

SEQ ID NO: 2002 - DNA, 2211 bp, Artificial Sequence
  Description of Artificial Sequence: Synthetic polynucleotide
atggctgccgatggttatcttccagattggctcgaggacaacctctctgagggcattcgcgagtggtgggcgctgaaacctggagccccgaagcccaaagccaaccagcaaaagcaggacgacggccggggtctggtgcttcctggctacaagtacctcggacccttcaacggactcgacaagggggagcccgtcaacgcggcggatgcagcagccctcgaacacgacaaagcttacgaccagcagctcaaggccggtgacaacccctacctcaagtataaccacgccgacgccgagtttcaggagcgtcttcaaggagatacgtcttttgggggcaacctcggacgagcagtcttccaggccaagaagcgggttctcgaacctcttggtctggttgaggaagcggctaagacggctcctggaaagaagaggcctgtagagcagtctcctcaggaaccggactcctccgcgggtattggcaaatcgggtgcacagcccgctaaaaagagactcaatttcggtcagactggcgacacagagtcagtcccagaccctcaacctctcggagaacctccagcagcgccctctggtgtgggacctaatacaatggctgcaggcggtggcgcaccaatggcagacaataacgaaggtgccgatggagtgggtagttcctcgggaaattggcattgcgattcccaatggctgggggacagagtcatcaccaccagcacccgaacctgggccctgcccacctacaacaaccacctctacaagcaaatctccagtgcttcaacgggggccagcaacgacaaccactacttcggctacagcaccccttgggggtattttgacttcaacagattccactgccacttctcaccacgtgactggcagcgactcatcaacaacaactggggattccggcctaagcgactcaacttcaagctcttcaacattcaggtcaaagaggttacggacaacaatggagtcaagaccatcgccaataaccttaccagcacggtccaggtcttcacggactcggagtaccagttgccgtacgtcctcggctctgcgcaccagggctgcctccctccgttcccggcggacgtgttcatgattccgcagtacggctacctaacgctcaacaatggcagccaggcagtgggacggtcatccttttactgcctggaatatttcccatcgcagatgctgagaacgggcaacaactttaccttcagctacacctttgaggacgttcctttccacagcagctacgctcacagccagagtctggaccgtctcatgaatcctctgattgaccagtacctgtactacttgtctcggactcaaacaacaggaggcacggcaaatacgcagactctgggcttcagccaaggtgggcctaatacaatggccaatcaggcaaagaactggctgccaggaccctgttaccgccaacaacgcgtctcaacgacaaccgggcaaaacaacaatagcaactttgcctggactgctgggaccaaataccatctgaatggaagaaattcattggctaatcctggcatcgctatggcaacacacaaagacgacaaggagcgtttttttcccagtaacgggatcctgatttttgacaaacaaaatgctgccagagacaatgcggattacagcgatgtcatgctcaccagcgaggaagaaatcaaaaccactaaccctgtggctacagaggaatacggtatcgtggcagataacttgcagcagcaaaacacggctcctcaaattggaactgtcaacagccagggggccttacccggtatggtctggcagaaccgggatgtgtacctgcagggtcccatctgggccaagattcctcacacggacggcaacttccacccgtctccgctgatgggcggctttggcctgaaacatcctccgcctcagatcctgatcaagaacacgcctgtacctgcggatcctccgaccaccttcaaccagtcaaagctgaactctttcatcacgcaatacagcaccggacaggtcagcgtggaaattgaatgggagctgcagaaggaaaacagcaagcgctggaaccccgagatccagtacacctccaactactacaaatctacaagtgtggactttgctgttaatacagaaggcgtgtactctgaaccccaccccattggcacccgttacctcacccgtcccctgtaa

SEQ ID NO: 2003 - DNA, 2211 bp, Artificial Sequence
  Description of Artificial Sequence: Synthetic polynucleotide
atggctgccgatggttatcttccagattggctcgaggacactctctctgaaggaataagacagtggtggaagctcaaacctggcccaccaccaccaaagcccgcagagcggcataaggacgacagcaggggtcttgtgcttcctgggtacaagtacctcggacccttcaacggactcgacaagggagagccggtcaacgaggcagacgccgcggccctcgagcacgacaaagcctacgaccggcagctcgacagcggagacaacccgtacctcaagtacaaccacgccgacgcggagtttcaggagcgccttaaagaagatacgtcttttgggggcaacctcggacgagcagtcttccaggcgaaaaagagggttcttgaacctctgggcctggttgaggaacctgttaagacggctccgggaaaaaagaggccggtagagcactctcctgtggagccagactcctcctcgggaaccggaaaggcgggccagcagcctgcaagaaaaagattgaattttggtcagactggcgactcagagtcagtccccgacccacaacctctcggagaacctccagcaacccccgctgctgtgggacctaatacgatggctacaggcagtggcgcaccaatggcagacaataacgagggcgccgacggagtgggtaattcctcgggaaattggcattgcgattccacatggatgggcgacagagtcatcaccaccagcaccagaacctgggccctgcccacttacaacaaccatctctacaagcaaatctccagtgcttcaacgggggccagcaacgacaaccactacttcggctacagcaccccctgggggtattttgacttcaacagattccactgccacttctcaccacgtgactggcagcgactcatcaacaacaactggggattccggcctaagcgactcaacttcaagctcttcaacattcaggtcaaagaggttacggacaacaatggagtcaagaccatcgccaataaccttaccagcaccatccaggtctttacggactcggaataccagctgccgtacgttctcggctctgcccaccagggctgcctgcctccgttcccggcggacgtgttcatgattccccagtacggctacctaacactcaacaacggtagtcaggccgtgggacgctcctccttctactgcctggaatatttcccatcgcagatgctgagaacgggcaacaactttaccttcagctacacctttgaggacgttcctttccacagcagctacgctcacagccagagtctggaccgtctcatgaatcctctgattgaccagtacctgtactacttgtctcggactcaaacaacaggaggcaaggcaaatacgcagactctgggcttcagccaaggtgggcctaatacaatggccaatcaggcaaagaactggctgccaggaccctgttaccgccaacaacgcgtctcaacgacaaccgggcaaaacaacaatagcaactttgcctggactgctgggaccaaataccatctgaatggaagaaattcattggctaatcctggcatcgctatggcaacacacaaagacgacaaggagcgtttttttcccagtaacgggatcctgatttttggcaaacaaaatgctgccagagacaatgcggattacagcgatgtcatgctcaccagcgaggaagaaatcaaaaccactaaccctgtggctacagaggaatacggtatcgtggcagataacttgcagcagcaaaacacggctcctcaaattggaactgtcaacagccagggggccttacccggtatggtctggcagaaccgggacgtgtacctgcagggtcccatctgggccaagattcctcacacggacggcaacttccacccgtctccgctgatgggcggctttggcctgaaacatcctccgcctcagatcctgatcaagaacacgcctgtacctgcggatcctccgaccaccttcaaccagtcaaagctgaactctttcatcacgcaatacagcaccggacaggtcagcgtggaaattgaatgggagctgcagaaggaaaacagcaagcgctggaaccccgagatccagtacacctccaactactacaaatctacaagtgtggactttgctgttaatacagaaggcgtgtactctgaaccccaccccattggcacccgttacctcacccgtcccctgtaa

SEQ ID NO: 2004 - DNA, 2211 bp, Artificial Sequence
  Description of Artificial Sequence: Synthetic polynucleotide
atggctgccgatggttatcttccagattggctcgaggacaacctctctgagggcattcgcgagtggtgggcgctgaaacctggagccccgaagcccaaagccaaccagcaaaagcaggacgacggccggggtctggtgcttcctggctacaagtacctcggacccttcaacggactcgacaagggggagcccgtcaacgcggcggacgcagcggccctcgagcacgacaaggcctacgaccagcagctcaaagcgggtgacaatccgtacctgcggtataaccacgccgacgccgagtttcaggagcgtctgcaagaagatacgtcttttgggggcaacctcgggcgagcagtcttccaggccaagaagcgggttctcgaaccttttggtctggttgaggaaggtgctaagacggctcctggaaagaaacgtccggtagagcagtcgccacaagagccagactcctcctcgggcatcggcaagacaggccagcagcccgctaaaaagagactcaattttggtcagactggcgactcagagtcagtccccgacccacaacctctcggagaacctccagcaacccccgctgctgtgggacctactacaatggcttcaggcggtggcgcaccaatggcggacaataacgaaggcgccgacggagtgggtaatgcctcaggaaattggcattgcgattccacatggctgggcgacagagtcatcaccaccagcacccgcacctgggccttgcccacctacaataaccacctctacaagcaaatctccagtgcttcaacgggggccagcaacgacaaccactacttcggctacagcaccccctgggggtattttgacttcaacagattccactgccacttttcaccacgtgactggcaaagactcatcaacaacaactggggattccggcctaagcgactcaacttcaagctcttcaacattcaggtcaaagaggttacggacaacaatggagtcaagaccatcgccaataaccttaccagcacggtccaggtcttcacggactcggagtaccagttgccgtacgtcctcggctctgcgcaccagggctgcctccctccgttcccggcggacgtgttcatgattccgcagtacggctacctaacgctcaacaatggcagccaggcagtgggacggtcatccttttactgcctggaatatttcccatcgcagatgctgagaacgggcaacaactttaccttcagctacacctttgaggacgttcctttccacagcagctacgctcacagccagagtctggaccgtctcatgaatcctctgattgaccagtacctgtactacttgtctcggactcaaacaacaggaggcacgggaaatacgcagactctgggcttcagccaaggtgggcctaatacaatggccaatcaggcaaagaactggctgccaggaccctgttaccgccaacaacgcgtctcaacgacaaccgggcaaaacaacaatagcaactttgcctggactgctgggaccaaataccatctgaatggaagaaattcattggctaatcctggcatcgctatggcaacacacaaagacgacaaggagcgtttttttcccagtaacgggatcctgatttttggcaaacaaaatgctgccagagacaatgcggattacagcgatgtcatgctcaccagcgaggaagaaatcaaaaccactaaccctgtggctacagaggaatacggtatcgtggcagataacttgcagcagcaaaacacggctcctcaaattggaactgtcaacagccagggggccttacccggtatggtctggcagaaccgggacgtgtacctgcagggtcccatctgggccaagattcctcacacggacggcaacttccacccgtctccgctgatgggcggctttggcctgaaacatcctccgcctcagatcctgatcaagaacacgcctgtacctgcggatcctccgaccaccttcaaccagtcaaagctgaactctttcatcacgcaatacagcaccggacaggtcagcgtggaaattgaatgggagctgcagaaggaaaacagcaagcgctggaaccccgagatccagtacacctccaactactacaaatctacaagtgtggactttgctgttaatacagaaggcgtgtactctgaaccccaccccattggcacccgttacctcacccgtcccctgtaa

SEQ ID NO: 2005 - DNA, 2211 bp, Artificial Sequence
  Description of Artificial Sequence: Synthetic polynucleotide
atggctgccgatggttatcttccagattggctcgaggacaacctctctgagggcattcgcgagtggtgggacttgaaacctggagccccgaaacccaaagccaaccagcaaaagcaggacgacggccggggtctggtgcttcctggctacaagtacctcggacccttcaacggactcgacaagggggagcccgtcaacgcggcggacgcagcggccctcgagcacgacaaggcctacgaccagcagctcaaagcgggtgacaatccgtacctgcggtataaccacgccgacgccgagtttcaggagcgtctgcaagaagatacgtcttttgggggcaacctcgggcgagcagtcttccaggccaagaagcgggttctcgaacctctcggtctggttgaggaaggcgctaagacggctcctggaaagaagaggcctgtagagcagtcgccacaagagccagactcctcctcgggcatcggcaagacaggccagcagcccgctaaaaagagactcaattttggtcagactggcgactcagagtcagtccccgatccacaacctctcggagaacctccagcaacccccgctgctgtgggacctactacaatggcttcaggcggtggcgcaccaatggcagacaataacgaaggcgccgacggagtgggtagttcctcgggaaattggcattgcgattccacatggctgggcgacagagtcatcaccaccagcacccgaacatgggccttgcccacctataacaaccacctctacaagcaaatctccagtgcttcaacgggggccagcaacgacaaccactacttcggctacagcaccccctgggggtattttgacttcaacagattccactgccacttctcaccacgtgactggcagcgactcatcaacaacaactggggattccggcctaagcgactcaacttcaagctcttcaacatccaggtcaaggaggtcacgcagaatgaaggcaccaagaccatcgccaataacctcaccagcaccatccaggtgtttacggactcggagtaccagcttccgtacgtcctcggctctgcgcaccagggctgcctccctccgttcccggcggacgtgttcatgattccgcagtacggctacctaacgctcaacaatggcagccaggcagtgggacggtcatccttttactgcctggaatatttcccatcgcagatgctgagaacgggcaacaactttaccttcagctacacctttgaggacgttcctttccacagcagctacgcgcacagccagagcttggaccggctgatgaatcctctgattgaccagtacctgtactacttgtctcggactcaaacaacaggaggcacggcaaatacgcagactctgggcttcagccaaggtgggcctaatacaatggccaatcaggcaaagaactggctgccaggaccctgttaccgccaacaacgcgtctcaacgacaaccgggcaaaacaacaatagcaactttgcctggactgctgggaccaaataccatctgaatggaagaaattcattggctaatcctggcatcgctatggcaacacacaaagacgacaaggagcgtttttttcccagtaacgggatcctgatttttggcaaacaaaatgctgccagagacaatgcggattacagcgatgtcatgctcaccagcgaggaagaaatcaaaaccactaaccctgtggctacagaggaatacggtatcgtggcagataacttgcagcagcaaaacacggctcctcaaattggaactgtcaacagccagggggccttacccggtatggtctggcagaaccgggacgtgtacctgcagggtcccatctgggccaagattcctcacacggacggcaacttccacccgtctccgctgatgggcggctttggcctgaaacatcctccgcctcagatcctgatcaagaacacgcctgtacctgcggatcctccgaccaccttcaaccagtcaaagctgaactctttcatcacgcaatacagcaccggacaggtcagcgtggaaattgaatgggagctgcagaaggaaaacagcaagcgctggaaccccgagatccagtacacctccaactactacaaatctacaagtgtggactttgctgttaatacagaaggcgtgtactctgaaccccaccccattggcacccgttacctcacccgtcccctgtaa

SEQ ID NO: 2006 - DNA, 2211 bp, Artificial Sequence
  Description of Artificial Sequence: Synthetic polynucleotide
atggctgccgatggttatcttccagattggctcgaggacaacctctctgagggcattcgcgagtggtgggcgctgaaacctggagccccgaagcccaaagccaaccagcaaaagcaggacgacggccggggtctggtgcttcctggctacaagtacctcggacccttcaacggactcgacaagggggagcccgtcaacgcggcggatgcagcggccctcgagcacgacaaggcctacgaccagcagctcaaagcgggtgacaatccgtacctgcggtataaccacgccgacgccgagtttcaggagcgtctgcaagaagatacgtcttttgggggcaacctcgggcgagcagtcttccaggccaagaagcgggttctcgaacctctcggtctggttgaggaaggcgctaagacggctcctggaaagaaacgtccggtagagcagtcgccacaagagccagactcctcctcgggcatcggcaagacaggccagcagcccgctaaaaagagactcaattttggtcagactggcgactcagagtcagtccccgacccacaacctctcggagaacctccagcaacccccgctgctgtgggacctactacaatggctgcaggcggtggcgcaccaatggcagacaataacgaaggcgccgacggagtgggtagttcctcgggaaattggcattgcgattccacatggatgggcgacagagtcatcaccaccagcacccgaacctgggccttgcccacctataacaaccatctctacaagcaaatctccagtgcttcaacgggggccagcaacgacaaccactacttcggctacagcaccccctgggggtattttgacttcaacagattccactgccacttctcaccacgtgactggcagcgactcatcaacaacaactggggattccggcccaagagactcagcttcaagctcttcaacatccaggtcaaggaggtcacgcagaatgaaggcaccaagaccatcgccaataacctcaccagcaccatccaggtgtttacggactcggagtaccagctgccgtacgtcctcggctctgcgcaccagggctgcctccctccgttcccggcggacgtgttcatgattccgcagtacggctacctaacgctcaacaatggcagccaggcagtgggacggtcatccttttactgcctggaatatttcccatcgcagatgctgagaacgggcaacaactttaccttcagctacacctttgaggacgttcctttccacagcagctacgctcacagccagagcttggaccggctgatgaatcctctgattgaccagtacctgtactacttgtctcggactcaaacaacaggaggcacggcaaatacgcagactctgggtttcagccaaggtgggcctaatacaatggccaatcaggcaaagaactggctgcaaggaccctgttaccgccaacaacgcgtctcaacgacaaccgggcaaaacaacaatagcaactttgcctggactgctgggaccaaataccatctgaatggaagaaattcattggctaatcctggcatcgctatggcaacacacaaagacgacaaggagcgtttttttcccagtaacgggatcctgatttttggcaaacaaaatgctgccagagacaatgcggattacagcgatgtcatgctcaccagcgaggaagaaatcaaaaccactaaccctgtggctacagaggaatacggtatcgtggcagataacttgcagcagcaaaacacggctcctcaaattggaactgtcaacagccagggggccttacccggtatggtctggcagaacctggacgtgtacctgcagggtcccatctgggccaagattcctcacacggacggcaacttccacccgtctccgctgatgggcggctttggcctgaaacatcctccgcctcagatcctgatcaagaacacgcctgtacctgcggatcctccgaccaccttcaaccagtcaaagctgaactctttcatcacgcaatacagcaccggacaggtcagcgtggaaattgaatgggagctgcagaaggaaaacagcaagcgctggaaccccgagatccagtacacctccaactactacaaatctacaagtgtggactttgctgttaatacagaaggcgtgtactctgaaccccaccccattggcacccgttacctcacccgtcccctgtaa

SEQ ID NO: 2007 - DNA, 2214 bp, Artificial Sequence
  Description of Artificial Sequence: Synthetic polynucleotide
atggctgccgatggttatcttccagattggctcgaggacaacctctctgagggcattcgcgagtggtgggcgctgaaacctggagccccgaagcccaaagccaaccagcaaaagcaggacgacggccggggtctggtgcttcctggctacaagtacctcggacccttcaacggactcgacaagggagagcccgtcaacgcggcggacgcagcggccctcgagcacgacaaggcctacgaccagcagctcaaagcgggtgacaatccgtacctgcggtataaccacgccgacgccgagtttcaggagcgtctgcaagaagatacgtcttttgggggcaacctcgggcgagcagtcttccaggccaagaagcgggttctcgaacctctcggtctggttgaggaaggcgctaagacggctcctggaaagaagagaccggtagagccatcaccccagcgttctccagactcctcctcgggcatcggcaagacaggccagcagcccgctaaaaagagactcaattttggtcagactggcgactcagagtcagtccccgacccacaacctctcggagaacctccagcaacccccgctgctgtgggacctactacaatggcttcaggtggtggcgcaccaatggcagacaataacgaaggcgccgacggagtgggtaatgcctcaggaaattggcattgcgattcccaatggctgggcgacagagtcatcaccaccagcacccgaacatgggccttgcccacctataacaaccacctctacaagcaaatctccagtgcttcaacgggggccagcaacgacaaccactacttcggctacagcaccccctgggggtattttgacttcaacagattccactgccacttttcaccacgtgactggcagcgactcatcaacaacaactggggattccggcctaagcgactcaacttcaagctcttcaacattcaggtcaaagaggttacggacaacaatggagtcaagaccatcgccaataaccttaccagcacggtccaggtcttcacggactcagactatcagctcccgtacgtgctcgggtcggctcacgagggctgcctcccgccgttcccagcggacgttttcatgattccccagtacggctacctaacactcaacaacggtagtcaggccgtgggacgctcctccttctactgcctggaatactttccttcgcagatgctgagaaccggcaacaacttccagtttacttacaccttcgaggacgtgcctttccacagcagctacgctcacagccagagcttggaccggctgatgaatcctctgattgaccagtacctgtactacttgtctcggactcaaacaacaggaggcacggcaaatacgcagactttgggcttcagccaaggtgggcctaatacaatggccaatcaggcaaagaactgggtgccaggaccctgttaccgccaacaacgggtttcaacggcaaccgggcaaaacaacaatagcaactttgcctggactgctgggaccaaataccatctgaaaggaagaaattcattggctaatcctggcatcgctatggcaacacacaaagacgacaaggagcgtttttttcccagtaacgggatcctgatttttggcaaacaaaatgctgccagagacaatgcggattacagcgatgtcatgctcaccagcgaggaagaaatcaaaaccactaaccctgtggctacagaggaatacggtatcgtggcagataacttgcagcagcaaaacacggctcctcaaattggaactgtcaacagccagggggccttacccggtatggtctggcagaaccgggacgtgtacctgcagggtcccatctgggccaagattcctcacacggacggcaacttccacccgtctccgctgatgggcggctttggcctgaaacatcctccgcctcagatcctgatcaagaacacgcctgtacctgcggatcctccgaccaccttcaaccagtcaaagctgaactctttcatcacgcaatacagcaccggacaggtcagcgtggaaattgaatgggagctgcagaaggaaaacagcaaacgctggaacccagagattcaatacacttccaactactacaaatctacaagtgtggactttgctgttaatacagaaggcgtgtactctgaaccccaccccattggcacccgttacctcacccgtcccctgtaa

SEQ ID NO: 2008 - DNA, 2214 bp, Artificial Sequence
  Description of Artificial Sequence: Synthetic polynucleotide
  misc_feature (676)..(676): n is a, c, g, or t
  misc_feature (697)..(697): n is a, c, g, or t
  misc_feature (715)..(715): n is a, c, g, or t
  misc_feature (748)..(748): n is a, c, g, or t
  misc_feature (750)..(750): n is a, c, g, or t
  misc_feature (757)..(757): n is a, c, g, or t
  misc_feature (763)..(763): n is a, c, g, or t
atggctgccgatggttatcttccagattggctcgaggacactctctctgaaggaataagacagtggtggaagctcaaacctggcccaccaccaccaaagcccgcagagcggcataaggacgacagcaggggtcttgtgcttcctgggtacaagtacctcggacccttcaacggactcgacaagggagagccggtcaacgaggcagacgccgcggccctcgagcacgacaaagcctacgaccggcagctcgacagcggagacaacccgtacctcaagtacaaccacgccgacgcggagtttcaggagcgccttaaagaagatacgtcttttgggggcaacctcggacgagcagtcttccaggcgaaaaagagggttcttgaacctctcggtctggttgaggaaggcgctaagacggctcctggaaagaaacgtccggtagagcagtcgccacaagagccagactcctcctcgggcatcggcaagacaggccagcagcccgctaaaaagagactcaattttggtcagactggcgactcagagtcagtccccgacccacaacctctcggagaacctccagcaacgccctctggtgtgggacctaatacaatggctgcaggcggtggcgctccaatggcagacaataacgaaggcgccgacggagtgggtagttcctcangaaattggcattgcgattccncatggctgggcgacagantcatcaccaccagcacccgaacctgggccctgncnacctacnacaacnacctctacaagcaaatctccaacagcacatctggaggagccaccaacgacaacacctacttcggctacagcaccccctgggggtattttgactttaacagattccactgccacttttcaccacgtgactggcagcgactcatcaacaacaactggggattccggcctaagcgactcaacttcaagctcttcaacatccaggtcaaggaggtcacgcagaatgaaggcaccaagaccatcgccaataacctcaccagcaccatccaggtgtttacggactcggagtaccagctgccgtacgttctcggctctgcccaccagggctgcctgcctccgttcccggcggacgtgttcatgattccccagtacggctacctaacactcaacaacggtagtcaggccgtgggacgctcctccttctactgcctggaatactttccttcgcagatgctgagaaccggcaacaacttccagtttacttacaccttcgaggacgtgcctttccacagcagctacgcccacagccagagcttggaccggctgatgaatcctctgattgaccagtacctgtactacttgtctcggactcaaacaacaggaggcacggcaaatacgcagactctgggcttcagccaaggtgggcctaatacaatggccaatcaggcaaagaactggctgccaggaccctgttaccgccaacaacgcgtctcaacgacaaccgggcaaaacaacaatagcaactttgcctggactgctgggaccaaataccatctgaatggaagaaattcattggctaatcctggcatcgctatggcaacacacaaagacgacaaggagcgtttttttcccagtaacgggatcctgatttttggcaaacaaaatgctgccagagacaatgcggattacagcgatgtcatgctcaccagcgaggaagaaatcaaaaccactaaccctgtggctacagaggaatacggtatcgtggcagataacttgcagcagcaaaacacggctcctcaaattggaactgtcaacagccagggggccttacccggtatggtttggcagaaccgggacgtgtacctgcagggtcctatctgggccaagattcctcacacggacggaaactttcatccctcgccgctgatgggaggctttggactgaaacacccgcctcctcagatcctgattaagaatacacctgttcccgcggatcctccaactaccttcagtcaagctaagctggcgtcgttcatcacgcaatacagcacaggacaagtgagtgtggaaattgaatgggagctgcagaaagaaaacagcaagcgctggaatcccgaagtgcagtacacatccaattatgcaaaatctgccaacgttgattttactgtggacaacaatggactttatactgagcctcgccccattggcacccgttaccttacccgtcccctgtaa

SEQ ID NO: 2009 - DNA, 2214 bp, Artificial Sequence
  Description of Artificial Sequence: Synthetic polynucleotide
atggctgccgatggttatcttccagattggctcgaggacaacctctctgagggcattcgcgagtggtgggacttgaaacctggagccccgaagcccaaagccaaccagcaaaagcaggacgacggccggggtctggtgcttcctggctacaagtacctcggacccttcaacggactcgacaagggggagcccgtcaacgcggcggacgcagcggccctcgagcacgacaaggcctacgaccagcagctcaaagcgggtgacaatccgtacctgcggtataaccacgccgacgccgagtttcaggagcgtctgcaagaagatacgtcttttgggggcaacctcgggcgagcagtcttccaggccaagaagcgggttctcgaacctctcggtctggttgaggaaggcgctaagacggctcctggaaagaagagaccggtagagccatcaccccagcgttctccagactcctctacgggcatcggcaagaaaggccagcagcccgcgaaaaagagactcaactttgggcagactggcgactcagagtcagtgcccgaccctcaaccaatcggagaaccccccgcaggcccctctggtgtgggatctcttacaatggcttcaggtggtggcgcaccagtggcagacaataacgaaggtgccgatggagtgggtagttcctcgggaaattggcattgcgattcccaatggctgggggacagagtcatcaccaccagcacccgaacatgggccttgcccacctataacaaccacctctacaagcaaatctccagtgcttcaacgggggccagcaacgacaaccactacttcggctacagcaccccctgggggtattttgactttaacagattccactgccacttctcaccacgtgactggcagcgactcatcaacaacaactggggattccggcccaagagactcaacttcaagctcttcaacatccaggtcaaggaggtcacggacaatgatggagtcaagaccatcgccaataaccttaccagcacgattcaggtctttacggactcggaataccagttgccgtacgtcctcggctctgcgcaccagggctgcctgcctccgttcccggcggacgtgttcatgattccgcagtacggctacctaacgctcaacaatggcagccaggcagtgggacggtcatccttttactgcctggaatatttcccatcgcagatgctgagaacgggcaacaactttaccttcagctacacttttgaggacgttcctttccacagcagctacgctcacagccagagtctggaccgtctcatgaatcctctgattgaccagtacctgtactacttgtctcggactcaaacaacaggaggcacggcaaatacgcagactctgggcttcagccaaggtgggcctaatacaatggccaatcacgcaaagaactggctgccaggaccctgttaccgccaacaacgcgtctcaacgacaaccggacaaaacaacaatagcaactttgcctggactgctgggaccaaataccatctgaatggaagaaattcattggctaatcctggcatcgctatggcaacacacaaagacgacaaggagcgtttttttcccagtaacgggatcctgatttttggcaaacaaaatgctgccagagacaatgcggattacagcgatgtcatgctcaccagcgaggaagaaatcaaaaccactaaccctgtggctacagaggaatacggtatcgtggcagataacttgcagcagcaaaacacggctcctcaaattggaactgtcaacagccagggggccttacccggtatggtctggcagaaccgggacgtgtacctgcagggtcccatctgggccaagattcctcacacggacggcaacttccacccgtctccgctgatgggcggctttggcctgaaacatcctccgcctcagatcctgatcaagaacacgcctgtacctgcggatcctccgaccaccttcaaccagtcaaagctgaactctttcatcacgcaatacagcaccggacaggtcagcgtggaaattgaatgggagctgcagaaggaaaacagcaagcgctggaaccccgagatccagtacacctccaactactacaaatctacaagtgtggactttgctgttaatacagaaggcgtgtactctgaaccccaccccattggcacccgttacctcacccgtcccctgtaa

SEQ ID NO: 2010 - DNA, 2211 bp, Artificial Sequence
  Description of Artificial Sequence: Synthetic polynucleotide
atggctgccgatggttatcttccagattggctcgaggacactctctctgaaggaataagacagtggtggaagctcaaacctggcccaccaccaccaaagcccgcagagcggcacaaggacgacagcaggggtcttgtgcttcctgggtacaagtacctcggacccttcaacggactcgacaagggagagccggtcaacgaggcagacgccgcggccctcgagcacgacaaagcctacgaccggcagctcgacagcggagacaacccgtacctcaagtacaaccacgccgacgcggagtttcaggagcgccttaaagaagatacgtcttttgggggcaacctcggacgagcagtcttccaggcgaaaaagagggttcttgaacctctgggcctggttgaggaacctgttaagacggctccgggaaaaaagaggccggtagagcactctcctgtggagccagactcctcctcgggaaccggaaaggcgggccagcagcctgctaaaaagagactcaattttggtcagactggcgactcagagtcagtccccgacccacaacctctcggagaacctccagcaacccccgctgctgtgggacctactacaatggcttcaggtggtggcgcaccaatggcagacaataacgaaggcgccgacggagtgggtaatgcctcaggaaattggcattgcgattccacatggctgggcgacagagtcatcaccaccagcacccgcacctgggccttgcccacctacaataaccacctctacaagcaaatctccagtgcttcaacgggggccagcaacgacaaccactacttcggctacagcaccccctgggggtattttgacttcaacagattccactgccacttctcaccacgtgactggcagcgactcatcaacaacaactggggattccggcccaagagactcaacttcaaactcttcaacatccaagtcaaggaggtcacgcagaatgaaggcaccaagaccatcgccaataacctcaccagcaccatccaggtgtttacggactcggagtaccagctgccgtacgttctcggctctgcccaccagggctgcctgcctccgttcccggcggacgtgttcatgattccccagtacggctacctaacactcaacaacggtagtcaggccgtgggacgctcctccttctactgcctggaatactttccttcgcagatgctgagaaccggcaacaacttccagtttacttacaccttcgaggacgtgcctttccacagcagctacgcgcacagccagagcttggaccggctgatgaatcctctgattgaccagtacctgtactacttgtctcggactcaaacaacaggaggcacggcaaatacgcagactctgggcttcagccaaggtgggcctaatacaatggccaatcaggcaaagaactggctgccaggaccctgttaccgccaacaacgcgtctcaacgacaaccgggcaaaacaacaatagcaactttgcctggactgctgggaccaaataccatctgaatggaagaaattcattggctaatcctggcatcgctatggcaacacacaaagacgacaaggagcgtttttttcccagtaacgggatcctgatttttggcaaacaaaatgctgccagagacaatgcggattacagcgatgtcatgctcaccagcgaggaagaaatcaaaaccactaaccctgtggctacagaggaatacggtatcgtggcagataacttgcagcagcaaaacacggctcctcaaattggaactgtcaacagccagggggccttacccggtatggtctggcagaaccgggacgtgtacctgcagggtcccatctgggccaagattcctcacacggacggcaacttccacccgtctccgctgatgggcggctttggcctgaaacatcctccgcctcagatcctgatcaagaacacgcctgtacctgcggatcctccgaccaccttcaaccagtcaaagctgaactctttcatcacgcaatacagcaccggacaggtcagcgtggaaattgaatgggagctgcagaaggaaaacagcaagcgctggaaccccgagatccagtacacctccaactactacaaatctacaagtgtggactttgctgttaatacagaaggcgtgtactctgaaccccaccccattggcacccgttacctcacccgtcccctgtaa

SEQ ID NO: 2011 - DNA, 2211 bp, Artificial Sequence
  Description of Artificial Sequence: Synthetic polynucleotide
atggctgccgatggttatcttccagattggctcgaggacaacctctctgagggcattcgcgagtggtgggcgctgaaacctggagccccgaagcccaaagccaaccagcaaaagcaggacgacggccggggtctggtgcttcctggctacaagtacctcggacccttcaacggactcgacaagggggagcccgtcaacgcggcggatgcagcggccctcgagcacgacaaggcctacgaccagcagctccaagcgggtgacaatccgtacctgcggtataaccacgccgacgccgagtttcaggagcgtcttcaaggagatacgtcttttgggggcaacctcggacgagcagtcttccaggccaagaagcgggttctcgaacctctcggtctggttgaggaaggcgctaagacggctcctggaaagaaacgtccggtagagcagtcgccacaagagccagactcctcctcgggcatcggcaagacaggccagcagcccgctaaaaagagactcaattttggtcagactggcgactcagagtcagtccccgacccacaacctctcggagaacctccagcaacccccgctgctgtgggacctactacaatggcttcaggcggtggcgcaccaatggcggacaataacgaaggcgccgatggagtgggtaatgcctcaggaaattggcattgcgattccacatggctgggcgacagagtcatcaccaccagcacccgcacctgggccttgcccacctacaataaccacctctacaagcaaatctccagtgcttcaacgggggccagcaacgacaaccactacttcggctacagcaccccctgggggtattttgacttcaacagattccactgccacttctcaccacgtgactggcagcgactcatcaacaacaactggggattccggcctaagcgactcaacttcaagctcttcaacattcaggtcaaagaggttacggacaacaatggagtcaagaccatcgccaataacctcaccagcaccatccaggtgtttacggactcggagtaccagctgccgtacgttctcggctctgcccaccagggctgcctgcctccgttcccggcggacgtgttcatgattccccagtacggctacctaacactcaacaacggtagtcaggccgtgggacgctcctccttctactgcctggaatactttccttcgcagatgctgagaaccggcaacaacttccagtttacttacaccttcgaggacgtgcctttccacagcagctacgcccacagccagagcttggaccggctgatgaatcctctgattgaccagtacctgtactacttgtctcggactcaaacaacaggaggcacggcaaatacgcagactctgggcttcagccaaggtgggcctaatacaatggccaatcaggcaaagaactggctgccaggaccctgttaccgccaacaacgcgtctcaacgacaaccgggcaaaacaacaatagcaactttgcctggactgctgggaccaaataccatctgaatggaagaaattcattggctaatcctggcatcgctatggcaacacacaaagacgacaaggagcgtttttttcccagtaacgggatcctgatttttggcaaacaaaatgctgccagagacaatgcggattacagcgatgtcatgctcaccagcgaggaagaaatcaaaaccactaaccctgtggctacagaggaatacggtatcgtggcagataacttgcagcagcaaaacacggctcctcaaattggaactgtcaacagccagggggccttacccggtatggtctggcagaaccgggacgtgtacctgcagggtcccatctgggccaagattcctcacacggacggcaacttccacccgtctccgctgatgggcggctttggcctgaaacatcctccgcctcagatcctgatcaagaacacgcctgtacctgcggatcctccgaccaccttcaaccagtcaaagctgaactctttcatcacgcaatacagcaccggacaggtcagcgtggaaattgaatgggagctgcagaaggaaaacagcaagcgctggaaccccgagatccagtacacctccaactactacaaatctacaagtgtggactttgctgttaatacagaaggcgtgtactctgaaccccaccccattggcacccgttacctcacccgtcccctgtaa

SEQ ID NO: 2012 - DNA, 2217 bp, Artificial Sequence
  Description of Artificial Sequence: Synthetic polynucleotide
atggctgccgatggttatcttccagattggctcgaggacactctctctgaaggaataagacagtggtggaagctcaaacctggcccaccaccaccaaagcccgcagagcggcataaggacgacagcaggggtcttgtgcttcctgggtacaagtacctcggacccttcaacggactcgacaagggggagcccgtcaacgcggcggatgcagcggccctcgagcacgacaaggcctacgaccagcagctcaaagcgggtgacaatccgtacctgcggtataaccacgccgacgcggagtttcaggagcgccttaaagaagatacgtcttttgggggcaacctcggacgagcagtcttccaggcgaaaaagagggttcttgaacctctcggtctggttgaggaaggcgctaagacggctcctggaaagaagagaccggtagagccatcaccccagcgttctccagactcctctacgggcatcggcaagaaaggccaacagcccgccagaaaaagactcaattttggtcagactggcgactcagagtcagttccagaccctcaacctctcggagaacctccagcagcgccctctggtgtgggacctaatacaatggctgcaggcggtggcgcaccaatggcagacaataacgaaggcgccgacggagtgggtagttcctcgggaaattggcattgcgattcccaatggctgggggacagagtcatcaccaccagcaccagaacctgggccctgcccacctacaacaatcacctctacaagcaaatctccaacagcacatctggaggatcttcaaatgacaacgcctacttcggctacagcaccccctgggggtattttgacttcaaccgcttccactgccacttctcaccacgtgactggcagcgactcatcaacaacaactggggattccggcccaagagactcaacttcaagctcttcaacattcaggtcaaagaggttacggacaacaatggagtcaagaccatcgccaataaccttaccagcacggtccaggtctttacggactcggagtaccagttgccgtacgtcctcggctctgcgcaccagggctgcctccctccgttcccggcggacgtgttcatgattccccagtacggctacctaacactcaacaacggtagtcaggccgtgggacgctcctccttctactgcctggaatatttcccttctcagatgctgagaacgggcaacaactttaccttcagctacacctttgaggacgttcctttccacagcagctacgctcacagccagagtctggaccgtctcatgaatcctctgattgaccagtacctgtactacttgtctcggactcaaacaacaggaggcacggcaaatacgcagactctgggcttcagccaaggtgggcctaatacaatggccaatcaggcaaagaactggctgccaggaccctgttaccgccaacaacgcgtctcaacgacaaccgggcaaaacaacaatagcaactttgcctggactgctgggaccaaataccatctgaatggaagaaattcattggctaatcctggcatcgctatggcaacacacaaagacgacaaggagcgtttttttcccagtaacgggatcctgatttttggcaaacaaaatgctgccagagacaatgcggattacagcgatgtcatgctcaccagcgaggaagaaatcaaaaccactaaccctgtggctacagaggaatacggtatcgtggcagataacttgcagcagcaaaacacggctcctcaaattggaactgtcaacagccagggggccttacccggtatggtctggcagaaccgggacgtgtacctgcagggtcccatctgggcaaagattccacacacggacggacattttcacccctctcccctcatgggtggattcggacttaaacaccctcctccacagattctcatcaagaacaccccggtacctgcgaatcctccgaccaccttcaaccagtcaaagctgaactctttcatcacgcaatacagcacaggacaagtgagtgtggaaattgaatgggagctgcagaaagaaaacagcaagcgctggaatcccgaagtgcagtacacatccaattatgcaaaatctgccaacgttgattttactgtggacaacaatggactttatactgagcctcgccccattggcacccgttaccttacccgtcccctgtaa

SEQ ID NO: 2013 - DNA, 2211 bp, Artificial Sequence
  Description of Artificial Sequence: Synthetic polynucleotide
atggctgccgatggttatcttccagattggctcgaggacaacctctctgagggcattcgcgagtggtgggcgctgaaacctggagccccgaaacccaaagccaaccagcaaaagcaggacgacggccggggtctggtgcttcctggctacaagtacctcggacccttcaacggactcgacaagggggagcccgtcaacgcggcggacgcagcggccctcgagcacgacaaggcctacgaccagcagctcaaggcgggtgacaatccgtacctgcggtataaccacgccgacgccgagtttcaggagcgtctgcaagaagatacgtcttttgggggcaacctcgggcgagcagtcttccaggccaaaaagaggcttcttgaacctcttggtctggttgaggaaggggctaagacggctcctggaaagaaacgtccggtagagcagtcgccacaagagccagactcctcctcgggcattggcaagacaggccagcagcccgctaaaaagagactcaactttgggcagactggcgactcagagtcagtgcccgatcctcaacctctcggagaacctccagcaacccccgctgctgtgggacctactacaatggcttcaggcggtggcgcaccaatggcggacaataacgaaggcgccgatggagtgggtaattcctcgggaaattggcattgcgattccacatggatgggcgacagagtcatcaccaccagcacccgaacctgggccctgcccacctacaacaatcacctctacaagcaaatctccagtgcttcaacgggggccagcaacgacaaccactacttcggctacagcaccccctgggggtattttgatttcaacagattccactgccatttttcaccacgtgactggcagcgactcatcaacaacaactggggattccggcccaagagactcaacttcaagctcttcaacatccaggtcaaggaggtcacgcagaatgaaggcaccaagaccatcgccaataaccttaccagcacgattcaggtctttacggattcggaataccagctcccgtacgtcctcggctctgcgcaccagggctgcctccctccgttcccggcggacgtgttcattattccgcagtacggctacctaacgctcaacaatggtagccaggcagtgggacggtcatccttttactgcctggaatatttcccatcgcagatgctgagaacgggcaacaactttaccttcagctacacctttgaggacgttcctttccacagcagctacgctcacagccagagtctggaccgtctcatgaatcctctgattgaccagtacctgtactacttgtctcggactcaaacaacaggaggcacggcaaatacgcagactctgggcttcagccaaggtgggcctaatacaatggccaatcaggcaaagaactggctgccaggaccctgttaccgccaacaacgcgtctcaacgacaaccgggcaaaacaacaatagcaactttgcctggactgctgggaccaaataccatctgaatggaagaaattcattggctaatcctggcatcgctatggcaacacacaaagacgacaaggagcgtttttttcccagtaacgggatcctgatttttggcaaacaaaatgctgccagagacaatgcggattacagcgatgtcatgctcaccagcgaggaagaaatcaaaaccactaaccctgtggctacagaggaatacggtatcgtggcagataacttgcagcagcaaaacacggctcctcaaattggaactgtcaacagccagggggccttacccggtatggtctggcagaaccgggacgtgtacctgcagggtcccatctgggccaagattcctcacacggacggcaacttccacccgtctccgctgatgggcggctttggcctgaaacatcctccgcctcagatcctgatcaagaacacgccagtacctgcggatcctccgaccaccttcaaccagtcaaagctgaactctttcatcacgcaatacagcaccggacaggtcagcgtggaaattgaatgggagctgcagaaggaaaacagcaagcgctggaaccccgagatccagtacacctccaactactacaaatctacaagtgtggactttgctgttaatacagaaggcgtgtactctgaaccccaccccattggcacccgttacctcacccgtcccctgtaa

SEQ ID NO: 2014 - DNA, 2211 bp, Artificial Sequence
  Description of Artificial Sequence: Synthetic polynucleotide
atggctgccgatggttatcttccagattggctcgaggacaacctctctgagggcattcgcgagtggtgggcgctgaaacctggagccccgaaacccaaagccaaccagcaaaagcaggacgacggccggggtctggtgcttcctggctacaagtacctcggacccttcaacggactcgacaagggggagcccgtcaacgcggcggatgcagcggccctcgagcacgacaaggcctacgaccagcagctcaaggcgggtgacaatccgtacctgcggtataaccacgccgacgccgagtttcaggagcgtctgcaagaagatacgtcttttgggggcaacctcgggcgagcagtcttccaggccaaaaagagggttcttgaaccttttggtctggttgaggaagctgctaagacggctcctggaaagaaacgtccggtagagcagtcgccacaagagccagactcctcctcgggcattggcaagacaggccagcagcccgctaaaaagagactcaattttggtcagactggcgactcagagtcagtgcccgaccctcaacctctcggagaacctccagcaacccccgctgctgtgggacctactacaatggcttcaggcggtggcgcaccaatggcagacaataacgaaggcgccgatggagtgggtaatgcctcaggaaattggcattgcgattccacatggctgggcgacagagtcatcaccaccagcacccgaacctgggccctgcccacctacaacaatcacctctacaagcaaatctccagtgcttcaacgggggccagcaacgacaaccactacttcggctacagcaccccctgggggtattttgactttaacagattccactgccacttttcaccacgtgactggcagcgactcatcaacaacaactggggattccggcccaagagactcaacttcaagctcttcaacatccaggtcaaggaggtcacgcagaatgaaggcaccaagaccatcgccaataacctcaccagcaccattcaggtctttacggattcggaataccagctcccgtacgtcctcggctctgcccaccagggctgcctccctccgttcccggcggacgtgttcatgattccgcagtacggctacctaacgctcaacaatggtagccaggcagtgggacggtcatccttttactgcctggaatatttcccatcgcagatgctgagaacgggcaacaactttaccttcagctacacctttgaggacgttcctttccacagcagctacgctcacagccagagtctggaccgtctcatgaatcctctgattgaccagtacctgtactacttgtctcggactcaaacaacaggaggcacggcaaatacgcagactctgggcttcagccaaggtgggcctaatacaatggccaatcacgcaaagaactggctgccaggaccctgttaccgccaacaacgcgtctcaacgacaaccgggcaaaacaacaatagcaactttgcctggactgctgggaccaaataccatctgaatggaagaaattcattggctaatcctggcatcgctatggcaacacacaaagacgacaaggagcgtttttttcccagtaacgggatcctgatttttggcaaacaaaatgctgccagagacaatgcggattacagcgatgtcatgctcaccagcgaggaagaaatcaaaaccactaaccctgtggctacagaggaatacggtatcgtggcagataacttgcagcagcaaaacacggctcctcaaattggaactgtcaacagccagggggccttacccggtatggtctggcagaaccgggacgtgtacctgcagggtcccatctgggccaagattcctcacacggacggcaacttccacccgtctccgctgatgggcggctttggcctgaaacatcctccgcctcagatcctgatcaagaacacgcctgtacctgcggatcctccgaccaccttcaaccagtcaaagctgaactctttcatcacgcaatacagcaccggacaggtcagcgtggaaattgaatgggagctgcagaaggaaaacagcaagcgctggaaccccgagatccagtacacctccaactactacaaatctacaagtgtggactttgctgttaatacagaaggcgtgtactctgaaccccaccccattggcacccgttacctcacccgtcccctgtaa

SEQ ID NO: 2015 - DNA, 2211 bp, Artificial Sequence
  Description of Artificial Sequence: Synthetic polynucleotide
atggctgccgatggttatcttccagattggctcgaggacaacctctctgagggcattcgcgagtggtgggcgctgaaacctggagccccgaagcccaaagccaaccagcaaaagcaggacgacggccggggtctggtgcttcctggctacaagtacctcggacccttcaacggactcgacaaaggagagcccgtcaacgaggcggacgcggcggccctcgaacacgacaaggcttacgaccagcagctcaaggccggtgacaacccctacctgcggtacaaccacgccgacgccgagttccaggagcggctgcaagaagatacgtcttttgggggcaacctcgggcgagcagtcttccaggccaagaagaggcttcttgaacctcttggtctggttgaggaagcggctaagacggctcctggaaagaagaggcctgtagagcagtctcctcaggaaccggactcctccgcgggtattggcaaatcaggtgcacagcccgctaaaaagagactcaattttggtcagactggcgactcagagtcagtccccgacccacaacctctcggagaacctccagcaacccccgctgctgtgggacctactacaatggcttcaggcggtggcgcaccaatggcagacaataacgaaggcgccgatggagtgggtaatgcctcaggaaattggcattgcgattccacatggctgggcgacagagtcatcaccaccagcacccgaacctgggccctgcccacctataacaaccatctctacaagcaaatctccagtgcttcaacgggggccagtaacgacaaccactacttcggctacagcaccccctgggggtattttgactttaacagattccactgccacttctcaccacgtgactggcagcgactcatcaacaacaactggggattccggcccaagcgactcaacttcaagctcttcaacattcaggtcaaagaggttacggacaacgatggagtcaagaccatcgccaataaccttaccagcaccattcaggtgtttacggactcggaataccagctgccgtacgttctcggctccgcccaccagggctgcctgcctccgttcccggcggacgtgttcatgattccccagtacggctacctaacactcaacaacggtagtcaggccgtgggacgctcctccttctactgcctggaatactttccttcgcagatgctgagaactggcaacaacttccagtttacttacaccttcgaggacgtgcctttccacagcagctacgcccacagccagagcttggaccggctgatgaatcctctgattgaccagtacctgtactacttgtctcggactcaaacaacaggaggcacggcaaatacgcagactctgggcttcagccaaggtgggcctaatacaatggccaatcaggcaaagaactggctgccaggaccctgttaccgccaacaacgcgtctcaacgacaaccgggcaaaacaacaatagcaactttgcctggactgctgggaccaaataccatctgaatggaagaaattcattggctaatcctggcatcgctatggcaacacacaaagacgacaaggagcgtttttttcccagtaacgggatcctgatttttggcaaacaaaatgctgccagagacaatgcggattacagcgatgtcatgctcaccagcgaggaagaaatcaaaaccactaaccctgtggctacagaggaatacggtatcgtggcagataacttgcagcagcaaaacacggctcctcaaattggaactgtcaacagccagggggccttacccggtatggtctggcagaaccgggacgtgtacctgcagggtcccatctgggccaagattcctcacacggacggcaacttccacccgtctccgctgatgggcggctttggcctgaaacatcctccgcctcagatcctgatcaagaacacgcctgtacctgcggatcctccgaccaccttcaaccagtcaaagctgaactctttcatcacgcaatacagcaccggacaggtcagcgtggaaattgaatgggagctgcagaaggaaaacagcaagcgctggaaccccgagatccagtacacctccaactactacaaatctacaagtgtggactttgctgttaatacagaaggcgtgtactctgaaccccaccccattggcacccgttacctcacccgtcccctgtaa

SEQ ID NO: 2016 - DNA, 2211 bp, Artificial Sequence
  Description of Artificial Sequence: Synthetic polynucleotide
atggctgccgatggttatcttccagattggctcgaggacaacctctctgagggcattcgcgagtggtgggcgctgaaacctggagccccgaagcccaaagccaaccagcaaaagcaggacgacggccggggtctggtgcttcctggctacaagtacctcggacccttcaacggactcgacaagggggagcccgtcaacgcggcggatgcagcggccctcgagcacgacaaagcctacgaccagcagctcaaagcgggtgacaatccgtacctgcggtataaccacgccgacgccgagtttcaggagcgtctgcaagaagatacgtcttttgggggcaacctcgggcgagcagtcttccaggccaagaagagggttctcgaacctttgggtctggttgaggaaggggctaagacggctcctggaaagaaaaggccggtagagcagtctcctcaggaaccggactcctccgcgggtattggcaagacaggtgcacagcccgctaaaaagagactcaattttggtcagactggcgactcagagtcagtccccgacccacaacctctcggagaacctccagcaacccccgctgctgtgggacctactacaatggcttcaggcggtggcgcaccaatggcagacaataacgaaggcgccgacggagtgggtagtgcctcgggaaattggcattgcgattccacatggctgggcgacagagtcatcaccaccagcacccgaacctgggccctgcccacctataacaaccatctctacaagcaaatctccagtgcttcaacgggggccagtaacgacaaccactacttcggctacagcaccccctgggggtattttgacttcaacagattccactgccacttctcaccacgtgactggcagcgactcatcaacaacaactggggattccggcccaagcgactcaacttcaagctcttcaacattcaggtcaaagaggttacggacaacaatggagtcaagaccatcgccaataaccttaccagcacgatccaggtctttacggactcggagtaccagctgccgtacgtcctcggctctgcgcaccagggctgcctgcctccgttcccggcggacgtgttcatgattccgcagtacggctacctaacgctcaacaatggtagccaggcagtgggacggtcatccttttactgcctggaatatttcccatcgcagatgctgagaacgggcaacaactttaccttcagctacacctttgaggacgttcctttccacagcagctacgctcacagccagagtctggaccgtctcatgaatcctctgattgaccagtacctgtactacttgtctcggactcaaacaacaggaggcacggcaaatacgcagactctgggcttcagccaaggtgggcctaatacaatggccaatcaggcaaagaactggctgccaggaccctgttaccgccaacaacgcgtctcaacgacaaccgggcaaaacaacaatagcaactttgcctggactgctgggaccaaataccatctgaatggaagaaattcattggctaatcctggcatcgctatggcaacacacaaagacgacaaggagcgtttttttcccagtaacgggatcctgatttttggcaaacaaaatgctgccagagacaatgcggattacagcgatgtcatgctcaccagcgaggaagaaatcaaaaccactaaccctgtggctacagaggaatacggtatcgtggcagataacttgcagcagcaaaacacggctcctcaaattggaactgtcaacagccagggggccttacccggtatggtctggcagaaccgggacgtgtacctgcagggtcccatctgggccaagattcctcacacggacggcaacttccacccgtctccgctgatgggcggctttggcctgaaacatcctccgcctcagatcctgatcaagaacacgcctgtacctgcggatcctccgaccaccttcaaccagtcaaagctgaactctttcatcacgcaatacagcaccggacaggtcagcgtggaaattgaatgggagctgcagaaggaaaacagcaagcgctggaaccccgagatccagtacacctccaactactacaaatctacaagtgtggactttgctgttaatacagaaggcgtgtactctgaaccccaccccattggcacccgttacctcacccgtcccctgtaa

SEQ ID NO: 2017 - DNA, 2211 bp, Artificial Sequence
  Description of Artificial Sequence: Synthetic polynucleotide
atggctgccgatggttatcttccagattggctcgaggacaacctctctgagggcattcgcgagtggtgggacttgaaacctggagccccgaagcccaaagccaaccagcaaaagcaggacgacggccggggtctggtgcttcctggctacaagtacctcggacccttcaacggactcgacaagggggagcccgtcaacgcggcggacgcagcggccctcgagcacgacaaggcctacgaccagcagctcaaagcgggtgacaatccgtacctgcggtataaccacgccgacgccgagtttcaggagcgtctgcaagaagatacgtcttttgggggcaacctcggacgagcagtcttccaggccaaaaagaggcttcttgaacctcttggtctggttgaggaagcggctaagacggctcctggaaagaagaggcctgtagagcagtctcctcaggaaccggactcctccgcgggtattggcaaatcgggtgcacagcccgctaaaaagagactcaatttcggtcagactggcgacacagagtcagtcccagaccctcaaccaatcggagaacctccagcagcgccctctggtgtgggacctaatacaatggctgcaggcggtggcgcaccaatggcagacaataacgaaggtgccgatggagtgggtagttcctcgggaaattggcattgcgattcccaatggctgggggacagagtcatcaccaccagcacccgaacctgggccctgcccacctataacaaccacctctacaagcaaatctccagtgcttcaacgggggccagcaacgacaaccactactttggctacagcaccccttgggggtattttgacttcaacagattccactgccacttttcaccacgtgactggcaaagactcatcaacaacaactggggattccgacccaagagactcaacttcaagctcttcaacatccaggtcaaggaggtcacgcagaatgaaggcaccaagaccatcgccaataacctcaccagcaccatccaggtgtttacggactcggagtaccagctgccgtacgttctcggctctgcccaccagggctgcctgcctccgttcccggcggacgtgttcatgattccccagtacggctacctaacactcaacaacggtagtcaggccgtgggacgctcctccttctactgcctggaatactttccttcgcagatgctgagaaccggcaacaacttccagtttacttacaccttcgaggacgtgcctttccacagcagctacgcgcacagccagagcttggaccggctgatgaatcctctgattgaccagtacctgtactacttgtctcggactcaaacaacaggaggcacggcaaatacgcagactctgggcttcagccaaggtgggcctaatacaatggccaatcacgcaaagaactggctgccaggaccctgttaccgccaacaacgcgtctcaacgacaaccgggcaaaacaacaatagcaactttgcctggactgctgggaccaaataccatctgaatggaagaaattcattggctaatcctggcatcgctatggcaacacacaaagacgacaaggagcgtttttttcccagtaacgggatcctgatttttggcaaacaaaatgctgccagagacaatgcggattacagcgatgtcatgctcaccagcgaggaagaaatcaaaaccactaaccctgtggctacagaggaatacggtatcgtggcagataacttgcagcagcaaaacacggctcctcaaattggaactgtcaacagccagggggccttacccggtatggtctggcagaaccgggacgtgtacctgcagggtcccatctgggccaagattcctcacacggacggcaacttccacccgtctccgctgatgggcggctttggcctgaaacatcctccgcctcagatcctgatcaagaacacgcctgtacctgcggatcctccgaccaccttcaaccagtcaaagctgaactctttcatcacgcaatacagcaccggacaggtcagcgtggaaattgaatgggagctgcagaaggaaaacagcaagcgctggaaccccgagatccagtacacctccaactactacaaatctacaagtgtggactttgctgttaatacagaaggcgtgtactctgaaccccaccccattggcacccgttacctcacccgtcccctgtaa

SEQ ID NO: 2018 - DNA, 2214 bp, Artificial Sequence
  Description of Artificial Sequence: Synthetic polynucleotide
atggctgccgatggttatcttccagattggctcgaggacaaccttagtgaaggaattcgcgagtggtgggcgctgaaacctggagccccgaagcccaaagccaaccagcaaaagcaggacgacggccggggtctggtgcttcctggctacaagtacctcggacccttcaacggactcgacaagggggagcccgtcaacgcggcggacgcagcggccctcgagcacgacaaggcctacgaccagcagctcaaagcgggtgacaatccgtacctgcggtataaccacgccgacgccgagtttcaggagcgtctgcaagaagatacgtcttttgggggcaacctcgggcgagcagtcttccaggccaagaagcgggttctcgaacctctcggtctggttgaggaaggcgctaagacggctcctggaaagaaacgtccggtagagcagtcgccacaagagccagactcctcctcgggcatcggcaagacaggccagcagcccgctaaaaagagactcaatttcggtcagactggcgacacagagtcagtcccagaccctcaaccaatcggagaacctcccgcagccccctcaggtgtgggatctcttacaatggcttcaggtggtggcgcaccagtggcagacaataacgaaggtgccgatggagtgggtagttcctcgggaaattggcattgcgattcccaatggctgggggacagagtcatcaccaccagcaccagaacctgggccttgcccacctacaataaccacctctacaagcaaatctccaacagcacatctggaggatcttcaaatgacaacgcctacttcggctacagcaccccctgggggtattttgactttaacagattccactgccacttttcaccacgtgactggcagcgactcatcaacaacaactggggattccgacccaagagactcaacttcaagctcttcaacatccaggtcaaggaggtcacgcagaacgaaggcaccaagaccatcgccaataacctcaccagcaccatccaggtgtttacggactcggagtaccagctgccgtacgttctcggctccgcccaccagggctgcctgcctccgttcccggcggacgtgttcatgattccccagtacggctacctaacgctcaacaacggtagtcaggccgtgggacgctcctccttctactgcctggaatactttccttcgcagatgctgagaaccggcaacaacttccagtttacttacaccttcgaggacgtgcctttccacagcagctacgcgcacagccagagcttggaccggctgatgaatcctctgattgaccagtacctgtactacttgtctcggactcaaacaacaggaggcacggcaaatacgcagactctgggcttcagccaaggtgggcctaatacaatggccaatcaggcaaagaactggctgccaggaccctgttaccgccaacaacgcgtctcaacgacaaccgggcaaaacaacaatagcaactttgcctggactgctgggaccaaataccatctgaatggaagaaattcattggctaatcctggcatcgctatggcaacacacaaagacgacaaggagcgtttttttcccagtaacgggatcctgatttttggcaaacaaaatgctgccagagacaatgcggattacagcgatgtcatgctcaccagcgaggaagaaatcaaaaccactaaccctgtggctacagaggaatacggtatcgtggcagataacttgcagcagcaaaacacggctcctcaaattggaactgtcaacagccagggggccttacccggtatggtctggcagaaccgggacgtgtacctgcagggtcccatctgggccaagattcctcacacggacggcaacttccacccgtctccgctgatgggcggctttggcctgaaacatcctccgcctcagatcctgatcaagaacacgcctgtacctgcggatcctccgaccaccttcaaccagtcaaagctgaactctttcatcacgcaatacagcaccggacaggtcagcgtggaaattgaatgggagctgcagaaggaaaacagcaagcgctggaaccccgagatccagtacacctccaactactacaaatctacaagtgtggactttgctgttaatacagaaggcgtgtactctgaaccccaccccattggcacccgttacctcacccgtcccctgtaa

SEQ ID NO: 2019 - DNA, 2214 bp, Artificial Sequence
  Description of Artificial Sequence: Synthetic polynucleotide
atggctgccgatggttatcttccagattggctcgaggacaaccttagtgaaggaattcgcgagtggtgggcgctgaaacctggagccccgaagcccaaagccaaccagcaaaagcaggacgacggccggggtctggtgcttcctggctacaagtacctcggacccttcaacggactcgacaagggggagcccgtcaacgcggcggacgcagcggccctcgagcacgacaaggcctacgaccagcagctcaaagcgggtgacaatccgtacctgcggtataaccacgccgacgcggagtttcaggagcgccttaaagaagatacgtcttttgggggcaacctcgggcgagcagtcttccaggccaagaagagggttctcgaaccttttggtctggttgaggaaggtgctaagacggctcctggaaagaaacgtccggtagagcagtcgccacaagagccagactcctcctcgggcatcggcaagacaggccagcagcccgctaaaaagagactcaattttggtcagactggcgactcagagtcagttccagaccctcaacctctcggagaacctccagcagcgccctctggtgtgggacctaatacaatggctgcaggcggtggcgcaccaatggcagacaataacgaaggtgccgatggagtgggtagttcctcgggaaattggcattgcgattcccaatggctggggaacagagtcatcaccaccagcacccgaacctgggccctgcccacctacaacaatcacctctacaagcaaatctccaacagcacatctggaggatcttcaaatgacaacgcctacttcggctacagcaccccctgggggtattttgacttcaacagattccactgccacttctcaccacgtgactggcagcgactcatcaacaacaactggggattccggcccaagagactcaacttcaagctcttcaacattcaggtcaaagaggttacggacaacaatggagtcaagaccatcgccaataaccttaccagcacggtccaggtcttcacggactcggagtaccagttgccgtacgtcctcggctctgcgcaccagggctgcctccctccgttcccggcggacgtgttcatgattccgcaatacggctacctgacgctcaacaacggtagccaagccgtgggacgttcatccttttactgcctggaatatttcccttctcagatgctgagaaccggcaacaacttccagtttacttacaccttcgaggacgtgcctttccacagcagctacgcgcacagccagagcttggaccggctgatgaatcctctgattgaccagtacctgtactacttgtctcggactcaaacaacaggaggcacggcaaatacgcagactctgggcttcagccaaggtgggcctaatacaatggccaatcaggcaaagaactggctgccaggaccctgttaccgccaacaacgcgtctcaacgacaaccgggcaaaacaacaatagcaactttgcctggactgctgggaccaaataccatctgaatggaagaaattcattggctaatcctggcatcgctatggcaacacacaaagacgacaaggagcgtttttttcccagtaacgggatcctgatttttggcaaacaaaatgctgccagagacaatgcggattacagcgatgtcatgctcaccagcgaggaagaaatcaaaaccactaaccctgtggctacagaggaatacggtatcgtggcagataacttgcagcagcaaaacacggctcctcaaattggaactgtcaacagccagggggccttacccggtatggtctggcagaaccgggacgtgtacctgcagggtcccatctgggccaagattcctcacacggacggcaacttccacccgtctccgctgatgggcggctttggcctgaaacatcctccgcctcagatcctgatcaagaacacgcctgtacctgcggatcctccgaccaccttcaaccagtcaaagctgaactctttcatcacgcaatacagcaccggacaggtcagcgtggaaattgaatgggagctgcagaaggaaaacagcaagcgctggaaccccgagatccagtacacctccaactactacaaatctacaagtgtggactttgctgttaatacagaaggcgtgtactctgaaccccaccccattggcacccgttacctcacccgtcccctgtaa

SEQ ID NO: 2020 - DNA, 2211 bp, Artificial Sequence
  Description of Artificial Sequence: Synthetic polynucleotide
atggctgccgatggttatcttccagattggctcgaggacaacctctctgagggcattcgcgagtggtgggacttgaaacctggagccccgaagcccaaagccaaccagcaaaagcaggacgacggccggggtctggtgcttcctggctacaagtacctcggacccttcaacggactcgacaggggggagcccgtcaacgcggcggacgcagcggccctcgagcacgacaaggcctacgaccagcagctcaaagcgggtgacaatccgtacctgcggtataaccacgccgacgccgagtttcaggagcgtctgcaagaagatacgtcttttgggggcaacctcgggcgagcagtcttccaggccaagaagcgggttctcgaacctctcggtctggttgaggaaggcgctaagacggctcctggaaagaaacgtccggtagagcagtcgccacaagagccagactcctcctcgggcatcggcaagacaggccagcagcccgctaaaaagagactcaattttggtcagactggcgactcagagtcagtccccgacccacaacctctcggagaacctccagcaacccccgctgctgtgggacctactacaatggcttcaggcggtggcgcaccaatggcagacaataacgaaggcgccgacggagtgggtaatgcctcaggaaattggcattgcgattccacatggctgggcgacagagtcatcaccaccagcacccgaacctgggccttgcccacctataacaaccacctctacaagcaaatctccagtgcttcaacgggggccagcaacgacaaccactacttcggctacagcaccccctgggggtattttgacttcaacagattccactgccacttctcaccacgtgactggcagcgactcatcaacaacaactggggattccggcctaagcgactcaacttcaagctcttcaacattcaggtcaaagaggttacggacaacaatggagtcaagaccatcgccaataacctcaccagcaccatccaggtgtttacggactcggagtaccagctgccgtacgttctcggctctgcccaccagggctgcctgcctccgttcccggcggacgtgttcatgattccccagtacggctacctaacactcaacaacggtagtcaggccgtgggacgctcctccttctactgcctggaatactttccttcgcagatgctgagaaccggcaacaacttccagtttacttacaccttcgaggacgtgcctttccacagcagctacgcccacagccagagcttggaccggctgatgaatcctctgattgaccagtacctgtactacttgtctcggactcaaacaacaggaggcacggcaaatacgcagactctgggcttcagccaaggtgggcctaatacaatggccaatcaggcaaagaactggctgccaggaccctgttaccgccaacaacgcgtctcaacgacaaccgggcaaaacaacaatagcaactttgcctggactgctgggaccaaataccatctgaatggaagaaattcattggctaatcctggcatcgctatggcaacacacaaagacgacaaggagcgtttttttcccagtaacgggatcctgatttttggcaaacaaaatgctgccagagacaatgcggattacagcgatgtcatgctcaccagcgaggaagaaatcaaaaccactaaccctgtggctacagaggaatacggtatcgtggcagataacttgcagcagcaaaacacggctcctcaaattggaactgtcaacagccagggggccttacccggtatggtctggcagaaccgggacgtgtacctgcagggtcccatctgggccaagattcctcacacggacggcaacttccacccgtctccgctgatgggcggctttggcctgaaacatcctccgcctcagatcctgatcaagaacacgcctgtacctgcggatcctccgaccaccttcaaccagtcaaagctgaactctttcatcacgcaatacagcaccggacaggtcagcgtggaaattgaatgggagctgcagaaggaaaacagcaagcgctggaaccccgagatccagtacacctccaactactacaaatctacaagtgtggactttgctgttaatacagaaggcgtgtactctgaaccccaccccattggcacccgttacctcacccgtcccctgtaa

SEQ ID NO: 2021 - DNA, 2211 bp, Artificial Sequence
  Description of Artificial Sequence: Synthetic polynucleotide
atggctgccgatggttatcttccagattggctcgaggacaacctctctgagggcattcgcgagtggtgggacttgaaacctggagccccgaagcccaaagccaaccagcaaaagcaggacgacggccggggtctggtgcttcctggctacaagtacctcggacccttcaacggactcgacaagggggagcccgtcaacgcggcggacgcagcggccctcgagcacgacaaggcctacgaccagcagctcaaagcgggtgacaatccgtacctgcggtataaccacgccgacgccgagtttcaggagcgtctgcaagaagatacgtcttttgggggcaacctcgggcgagcagtcttccaggccaagaagcgggttctcgaacctctcggtctggttgaggaaggcgctaagacggctcctggaaagaaacgtccggtagagcagtcgccacaagagccagactcctcctcgggcatcggcaagaaaggccaacagcccgccagaaaaagactcaattttggtcagactggcgactcagagtcagttccagaccctcaacctctcggagaacctcccgcagccccctcaggtgtgggatctcttacaatggcttcaggcggtggcgcaccaatggcagacaataacgaaggcgccgacggagtgggtaatgcctcaggaaattggcattgcgattccacatggctgggcgacagagtcatcaccaccagcacccgaacatgggccttgcccacttacaacaaccatctctacaagcaaatctccagtgcttcaacgggggccagcaacgacaaccactacttcggctacagcaccccctgggggtattttgatttcaacagattccactgccacttttcaccacgtgactggcaaagactcatcaacaacaactggggattccgacccaagagactcaacttcaagctctttaacattcaagtcaaagaggtcacgcagaatgaaggcaccaagaccatcgccaataaccttaccagcacggtccaggtcttcacggactcagactatcagctcccgtacgttctcggctccgcccaccagggctgcctgcctccgttcccggcggacgtgttcatgattccccagtacggctacctaacactcaacaacggtagtcaggccgtgggacgctcctccttctactgcctggaatactttccttcgcagatgctgagaaccggcaacaacttccagtttacttacacctttgaggacgttcctttccacagcagctacgctcacagccagagtctggaccgtctcatgaatcctctgattgaccagtacctgtactacttgtctcggactcaaacaacaggaggcacggcaaatacgcagactctgggcttcagccaaggtgggcctaatacaatggccaatcaggcaaagaactggctgccaggaccctgttaccgccaacaacgcgtctcaacgacaaccgggcaaaacaacaatagcaactttgcctggactgctggaaccaaataccatctgaatggaagaaattcattgtctaatcctggcatcgctatggcgacacacaaagacgacaaggagcgtttttttcccagtaacgggatcctgatttttggcaaacaaaatgctgccagagacaatgcggattacagcgatgtcatgctcaccagcgaggaagaaatcaaaaccactaaccctgtggctacagaggaatacggtatcgtggcagataacttgcagcagcaaaacacggctcctcaaattggaactgtcaacagccagggggccttacccggtatggtctggcagaaccgggacatgtacctgcagggtcccatctgggccaagattcctcacacggacggcaacttccacccgtctccgctgatgggcggctttggcctgaaacatcctccgcctcagatcctgatcaagaacacgcctgtacctgcggatcctccgaccaccttcaaccagtcaaagctgaactctttcatcacgcaatacagcaccggacaggtcagcgtggaaattgaatgggagctgcagaaggaaaacagcaagcgctggaaccccgagatccagtacacctccaactactacaaatctacaagtgtggactttgctgttaatacagaaggcgtgtactctgaaccccaccccattggcacccgttacctcacccgtcccctgtaa

SEQ ID NO: 2022 - DNA, 2211 bp, Artificial Sequence
  Description of Artificial Sequence: Synthetic polynucleotide
atggctgccgatggttatcttccagattggctcgaggacaacctctctgagggcattcgcgagtggtgggcgctgaaacctggagccccgaagcccaaagccaaccagcaaaagcaggacgacggccggggtctggtgcttcctggctacaagtacctcggacccttcaacggactcgacaagggggagcccgtcaacgcggcggatgcagcggccctcgagcacgacaaggcctacgaccagcagctcaaagcgggtgacaatccgtacctgcggtataaccacgccgacgccgagtttcaggagcgtctgcaggaagatacgtcttttgggggcaacctcgggcgagcagtcttccaggccaagaagagggttctcgaaccttttggtctggttgaggaaggcgctaagacggctcctggaaagaaacgtccggtagagcagtcgccacaagagccagactcctcctcgggcatcggcaagacaggccagcagcccgctaaaaagagactcaattttggtcagactggcggctcagagtcagtccccgacccacaacctctcggagaacctccagcaacccccgctgctgtgggacctactacaatggctgcaggcggtggcgcaccaatggcagacaataacgaaggcgccgacggagtgggtagttcctcgggaaattggcattgcgattccacatggctgggcgacagagtcatcaccaccagcaccagaacctgggccttgcccacctataacaaccacctctacaagcaaatctccagtgcttcaacgggggccagcaacgacaaccactacttcggctacagcaccccctgggggtattttgatttcaacagattccactgccatttctcaccacgtgactggcagcgactcatcaacaacaactggggattccggcccaagagactcaacttcaaactcttcaacattcaggtcaaagaggttacggacaacaatggagtcaagaccatcgccaataaccttaccagcacggtccaggtgtttacggactcggagtaccagctgccgtacgttctcggctctgcccaccagggctgcctccctccgttcccggcggacgtgttcatgattccgcagtacggctacctaacgctcaacaatggcagccaggcagtgggacggtcatccttttactgcctggaatatttcccttctcagatgctgagaacgggcaacaactttaccttcagctacacctttgaggaagtgcctttccacagcagctacgcgcacagccagagcctggaccggctgatgaatcctctgattgaccagtacctgtactacttgtctcggactcaaacaacaggaggcacggcaaatacgcagactctgggcttcagccaaggtgggcctaatacaatggccaatcaggcaaagaactggctgccaggaccctgttaccgccaacaacgcgtctcaacgacaaccgggcaaaacaacaatagcaactttgcctggactgctgggaccaaataccatctgaatggaagaaattcattggctaatcctggcatcgctatggcctcacacaaagacgacaaggagcgtttttttcccagtaacgggatcctgatttttggcaaacaaaatgctgccagagacaatgcggattacagcgatgtcatgctcaccagcgaggaagaaatcaaaaccactaaccctgtggctacagaggaatacggtatcgtggcagataacttgcagcagcaaaacacggctcctcaaattggaactgtcaacagccagggggccttacccggtatggtctggcagaaccgggacgtgtacctgcagggtcccatctgggccaagattcctcacacggacggcaacttccacccgtctccgctgatgggcggctttggcctgaaacatcctccgcctcagatcctgatcaagaacacgcctgtacctgcggatcctccgaccaccttcaaccagtcaaagctgaactctttcatcacgcaatacagcaccggacaggtcagcgtggaaattgaatgggagctgcagaaggaaaacagcaagcgctggaaccccgagatccagtacacctccaactactacaaatctacaagtgtggactttgctgttaatacagaaggcgtgtactctgaaccccaccccattggcacccgttacctcacccgtcccctgtaa

SEQ ID NO: 2023 - protein, 736 aa, Artificial Sequence
  Description of Artificial Sequence: Synthetic polypeptide
MAADGYLPDWLEDTLSEGIRQWWKLKPGPPPPKPAERHKDDSRGLVLPGYKYLGPFNGLDKGEPVNEADAAALEHDKAYDQQLKAGDNPYLKYNHADAEFQERLKEDTSFGGNLGRAVFQAKKRVLEPLGLVEEGAKTAPGKKRPVEQSPQEPDSSSGIGKTGQQPAKKRLNFGQTGDSESVPDPQPLGEPPATPAAVGPTTMASGGGAPMADNNEGADGVGSSSGNWHCDSQWLGDRVITTSTRTWALPTYNNHLYKQISSASTGASNDNHYFGYSTPWGYFDFNRFHCHFSPRDWQRLINNNWGFRPKRLNFKLFNIQVKEVTQNEGTKTIANNLTSTIQVFTDSEYQLPYVLGSAHQGCLPPFPADVFMIPQYGYLTLNNGSQAVGRSSFYCLEYFPSQMLRTGNNFQFTYTFEDVPFHSSYAHSQSLDRLMNPLIDQYLYYLSRTQTTGGTANTQTLGFSQGGPNTMANQAKNWLPGPCYRQQRVSTTTGQNNNSNFAWTAGTKYHLNGRNSLANPGIAMATHKDDKERFFPSNGILIFGKQNAARDNADYSDVMLTSEEEIKTTNPVATEEYGIVADNLQQQNTAPQIGTVNSQGALPGMVWQNRDVYLQGPIWAKIPHTDGNFHPSPLMGGFGLKHPPPQILIKNTPVPADPPTTFNQSKLNSFITQYSTGQVSVEIEWELQKENSKRWNPEIQYTSNYYKSTSVDFAVNTEGVYSEPHPIGTRYLTRPL

SEQ ID NO: 2024 - protein, 736 aa, Artificial Sequence
  Description of Artificial Sequence: Synthetic polypeptide
MAADGYLPDWLEDNLSEGIREWWALKPGAPKPKANQQKQDDGRGLVLPGYKYLGPFNGLDKGEPVNAADAAALEHDKAYDQQLKAGDNPYLKYNHADAEFQERLKEDTSFGGNLGRAVFQAKKRLLEPLGLVEEAAKTAPGKKRPVEQSPQEPDSSAGIGKSGAQPAKKRLNFGQTGDSESVPDPQPLGEPPATPAAVGPTTMASGGGAPMADNNEGADGVGNASGNWHCDSTWLGDRVITTSTRTWALPTYNNHLYKQISSASTGASNDNHYFGYSTPWGYFDFNRFHCHFSPRDWQRLINNNWGFRPKRLNFKLFNIQVKEVTQNEGTKTIANNLTSTIQVFTDSEYQLPYVLGSAHQGCLPPFPADVFMIPQYGYLTLNNGSQAVGRSSFYCLEYFPSQMLRTGNNFQFTYTFEDVPFHSSYAHSQSLDRLMNPLIDQYLYYLSRTQTTGGTANTQTLGFSQGGPNTMANQAKNWLPGPCYRQQRVSTTTGQNNNSNFAWTAGTKYHLNGRNSLANPGIAMATHKDDKERFFPSNGILIFGKQNAARDNADYSDVMLTSEEEIKATNPVATEEYGIVADNLQQQNTAPQIGTVNSQGALPGMVWQNRDVYLQGPIWAKIPHTDGNFHPSPLMGGFGLKHPPPQILIKNTPVPADPPTTFNQSKLNSFITQYSTGQVSVEIEWELQKENSKRWNPEIQYTSNYYKSTSVDFAVNTEGVYSEPHPIGTRYLTRPL

SEQ ID NO: 2025 - protein, 737 aa, Artificial Sequence
  Description of Artificial Sequence: Synthetic polypeptide
MAADGYLPDWLEDNLSEGIREWWDLKPGAPKPKANQQKQDDGRGLVLPGYKYLGPFNGLDKGEPVNAADAAALEHDKAYDQQLKAGDNPYLRYNHADAEFQERLQEDTSFGGNLGRAVFQAKKRVLEPLGLVEEGANTAPGKKRPVEQSPQEPDSSAGIGKSGAQPAKKRLNFGQTGDTESVPDPQPIGEPPAAPSGVGSLTMASGGGAPVADNNEGADGVGSSSGNWHCDSQWLGDRVITTSTRTWALPTYNNHLYKQISNSTSGGSSNDNAYFGYSTPWGYFDFNRFHCHFSPRDWQRLINNNWGFRPKRLNFKLFNIQVKEVTDNNGVKTIANNLTSTIQVFTDSEYQLPYVLGSAHQGCLPPFPADVFMIPQYGYLTLNNGSQAVGRSSFYCLEYFPSQMLRTGNNFQFTYTFEDVPFHSSYAHSQSLDRLMNPLIDQYLYYLSRTQTTGGTANTQTLGFSQGGPNTMANQAKNWLPGPCYRQQRVSTTTGQNNNSNFAWTAGTKYHLNGRNSLANPGIAMASHKDDKERFFPSNGILIFGKQNAARDNADYSDVMLTSEEEIKTTNPVATEEYGIVADNLQQQNTAPQIGTVNSQGALPGMVWQNRDVYLQGPIWAKIPHTDGNFHPSPLMGGFGLKHPPPQILIKNTPVPADPPTTFNQSKLNSFITQYSTGQVSVEIEWELQKENSKRWNPEIQYTTNYYKSTSVDFAVNTEGVYSEPHPIGTRYLTRPL

SEQ ID NO: 2026 - protein, 736 aa, Artificial Sequence
  Description of Artificial Sequence: Synthetic polypeptide
MAADGYLPDWLEDNLSEGIREWWALKPGAPKPKANQQKQDDGRGLVLPGYKYLGPFNGLDKGEPVNEADAAALEHDKAYDQQLKAGDNPYLRYNHADAEFQERLQEDTSFGGNLGRAVFQAKKRVLEPLGLVEEGAKTAPGKKRPVEQSPQEPDSSSGIGKTGQQPAKKRLNFGQTGDSESVPDPQPLGEPPATPAAVGPTTMASGGGAPMADNNEGADGVGNASGNWHCDSTWLGDRVITTSTRTWALPTYNNHLYKQISSASTGASNDNHYFGYSTPWGYFDFNRFHCHFSPRDWQRLINNNWGFRPKRLNFKLFNIQVKEVTQNEGTKTIANNLTSTIQVFTDSEYQLPYVLGSAHQGCLPPFPADVFMIPQYGYLTLNNGSQAVGRSSFYCLEYFPSQMLRTGNNFQFTYTFEDVPFHSSYAHSQSLDRLMNPLIDQYLYYLSRTQTTGGTANTQTLGFSQGGPNTMANQAKNWLPGPCYRQQRVSTTTGQNNNSNFAWTAGTKYHLNGRNSLANPGIAMATHKDDKERFFPSNGILIFGKQNAARDNADYSDVMLTSEEEIKTTNPVATEEYGIVADNLQQQNTAPQIGTVNSQGALPGMVWQNRDVYLQGPIWAKIPHTDGNFHPSPLMGGFGLKHPPPQILIKNTPVPADPPTTFNQSKLNSFITQYSTGQVSVEIEWELQKENSKRWNPEIQYTSNYYKSTSVDFAVNTEGVYSEPHPIGTRYLTRPL

SEQ ID NO: 2027 - protein, 736 aa, Artificial Sequence
  Description of Artificial Sequence: Synthetic polypeptide
MAADGYLPDWLEDNLSEGIREWWALKPGAPKPKANQQKQDDGRGLVLPGYKYLGPFNGLDKGEPVNEADAAALEHDKAYDQQLKAGDNPYLRYNHADAEFQERLQEDTSFGGNLGRAVFQAKKRVLEPFGLVEEGAKTAPGKKRPVEQSPQEPDSSSGIGKTGQQPAKKRLNFGQTGDSESVPDPQPLGEPPATPAAVGPTTMASGGGAPMADNNEGADGVGNASGNWHCDSQWLGDRVITTSTRTWALPTYNNHLYKQISSASTGASNDNHYFGYSTPWGYFDFNRFHCHFSPRDWQRLINNNWGFRPKRLNFKLFNIQVKEVTDNNGVKTIANNLTSTVQVFSDSEYQLPYVLGSAHQGCLPPFPADVFMIPQYGYLTLNNGSQAVGRSSFYCLEYFPSQMLRTGNNFQFTYTFEDVPFHSSYAHSQSLDRLMNPLIDQYLYYLSRTQTTGGTANTQTLGFSQGGPNTMANQAKNWLPGPCYRQQRVSTTTGQNNNSNFAWTAGTKYHLNGRNSLANPGIAMATHKDDKERFFPSNGILIFGKQNAARDNADYSDVMLTSEEEIKTTNPVATEEYGIVADNLQQQNTAPQIGTVNSQGALPGMVWQNRDVYLQGPIWAKIPHTDGNFHPSPLMGGFGLKHPPPQILIKNTPVPADPPTTFNQSKLNSFITQYSTGQVSVEIEWELQKENSKRWNPEIQYTSNYYKSTSVDFAVNTEGVYSEPHPIGTRYLTRPL

SEQ ID NO: 2028 - protein, 736 aa, Artificial Sequence
  Description of Artificial Sequence: Synthetic polypeptide
MAADGYLPDWLEDTLSEGIRQWWKLKPGPPPPKPAERHKDDSRGLVLPGYKYLGPFNGLDKGEPVNEADAAALEHDKAYDRQLDSGDNPYLKYNHADAEFQERLKEDTSFGGNLGRAVFQAKKRVLEPFGLVEEGAKTAPGKKRPVEQSPQEPDSSSGIGKTGQQPAKKRLNFGQTGDSESVPDPQPLGEPPATPAAVGPTTMASGGGAPMADNNEGADGVGNASGNWHCDSTWLGDRVITTSTRTWALPTYNNHLYKQISSASTGASNDNHYFGYSTPWGYFDFNRFHCHFSPRDWQRLINNNWGFRPKRLNFKLFNIQVKEVTDNNGVKTIANNLTSTVQVFTDSDYQLPYVLGSAHEGCLPPFPADVFMIPQYGYLTLNNGSQAVGRSSFYCLEYFPSQMLRTGNNFQFTYTFEDVPFHSSYAHSQSLDRLMNPLIDQYLYYLSRTQTTGGTANTQTLGFSQGGPNTMANQAKNWLPGPCYRQQRVSTTTGQNNNSNFAWTAGTKYHLNGRNSLANPGIAMATHKDDKERFFPSNGILIFGKQNAARDNADYSDVMLTSEEEIKTTNPVATEEYGIVADNLQQQNTAPQIGTVNSQGALPGMVWQNRDVYLQGPIWAKIPHTDGNFHPSPLMGGFGLKHPPPQILIKNTPVPADPPTTFNQSKLNSFITQYSTGQVSVEIEWELQKENSKRWNPEIQYTSNYYKSTSVDFAVNTEGVYSEPHPIGTRYLTRNL

SEQ ID NO: 2029 - protein, 738 aa, Artificial Sequence
  Description of Artificial Sequence: Synthetic polypeptide
MAADGYLPDWLEDNLSEGIREWWDLKPGAPKPKANQQKQDDGRGLVLPGYKYLGPFNGLDKGEPVNAADAAALEHDKAYDQQLQAGDNPYLRYNHADAEFQERLQEDTSFGGNLGRAVFQAKKRVLEPLGLVEEGAKTAPGKKRPVEPSPQRSPDSSTGIGKKGQQPARKRLNFGQTGDSESVPDPQPLGEPPAAPSGVGPNTMAAGGGAPMADNNEGADGVGSSSGNWHCDSQWLGDRVITTSTRTWALPTYNNHLYKQISNSTSGGSSNDNAYFGYSTPWGYFDFNRFHCHFSPRDWQRLINNNWGFRPKRLSFKLFNIQVKEVTQNEGTKTIANNLTSTIQVFTDSEYQLPYVLGSAHQGCLPPFPADVFMIPQYGYLTLNNGSQAVGRSSFYCLEYFPSQMLRTGNNFTFSYTFEDVPFHSSYAHSQSLDRLMNPLIDQYLYYLSRTQTTGGTANTQTLGFSQGGPNTMANQAKNWLPGPCYRQQRVSTTTGQNNNSNFAWTAGTKYHLNGRNSLANPGIAMATHKDDKERFFPSNGILIFGKQNAARDNADYSDVMLTSEEEIKTTNPVATEEYGIVADNLQQQNTAPQIGTVNSQGALPGMVWQNRDVYLQGPIWAKIPHTDGNFHPSPLMGGFGLKHPPPQILIKNTPVPADPPTTFNQSKLNSFITQYSTGQVSVEIEWELQKENSKRWNPEIQYTSNYYKSTSVDFAVNTEGVYSEPHPIGTRYLTRPL

SEQ ID NO: 2030 - protein, 737 aa, Artificial Sequence
  Description of Artificial Sequence: Synthetic polypeptide
MAADGYLPDWLEDNLSEGIREWWDLKPGAPKPKANQQKQDDGRGLVLPGYKYLGPFNGLDKGEPVNAADAAALEHDKAYDQQLKAGDNPYLRYNHADAEFQERLQEDTSFGGNLGRAVFQAKKRVLEPFGLVEEGAKTAPGKKRPVEQSPQEPDSSSGIGKTGQQPAKKRLNFGQTGDSESVPDPQPLGEPPATPAAVGPTTMASGGGAPMQDNNEGADGVGSSSGNWHCDSTWLGDRVITTSTRTWALPTYNNHLYKQISNGTSGGATNDNTYFGYSTPWGYFDFNRFHCHFSPRDWQRLINNNWGFRPKRLNFKLFNIQVKEVTQNEGTKTIANNLTSTIQVFTDSEYQLPYVLGSAHQGCLPPFPADVFMIPQYGYLTLNNGSQAVGRSSFYCLEYFPSQMLRTGNNFTFSYTFEDVPFHSSYAHSQSLDRLMNPLIDQYLYYLSRTQTTGGTANTQTLGFSQGGPNTMANQAKNWLPGPCYRQQRVSTTTGQNNNSNFAWTAGTKYHLNGRNSLANPGIAMATHKDDKERFFPSNGILIFGKQNAARDNADYSDVMLTSEEEIKTTNPVATEEYGIVADNLQQQNTAPQIGTVNSQGALPGMVWQNRDVYLQGPIWAKIPHTDGNFHPSPLMGGFGLKHPPPQILIKNTPVPADPPTTFNQSKLNSFITQYSTGQVSVEIEWELQKENSKRWNPEIQYTSNYYKSTSVDFAVNTEGVYSEPHPIGTRYLTRPL

SEQ ID NO: 2031 - protein, 736 aa, Artificial Sequence
  Description of Artificial Sequence: Synthetic polypeptide
MAADGYLPDWLEDNLSEGIREWWALKPGAPKPKANQQKQDDGRGLVLPGYKYLGPFNGLDKGEPVNAADAAALEHDKAYDQQLKAGDNPYLRYNHADAEFQERLQEDTSFGGNLGRAVFQAKKRVLEPLGLVEEGAKTAPGKKRPVEQSPQEPDSSSGIGKTGQQPAKKRLNFGQTGDSESVPDPQPLGEPPATPAAVGPTTMASGGGAPMADNNEGADGVGSSSGNWHCDSTWLGDRVITTSTRTWALPTYNNHLYKQISSASTGASNDNHYFGYSTPWGYFDFNRFHCHFSPRDWQRLINNNWGFRPKRLNFKLFNIQVKEVTDNNGVKTIANNLTSTVQVFTDSDYQLPYVLGSAHEGCLPPFPADVFMIPQYGYLTLNNGSQAVGRSSFYCLEYFPSQMLRTGNNFTFSYTFEDVPFHSSYAHSQSLDRLMNPLIDQYLYYLSRTQTTGGTANTQTLGFSQGGPNTMANQAKNWLPGPCYRQQRVSTTTGQNNNSNFAWTAGTKYHLNGRNSLANPGIAMATHKDDKERFFPSNGILIFGKQNAARDNADYSDVMLTSEEEIKTTNPVATEEYGIVADNLQQQNTAPQIGTVNSQGALPGMVWQNRDVYLQGPIWAKIPHTDGNFHPSPLMGGFGLKHPPPQILIKNTPVPADPPTTFNQSKLNSFITQYSTGQVSVEIEWELQKENSKRWNPEIQYTSNYYKSTSVDFAVNTEGVYSEPHPIGTRYLTRPL

SEQ ID NO: 2032 - protein, 737 aa, Artificial Sequence
  Description of Artificial Sequence: Synthetic polypeptide
MAADGYLPDWLEDNLSEGIREWWDLKPGAPKPKANQQKQDDGRGLVLPGYKYLGPFNGLDKGEPVNAADAAALEHDKAYDQQLKAGDNPYLRYNHADAEFQERLQEDTSFGGNLGRAVFQAKKRVLEPLGLVEEGAKTAPGKKRPVEPSPQRSPDSSTGIGKKGQQPARKRLNFGQTGDSESVPDPQPLGEPPATPAAVGPTTMASGGGAPMADNNEGADGVGNASGNWHCDSTWLGDRVITTSTRTWALPTYNNHLYKQISSASTGASNDNHYFGYSTPWGYFDFNRFHCHFSPRDWQRLINNNLGSRPKRLNFKLFIIQVKEVTTNDGVTTIANNLTSTVQVFSDSEYQLPYVLGSAHQGCLPPFPADVFMIPQYGYLTLNNGSQAVGRSSFYCLEYFPSQMLRTGNNFTFSYTFEDVPFHSSYAHSQSLDRLMNPLIDQYLYYLNRTQNQSGSAQNKDLLFSRGSPAGMSVQPKNWLPGPCYRQQRVSKTKTDNNNSNFTWTGASKYNLNGRESIINPGTAMASHKDDKDKFFPMSGVMIFGKESAGASNTALDNVMITDEEEIKATNPVATERFGTVAVNLQSSSTDPATGDVHVMGALPGMVWQDRDVYLQGPIWAKIPHTDGHFHPSPLMGGFGLKHPPPQILIKNTPVPANPPAEFSATKFASFITQYSTGQVSVEIEWELQKENSKRWNPEVQYTSNYAKSANVDFTVDNNGLYTEPRPIGTRYLTRPL

SEQ ID NO: 2033 - protein, 736 aa, Artificial Sequence
  Description of Artificial Sequence: Synthetic polypeptide
MAADGYLPDWLEDNLSEGIREWWALKPGAPKPKANQQKQDDGRGLVLPGYKYLGPFNGLDKGEPVNAADAAALEHDKAYDQQLKAGDNPYLRYNHADAEFQERLQEDTSFGGNLGRAVFQAKKRLLEPLGLVEEAAKTAPGKKRPVEQSPQEPDSSSGIGKTGQQPAKKRLNFGQTGDSESVPDPQPIGEPPATPAAVGPTTMASGGGAPMADNNEGADGVGNSSGNWHCDSTWLGDRVITTSTRTWALPTYNNHLYKQISSASTGASNDNHYFGYSTPWGYFDFNRFHCHFSPRDWQRLINNNWGFRPKRLNFKLFNIQVKEVTQNEGTKTIANNLTSTIQVFTDSEYQLPYVLGSAHQGCLPPFPADVFMIPQYGYLTLNNGSQAVGRSSFYCLEYFPSQMLRTGNNFTFSYTFEDVPFHSSYAHSQSLDRLMNPLIDQYLYYLSRTQTTGGTANTQTLGFSQGGPNTMANQAKNWLPGPCYRQQRVSTTTGQNNNSNFAWTAGTKYHLNGRNSLANPGIAMATHKDDKERFFPSNGILIFGKQNAARDNADYSDVMLTSEEEIKTTNPVATEEYGIVADNLQQQNTAPQIGTVNSQGALPGMVWQNRDVYLQGPIWAKIPHTDGNFHPSPLMGGFGLKHPPPQILIKNTPVPADPPTTFNQSKLNSFITQYSTGQVSVEIEWELQKENSKRWNPEIQYTSNYYKSTSVDFAVNTEGVYSDPHPIGTRYLTRPL

SEQ ID NO: 2034 - protein, 736 aa, Artificial Sequence
  Description of Artificial Sequence: Synthetic polypeptide
MAADGYLPDWLEDNLSEGIREWWALKPGAPKPKANQQEQDDGRGLVLPGYKYLGPFNGLDKGEPVNAADAAALEHDKAYDQQLKAGDNPYLRYNHADAEFQERLQEDTSFGGNLGRAVFQAKKRVLEPFGLVEEGAKTAPGKKRPVEQSPQEPDSSSGIGKTGQQPAKKRLNFGQTGDSESVPDPQPLGEPPAAPSGVGPNTMAAGGGAPMADNNEGADGVGSSSGNWHCDSTWLGDRVITTSTRTWALPTYNNHLYKQISSASTGASNDNHYFGYSTPWGYFDFNRFHCHFSPRDWQRLINNNWGFRPKRLNFKLFNIQVKEVTQNEGTKTIANNLTSTIQVFTDSEYQLPYVLGSAHQGCLPPFPADVFMIPQYGYLTLNNGSQAVGRSSFFCLEYFPSQMLRTGNNFTFSYTFEDVPFHSSYAHSQSLDRLMNPLIDQYLYYLSRTQTTGGTANTQTLGFSQGGPNTMANQAKNWLPGPCYRQQRVSTTTGQNNNSNFAWTAGTKYHLNGRNSLANPGIAMATHKDDKERFFPSNGILIFGKQNAARDNADYSDVMLTSEEEIKTTNPVATEEYGIVADNLQQQNTAPQIGTVNSQGALPGMVWQNRDVYLQGPIWAKIPHTDGNFHPSPLMGGFGLKHPPPQILIKNTPVPADPPTTFNQSKLNSFITQYSTGQVSVEIEWELQKENSKRWNPEIQYTSNYYKSTSVDFAVNTEGVYSEPHPIGTRYLTRPL

SEQ ID NO: 2035 - protein, 736 aa, Artificial Sequence
  Description of Artificial Sequence: Synthetic polypeptide
MAADGYLPDWLEDNLSEGIREWWDLKPGAPKPKANQQKQDDGRGLVLPGYKYLGPFNGLDKGEPVNAADAAALEHDKAYDQQLKAGDNPYLRYNHADAEFQERLQEDTSFGGNLGRAVFQAKKRVLEPLGLVEEGAKTAPGKKRPVEQSPQEPDSSSGIGKTGQQPAKKRLNFGQTGDSESVPDPQPLGEPPATPAAVGPTTMASGGGAPMADNNEGADGVGNASGNWHCDSTWLGDRVITTSTRTWALPTYNNHLYKQISSASTGASNDNHYFGYSTPWGYFDFNRFHCHFSPRDWQRLINNNWGFRPKRLNFKLFNIQVKEVTTNDGVTTIANNLTSTVQVFSDSEYQLPYVLGSAHQGCLPPFPADVFMIPQYGYLTLNNGSQAVGRSSFYCLEYFPSQMLRTGNNFTFSYTFEDVPFHSSYAHSQSLDRLMNPLIDQYLYYLNRTQNQSGSAQNKDLLFSRGSPAGMSVQPKNWLPGPCYRQQRVSKTKTDNNNSNFTWTGASKYNLNGRESIINPGTAMASHKDDKDKFFPMSGVMIFGKESAGASNTALDNVMITDEEEIKATNPVATERFGTVAVNLQNSSTDPATGDVHVMGALPGMVWQDRDVYLQGPIWAKIPHTDGHFHPSPLMGGFGLKHPPPQILIKNTPVPANPPAEFSATKFASFITQYSTGQVSVEIEWELQKENSKRWNPEVQYTSNYAKSANVDFTVDNNGLYTVPRPIGTRYLTRPL

SEQ ID NO: 2036 - protein, 736 aa, Artificial Sequence
  Description of Artificial Sequence: Synthetic polypeptide
MAADGYLPDWLEDNLSEGIREWWALKPGAPKPKANQQKQDDGRGLVLPGYKYLGPFNGLDKGEPVNAADAAALEHDKAYDQQLKAGDNPYLRYNHADAEFQERLQEDTSFGGNLGRAVFQAKKRLLEPLGLVEEGAKTAPGKKRPVEQSPQEPDSSSGIGKTGEQPAKKRLNFGQTGDSESVPDPQPLGEPPATPAAVGPTTMASGGGAPMADNNEGADGVGSASGNWHCDSTWLGDRVITTSTRTWALPTYNNHLYKQISSASTGASNDNHYFGYSTPWGYFDFNRFHCHFSPRDWQRLINNNWGFRPKRLNFKLFNIQVKEVTDNNGVKTIANNLTSTIQVFTDSEYQLPYVLGSAHQGCLPPFPADVFMIPQYGYLTLNNGSQAVGRSSFYCLEYFPSQMLRTGNNFPFSYTFEDVPFHSSYAHSQSLDRLMNPLIDQYLYYLSRTQTTGGTANTQTLGFSQGGPNTMANQAKNWLPGPCYRQQRVSTTTGQNNNSNFAWTAGTKYHLNGRNSLANPGIAMATHKDDKERFFPSNGILIFGKQNAARDNADYSDVMLTSEEEIKTTNPVATEEYGIVADNLQQQNTAPQIGTVNSQGALPGMVWQNRDVYLQGPIWAKIPHTDGNFHPSPLMGGFGLKHPPPQILIKNTPVPADPPTTFNQSKLNSFITQYSTGQVSVEIEWELQKENSKRWNPEIQYTSNYYKSTSVDFAVNTEGVYSEPHPIGTRYLTRPL

SEQ ID NO: 2037 - protein, 736 aa, Artificial Sequence
  Description of Artificial Sequence: Synthetic polypeptide
MAADGYLPDWLEDNLSEGIREWWALKPGAPKPKANQQKQDDGRGLVLPGYKYLGPFNGLDKGEPVNAADAAALEHDKAYDQQLKAGDNPYLRYNHADAEFQERLQEDTSFGGNLGRAVFQAKKRVLEPLGLVEEGAKTAPGKKRPVEQSPQEPDSSSGIGKTGQQPAKKRLNFGQTGDSESVPDPQPLGEPPATPAAVGPTTMASGGGAPMADNNEGADGVGSSSGNWHCDSQWLGDRVITTSTRTWALPTYNNHLYKQISSASTGASNDNHYFGYSTPWGYFDFNRFHCHFSPRDWQRLINNNWGFRPKRLNFKLFNIQVKEVTDNNGVKTIANNLTSTVQVFTDSEYQLPYVLGSAHQDCLPPFPADVFMIPQYGYLTLNNGSQAVGRSSFYCLEYFPSQMLRTGNNFTFSYTFEDVPFHSSYAHSQSLDRLMNPLIDQYLYYLSRTQTTGGTANTQTLGFSQGGPNTMANQAKNWLPGPCYRQQRVSTTTGQNNNSNFAWTAGTKYHLNGRNSLANPGIAMATHKDDKERFFPSNGILIFGKQNAARDNADYSDVMLTSEEEIKTTNPVATEEYGIVADNLQQQNTAPQIGTVNSQGALPGMVWQNRDVYLQGPIWAKIPHTDGNFHPSPLMGGFGLKHPPPQILIKNTPVPADPPTTFNQSKLNSFITQYSTGQVSVEIEWELQKENSKRWNPEIQYTSNYYKSTSVDFAVNTEGVYSEPHPIGTRYLTRPL

SEQ ID NO: 2038 - protein, 735 aa, Artificial Sequence
  Description of Artificial Sequence: Synthetic polypeptide
MAADGYLPDWLEDNLSEGIREWWDLKPGAPKPKANQQKQDDGRGLVLPGYKYLGPFNGLDKGEPVNAADAAALEHDKAYDQQLKAGDNPYLRYNHADAEFQERLQEDTSFGGNLGRAVFQAKKRVLEPLGLVEEGAKTAPGKKRPVEQSPQEPDSSSGIGKTGQQPAKKRLNFGQTGDSESVPDPQPLGEPPATPAAVGPTTMASGGGAPMADNNEGADGVGNASGNWHCDSTWLGDVITTSTRTWALPTYNNHLYKQISSASTGASNDNHYFGYSTPWGYFDFNRFHCHFSPRDWQRLINNNWGFRPKRLNFKLFNIQVKEVTQNEGTKTIANNLTSTIQVFTDSEYQLPYVLGSAHQGCLPPFPADVFMIPQYGYLTLNNGSQAVGRSSFYCLEYFPSQMLRTGNNFQFTYTFEDVPFHSSYAHSQSLDRLMNPLIDQYLYYLSRTQTTGGTANTQTLGFSQGGPNTMANQAKNWLPGPCYRQQRVSTTTGQNNNSNFAWTAGTKYHLNGRNSLANPGIAMATHKDDKERFFPSNGILIFGKQNAARDNADYSDVILTSEEEIKTTNPVATEEYGIVADNLQQQNTAPQIGTVNSQGALPGMVWQNRDVYLQGPIWAKIPHTDGNFHPSPLMGGFGLKHPPPQILIKNTPVPADPPTTFNQSKLNSFITQYSTGQVSVEIEWELQKENSKRWNPEIQYTSNYYKSTSVDFAVNTEGVYSEPHPIGTRYLTRPL

SEQ ID NO: 2039 - protein, 736 aa, Artificial Sequence
  Description of Artificial Sequence: Synthetic polypeptide
MAADGYLPDWLEDTLSEGIRQWWKLKPGPPPPKPAERHKDDSRGLVLPGYKYLGPFNGLDKGEPVNEADAAALEHDKAYDRQLDSGDNPYLKYNHADAEFQERLKEDTSFGGNLGRAVFQAKKRVLEPFGLVEEGAKTAPGKKRPVEQSPQEPDSSSGIGKTGQQPAKKRLNFGQTGDSESVPDPQPLGEPPATPAAVGPTTMASGGGAPMADNNEGADGVGNASGNWHCDSTWLGDRVITTSTRTWALPTYNNHLYKQISSTSTGASNDNHYFGYSTPWGYFDFNRFHCHFSPRDWQRLINNNWGFRPKRLNFKLFNIQVKEVTDNNGVKTIANNLTSTVQVFTDSEYQLPYVLGSAHQGCLPPFPADVFMIPQYGYLTLNNGSQAVGRSSFYCLEYFPSQMLRTGNNFTFSYTFEDVPFHSSYAHSQSLDRLMNPLIDQYLYYLSRTQTTGGTANTQTLGFSQGGPNTMANQAKNWLPGPCYRQQRVSTTTGQNNNSNFAWTAGTKYHLNGRNSLANPGIAMATHKDDKERFFPSNGILIFGKQNAARDNADYSDVMLTSEEEIKTTNPVATEEYGIVADNLQQQNTAPQIGTVNSQGALPGMVWQNRDVYLQGPIWAKIPHTDGNFHPSPLMGGFGLKHPPPQILIKNTPVPADPPTTFNQSKLNSFITQYSTGQVSVEIEWELQKENSKRWNPEIQYTSNYYKSTSVDFAVNTEGVYSEPHPIGTRYLTRPL

SEQ ID NO: 2040 - protein, 735 aa, Artificial Sequence
  Description of Artificial Sequence: Synthetic polypeptide
MAADGYLPDWLEDNLSEGIREWWDLKPGAPKPKANQQKQDDGRGLVLPGYKYLGPFNGLDKGEPVNAADAAALEHDKAYDRQLDSGDNPYLRYNHADAEFQERLKEDTSFGGNLGRAVFQAKKRVLEPFGLVEEGAKTAPGKKRPVEQSPQEPDSSSGIGKTGQQPAKKRLNFGQTGDSESVPDPQPLGEPPATPAAVGPTTMASGGGAPMADNNEGADGVGNASGNWHCDSTWLGDRVITTSTRTWALPTYNNHLYKQISSASTGASNDNHYFGYSTPWGYFDFNRFHCHFSPRDWQRLINNNWGFRPKRLNFKLFNIQVKEVTQNEGTKTIANNLTSTIQVFTDSEYQLPYVLGSAHQGCLPPFPADVFMIPQYGYLTLNNGSQAVGRSSFYCLEYFPSQMLRTGNNFQFTYTFEDVPFHSSYAHSQSLDRLMNPLIDQYLYYLSRTQTTGGTANTQTLGFSQGGPNTMANQAKNWLPGPCYRQQRVSTTTGQNNNSNFAWTAGTKYHLNGRNSLANPGIAMATHKDDRSVFFQYRDPDFGKQNAARDNADYSDVMLTSEEEIKTTNPVATEEYGIVADNLQQQNTAPQIGTVNSQGALPGMVWQNRDVYLQGPIWAKIPHTDGNFHPSPLMGGFGLKHPPPQILIKNTPVPADPPTTFNQSKLNSFITQYSTGQVSVEIEWELQKENSKRWNPEIQYTSNYYKSTSVDFAVNTEGVYSEPHPIGTRYLTRPL

SEQ ID NO: 2041 - protein, 736 aa, Artificial Sequence
  Description of Artificial Sequence: Synthetic polypeptide
MAADGYLPDWLEDNLSEGIREWWALKPGAPKPKANQQKQDDGRGLVLPGYKYLGPFNGLDKGEPVNAADAAALEHDKAYDQQLKAGDNPYLKYNHADAEFQERLQGDTSFGGNLGRAVFQAKKRVLEPLGLVEEAAKTAPGKKRPVEQSPQEPDSSAGIGKSGAQPAKKRLNFGQTGDTESVPDPQPLGEPPAAPSGVGPNTMAAGGGAPMADNNEGADGVGSSSGNWHCDSQWLGDRVITTSTRTWALPTYNNHLYKQISSASTGASNDNHYFGYSTPWGYFDFNRFHCHFSPRDWQRLINNNWGFRPKRLNFKLFNIQVKEVTDNNGVKTIANNLTSTVQVFTDSDYQLPYVLGSAHEGCLPPFPADVFMIPQYGYLTLNNGSQAVGRSSFYCLEYFPSQMLRTGNNFQFTYTFEDVPFHSSYAHSQSLDRLMNPLIDQYLYYLSRTQTTGGTANTQTLGFSQGGPNTMANQAKNWLPGPCYRQQRVSTTTGQNNNSNFAWTAGTKYHLNGRNSLANPGIAMATHKDDKERFFPSNGILIFGKQNAARDNADYSDVMLTSEEEIKTTNPVATEEYGIVADNLQQQNTAPQIGTVNSQGALPGMVWQNRDVYLQGPIWAKIPHTDGNFHPSPLMGGFGLKHPPPQILIKNTPVPADPPTTFNQSKLNSFITQYSTGQVSVEIEWELQKENSKRWNPEIQYTSNYYKSTSVDFAVNTEGVYSEPHPIGTRYLTRPL

SEQ ID NO: 2042 - protein, 736 aa, Artificial Sequence
  Description of Artificial Sequence: Synthetic polypeptide
MAADGYLPDWLEDTLSEGIRQWWKLKPGPPPPKPAERHKDDSRGLVLPGYKYLGPFNGLDKGEPVNEADAAALEHDKAYDRQLDSGDNPYLKYNHADAEFQERLKEDTSFGGNLGRAVFQAKKRVLEPFGLVEEAAKTAPGKKRPVEQSPQEPDSSSGIGKTGQQPAKKRLNFGQTGDSESVPDPQPLGEPPATPAAVGPTTMASGGGAPMADNNEGADGVGNASGNWHCDSTWLGDRVITTSTRTWALPTYNNHLYKQISSASTGASNDNHYFGYSTPWGYFDFNRFHCHFSPRDWQRLINNNWGFRPKRLNFKLFNIQVKEVTDNNGVKTIANNLTSTVQVFTDSDYQLPYVLGSAHEGCLPPFPADVFMIPQYGYLTLNNGSQAVGRSSFYCLEYFPSQMLRTGNNFTFSYTFEDVPFHSSYAHSQSLDRLMNPLIDQYLYYLSRTQTTGGTANTQTLGFSQGGPNTMANQAKNWLPGPCYRQQRVSTTTGQNNNSNFAWTAGTKYHLNGRNSLANPGIAMATHKDDKERFFPSNGILIFGKQNAARDNADYSDVMLTSEEEIKTTNPVATEEYGIVADNLQQQNTAPQIGTVNSQGALPGMVWQNRDVYLQGPIWAKIPHTDGNFHPSPLMGGFGLKHPPPQILIKNTPVPADPPTTFNQSKLNSFITQYSTGQVSVEIEWELQKENSKRWNPEIQYTSNYYKSTSVDFAVNTEGVYSEPHPIGTRYLTRPL

SEQ ID NO: 2043 - protein, 736 aa, Artificial Sequence
  Description of Artificial Sequence: Synthetic polypeptide
MAADGYLPDWLEDNLSEGIREWWALKPGAPKPKANQQKQDDGRGLVLPGYKYLGPFNGLDKGEPVNAADAAALEHDKAYDQQLKAGDNPYLRYNHADAEFQERLQEDTSFGGNLGRAVFQAKKRVLEPLGLVEEGAKTAPGKKRPVEQSPQEPDSSSGIGKTGQQPAKKRLNFGQTGDSESVPDPQPLGEPPATPAAVGPTTMASGGGAPMADNNEGADGVGSSSGNWHCDSTWLGDRVITTSTRTWALPTYNNHLYKQISSASTGASNDNHYFGYSTPWGYFDFNRFHCHFSPRDWQRLINNNWGFRPKRLNFKLFNIQVKEVTDNNGVKTIANNLTSTVQVFTDSEYQLPYVLGSAHQGCLPPFPADVFMIPQYGYLTLNNGSQAVGRSSFYCLEYFPSQMLRTGNNFTFSYTFEDVPFHSSYAHSQSLDRLMNPLIDQYLYYLSRTQTTGGTANTQTLGFSQGGPNTMANQAKNWLPGPCYRQQRVSTTTGQNNNSNFAWTAGTKYHLNGRNSLANPGIAMATHKDDKERFFPSNGILIFGKQNAARDNADYSDVMLTSEEEIKTTNPVATEEYGIVADNLQQQNTAPQIGTVNSQGALPGMVWQNRDVYLQGPIWAKIPHTDGNFHPSPLMGGFGLKHPPPQILIKNTPVPADPPTTFNQSKLNSFITQYSTGQVSVEIEWELQKENSKRWNPEIQYTSNYYKSTSVDFAVNTEGVYSEPHPIGTRYLTRPL

SEQ ID NO: 2044 - protein, 737 aa, Artificial Sequence
  Description of Artificial Sequence: Synthetic polypeptide
MAADGYLPDWLEDNLSEGIREWWALKPGAPKPKANQQKQDDGRGLVLPGYKYLGPFNGLDKGEPVNAADAAALEHDKAYDQQLKAGDNPYLRYNHADAEFQERLQEDTSFGGNLGRAVFQAKKRVLEPLGLVEEGAKTAPGKKRPVEQSPQEPDSSSGIGKTGQQPAKKRLNFGQTGDTESVPDPQPIGEPPAAPSGVGSLTMASGGGAPVADNNEGADGVGSSSGNWHCDSQWLGDRVITTSTRTWALPTYNNHLYKQISNSTSGGSSNDNAYFGYSTPWGYFDFNRFHCHFSPRDWQRLINNNWGFRPKRLNFKLFNIQVKEVTQNEGTKTIANNLTSTIQVFTDSEYQLPYVLGSAHQGCLPPFPADVFMIPQYGYLTLNNGSQAVGRSSFYCLEYFPSQMLRTGNNFQFTYTFEDVPFHSSYAHSQSLDRLMNPLIDQYLYYLSRTQTTGGTANTQTLGFSQGGPNTMANQAKNWLPGPCYRQQRVSTTTGQNNNSNFAWTAGTKYHLNGRNSLANPGIAMATHKDDKERFFPSNGILIFGKQNAARDNADYSDVMLTSEEEIKTTNPVATEEYGIVADNLQQQNTAPQIGTVNSQGALPGMVWQNRDVYLQGPIWAKIPHTDGNFHPSPLMGGFGLKHPPPQILIKNTPVPADPPTTFNQSKLNSFITQYSTGQVSVEIEWELQKENSKRWNPEIQYTSNYYKSTSVDFAVNTEGVYSEPHPIGTRYLTRPL

SEQ ID NO: 2045 - protein, 736 aa, Artificial Sequence
  Description of Artificial Sequence: Synthetic polypeptide
MAADGYLPDWLEDNLSEGIREWWALKPGAPKPKANQQKQDDGRGLVLPGYKYLGPFNGLDKGEPVNAADAAALEHDKAYDQQLKAGDNPYLKYNHADAEFQERLQGDTSFGGNLGRAVFQAKKRVLEPLGLVEEAAKTAPGKKRPVEQSPQEPDSSAGIGKSGAQPAKKRLNFGQTGDTESVPDPQPLGEPPAAPSGVGPNTMAAGGGAPMADNNEGADGVGSSSGNWHCDSQWLGDRVITTSTRTWALPTYNNHLYKQISSASTGASNDNHYFGYSTPWGYFDFNRFHCHFSPRDWQRLINNNWGFRPKRLNFKLFNIQVKEVTDNNGVKTIANNLTSTVQVFTDSEYQLPYVLGSAHQGCLPPFPADVFMIPQYGYLTLNNGSQAVGRSSFYCLEYFPSQMLRTGNNFTFSYTFEDVPFHSSYAHSQSLDRLMNPLIDQYLYYLSRTQTTGGTANTQTLGFSQGGPNTMANQAKNWLPGPCYRQQRVSTTTGQNNNSNFAWTAGTKYHLNGRNSLANPGIAMATHKDDKERFFPSNGILIFDKQNAARDNADYSDVMLTSEEEIKTTNPVATEEYGIVADNLQQQNTAPQIGTVNSQGALPGMVWQNRDVYLQGPIWAKIPHTDGNFHPSPLMGGFGLKHPPPQILIKNTPVPADPPTTFNQSKLNSFITQYSTGQVSVEIEWELQKENSKRWNPEIQYTSNYYKSTSVDFAVNTEGVYSEPHPIGTRYLTRPL

SEQ ID NO: 2046 - protein, 736 aa, Artificial Sequence
  Description of Artificial Sequence: Synthetic polypeptide
MAADGYLPDWLEDTLSEGIRQWWKLKPGPPPPKPAERHKDDSRGLVLPGYKYLGPFNGLDKGEPVNEADAAALEHDKAYDRQLDSGDNPYLKYNHADAEFQERLKEDTSFGGNLGRAVFQAKKRVLEPLGLVEEPVKTAPGKKRPVEHSPVEPDSSSGTGKAGQQPARKRLNFGQTGDSESVPDPQPLGEPPATPAAVGPNTMATGSGAPMADNNEGADGVGNSSGNWHCDSTWMGDRVITTSTRTWALPTYNNHLYKQISSASTGASNDNHYFGYSTPWGYFDFNRFHCHFSPRDWQRLINNNWGFRPKRLNFKLFNIQVKEVTDNNGVKTIANNLTSTIQVFTDSEYQLPYVLGSAHQGCLPPFPADVFMIPQYGYLTLNNGSQAVGRSSFYCLEYFPSQMLRTGNNFTFSYTFEDVPFHSSYAHSQSLDRLMNPLIDQYLYYLSRTQTTGGKANTQTLGFSQGGPNTMANQAKNWLPGPCYRQQRVSTTTGQNNNSNFAWTAGTKYHLNGRNSLANPGIAMATHKDDKERFFPSNGILIFGKQNAARDNADYSDVMLTSEEEIKTTNPVATEEYGIVADNLQQQNTAPQIGTVNSQGALPGMVWQNRDVYLQGPIWAKIPHTDGNFHPSPLMGGFGLKHPPPQILIKNTPVPADPPTTFNQSKLNSFITQYSTGQVSVEIEWELQKENSKRWNPEIQYTSNYYKSTSVDFAVNTEGVYSEPHPIGTRYLTRPL

SEQ ID NO: 2047 - protein, 736 aa, Artificial Sequence
  Description of Artificial Sequence: Synthetic polypeptide
MAADGYLPDWLEDNLSEGIREWWALKPGAPKPKANQQKQDDGRGLVLPGYKYLGPFNGLDKGEPVNAADAAALEHDKAYDQQLKAGDNPYLRYNHADAEFQERLQEDTSFGGNLGRAVFQAKKRVLEPFGLVEEGAKTAPGKKRPVEQSPQEPDSSSGIGKTGQQPAKKRLNFGQTGDSESVPDPQPLGEPPATPAAVGPTTMASGGGAPMADNNEGADGVGNASGNWHCDSTWLGDRVITTSTRTWALPTYNNHLYKQISSASTGASNDNHYFGYSTPWGYFDFNRFHCHFSPRDWQRLINNNWGFRPKRLNFKLFNIQVKEVTDNNGVKTIANNLTSTVQVFTDSEYQLPYVLGSAHQGCLPPFPADVFMIPQYGYLTLNNGSQAVGRSSFYCLEYFPSQMLRTGNNFTFSYTFEDVPFHSSYAHSQSLDRLMNPLIDQYLYYLSRTQTTGGTGNTQTLGFSQGGPNTMANQAKNWLPGPCYRQQRVSTTTGQNNNSNFAWTAGTKYHLNGRNSLANPGIAMATHKDDKERFFPSNGILIFGKQNAARDNADYSDVMLTSEEEIKTTNPVATEEYGIVADNLQQQNTAPQIGTVNSQGALPGMVWQNRDVYLQGPIWAKIPHTDGNFHPSPLMGGFGLKHPPPQILIKNTPVPADPPTTFNQSKLNSFITQYSTGQVSVEIEWELQKENSKRWNPEIQYTSNYYKSTSVDFAVNTEGVYSEPHPIGTRYLTRPL

SEQ ID NO: 2048 - protein, 736 aa, Artificial Sequence
  Description of Artificial Sequence: Synthetic polypeptide
MAADGYLPDWLEDNLSEGIREWWDLKPGAPKPKANQQKQDDGRGLVLPGYKYLGPFNGLDKGEPVNAADAAALEHDKAYDQQLKAGDNPYLRYNHADAEFQERLQEDTSFGGNLGRAVFQAKKRVLEPLGLVEEGAKTAPGKKRPVEQSPQEPDSSSGIGKTGQQPAKKRLNFGQTGDSESVPDPQPLGEPPATPAAVGPTTMASGGGAPMADNNEGADGVGSSSGNWHCDSTWLGDRVITTSTRTWALPTYNNHLYKQISSASTGASNDNHYFGYSTPWGYFDFNRFHCHFSPRDWQRLINNNWGFRPKRLNFKLFNIQVKEVTQNEGTKTIANNLTSTIQVFTDSEYQLPYVLGSAHQGCLPPFPADVFMIPQYGYLTLNNGSQAVGRSSFYCLEYFPSQMLRTGNNFTFSYTFEDVPFHSSYAHSQSLDRLMNPLIDQYLYYLSRTQTTGGTANTQTLGFSQGGPNTMANQAKNWLPGPCYRQQRVSTTTGQNNNSNFAWTAGTKYHLNGRNSLANPGIAMATHKDDKERFFPSNGILIFGKQNAARDNADYSDVMLTSEEEIKTTNPVATEEYGIVADNLQQQNTAPQIGTVNSQGALPGMVWQNRDVYLQGPIWAKIPHTDGNFHPSPLMGGFGLKHPPPQILIKNTPVPADPPTTFNQSKLNSFITQYSTGQVSVEIEWELQKENSKRWNPEIQYTSNYYKSTSVDFAVNTEGVYSEPHPIGTRYLTRPL

SEQ ID NO: 2049 - protein, 736 aa, Artificial Sequence
  Description of Artificial Sequence: Synthetic polypeptide
MAADGYLPDWLEDNLSEGIREWWALKPGAPKPKANQQKQDDGRGLVLPGYKYLGPFNGLDKGEPVNAADAAALEHDKAYDQQLKAGDNPYLRYNHADAEFQERLQEDTSFGGNLGRAVFQAKKRVLEPLGLVEEGAKTAPGKKRPVEQSPQEPDSSSGIGKTGQQPAKKRLNFGQTGDSESVPDPQPLGEPPATPAAVGPTTMAAGGGAPMADNNEGADGVGSSSGNWHCDSTWMGDRVITTSTRTWALPTYNNHLYKQISSASTGASNDNHYFGYSTPWGYFDFNRFHCHFSPRDWQRLINNNWGFRPKRLSFKLFNIQVKEVTQNEGTKTIANNLTSTIQVFTDSEYQLPYVLGSAHQGCLPPFPADVFMIPQYGYLTLNNGSQAVGRSSFYCLEYFPSQMLRTGNNFTFSYTFEDVPFHSSYAHSQSLDRLMNPLIDQYLYYLSRTQTTGGTANTQTLGFSQGGPNTMANQAKNWLQGPCYRQQRVSTTTGQNNNSNFAWTAGTKYHLNGRNSLANPGIAMATHKDDKERFFPSNGILIFGKQNAARDNADYSDVMLTSEEEIKTTNPVATEEYGIVADNLQQQNTAPQIGTVNSQGALPGMVWQNLDVYLQGPIWAKIPHTDGNFHPSPLMGGFGLKHPPPQILIKNTPVPADPPTTFNQSKLNSFITQYSTGQVSVEIEWELQKENSKRWNPEIQYTSNYYKSTSVDFAVNTEGVYSEPHPIGTRYLTRPL

SEQ ID NO: 2050 - protein, 737 aa, Artificial Sequence
  Description of Artificial Sequence: Synthetic polypeptide
MAADGYLPDWLEDNLSEGIREWWALKPGAPKPKANQQKQDDGRGLVLPGYKYLGPFNGLDKGEPVNAADAAALEHDKAYDQQLKAGDNPYLRYNHADAEFQERLQEDTSFGGNLGRAVFQAKKRVLEPLGLVEEGAKTAPGKKRPVEPSPQRSPDSSSGIGKTGQQPAKKRLNFGQTGDSESVPDPQPLGEPPATPAAVGPTTMASGGGAPMADNNEGADGVGNASGNWHCDSQWLGDRVITTSTRTWALPTYNNHLYKQISSASTGASNDNHYFGYSTPWGYFDFNRFHCHFSPRDWQRLINNNWGFRPKRLNFKLFNIQVKEVTDNNGVKTIANNLTSTVQVFTDSDYQLPYVLGSAHEGCLPPFPADVFMIPQYGYLTLNNGSQAVGRSSFYCLEYFPSQMLRTGNNFQFTYTFEDVPFHSSYAHSQSLDRLMNPLIDQYLYYLSRTQTTGGTANTQTLGFSQGGPNTMANQAKNWVPGPCYRQQRVSTATGQNNNSNFAWTAGTKYHLKGRNSLANPGIAMATHKDDKERFFPSNGILIFGKQNAARDNADYSDVMLTSEEEIKTTNPVATEEYGIVADNLQQQNTAPQIGTVNSQGALPGMVWQNRDVYLQGPIWAKIPHTDGNFHPSPLMGGFGLKHPPPQILIKNTPVPADPPTTFNQSKLNSFITQYSTGQVSVEIEWELQKENSKRWNPEIQYTSNYYKSTSVDFAVNTEGVYSEPHPIGTRYLTRPL

SEQ ID NO: 2051 - protein, 737 aa, Artificial Sequence
  Description of Artificial Sequence: Synthetic polypeptide
  MOD_RES (226)..(226): Xaa can be any naturally occurring amino acid
  MOD_RES (233)..(233): Xaa can be any naturally occurring amino acid
  MOD_RES (239)..(239): Xaa can be any naturally occurring amino acid
  MOD_RES (250)..(250): Xaa can be any naturally occurring amino acid
  MOD_RES (253)..(253): Xaa can be any naturally occurring amino acid
  MOD_RES (255)..(255): Xaa can be any naturally occurring amino acid
MAADGYLPDWLEDTLSEGIRQWWKLKPGPPPPKPAERHKDDSRGLVLPGYKYLGPFNGLDKGEPVNEADAAALEHDKAYDRQLDSGDNPYLKYNHADAEFQERLKEDTSFGGNLGRAVFQAKKRVLEPLGLVEEGAKTAPGKKRPVEQSPQEPDSSSGIGKTGQQPAKKRLNFGQTGDSESVPDPQPLGEPPATPSGVGPNTMAAGGGAPMADNNEGADGVGSSSXNWHCDSXWLGDRXITTSTRTWALXTYXNXLYKQISNSTSGGATNDNTYFGYSTPWGYFDFNRFHCHFSPRDWQRLINNNWGFRPKRLNFKLFNIQVKEVTQNEGTKTIANNLTSTIQVFTDSEYQLPYVLGSAHQGCLPPFPADVFMIPQYGYLTLNNGSQAVGRSSFYCLEYFPSQMLRTGNNFQFTYTFEDVPFHSSYAHSQSLDRLMNPLIDQYLYYLSRTQTTGGTANTQTLGFSQGGPNTMANQAKNWLPGPCYRQQRVSTTTGQNNNSNFAWTAGTKYHLNGRNSLANPGIAMATHKDDKERFFPSNGILIFGKQNAARDNADYSDVMLTSEEEIKTTNPVATEEYGIVADNLQQQNTAPQIGTVNSQGALPGMVWQNRDVYLQGPIWAKIPHTDGNFHPSPLMGGFGLKHPPPQILIKNTPVPADPPTTFSQAKLASFITQYSTGQVSVEIEWELQKENSKRWNPEVQYTSNYAKSANVDFTVDNNGLYTEPRPIGTRYLTRPL

SEQ ID NO: 2052 - protein, 737 aa, Artificial Sequence
  Description of Artificial Sequence: Synthetic polypeptide
MAADGYLPDWLEDNLSEGIREWWDLKPGAPKPKANQQKQDDGRGLVLPGYKYLGPFNGLDKGEPVNAADAAALEHDKAYDQQLKAGDNPYLRYNHADAEFQERLQEDTSFGGNLGRAVFQAKKRVLEPLGLVEEGAKTAPGKKRPVEPSPQRSPDSSTGIGKKGQQPAKKRLNFGQTGDSESVPDPQPIGEPPAGPSGVGSLTMASGGGAPVADNNEGADGVGSSSGNWHCDSQWLGDRVITTSTRTWALPTYNNHLYKQISSASTGASNDNHYFGYSTPWGYFDFNRFHCHFSPRDWQRLINNNWGFRPKRLNFKLFNIQVKEVTDNDGVKTIANNLTSTIQVFTDSEYQLPYVLGSAHQGCLPPFPADVFMIPQYGYLTLNNGSQAVGRSSFYCLEYFPSQMLRTGNNFTFSYTFEDVPFHSSYAHSQSLDRLMNPLIDQYLYYLSRTQTTGGTANTQTLGFSQGGPNTMANHAKNWLPGPCYRQQRVSTTTGQNNNSNFAWTAGTKYHLNGRNSLANPGIAMATHKDDKERFFPSNGILIFGKQNAARDNADYSDVMLTSEEEIKTTNPVATEEYGIVADNLQQQNTAPQIGTVNSQGALPGMVWQNRDVYLQGPIWAKIPHTDGNFHPSPLMGGFGLKHPPPQILIKNTPVPADPPTTFNQSKLNSFITQYSTGQVSVEIEWELQKENSKRWNPEIQYTSNYYKSTSVDFAVNTEGVYSEPHPIGTRYLTRPL

SEQ ID NO: 2053 - protein, 736 aa, Artificial Sequence
  Description of Artificial Sequence: Synthetic polypeptide
MAADGYLPDWLEDTLSEGIRQWWKLKPGPPPPKPAERHKDDSRGLVLPGYKYLGPFNGLDKGEPVNEADAAALEHDKAYDRQLDSGDNPYLKYNHADAEFQERLKEDTSFGGNLGRAVFQAKKRVLEPLGLVEEPVKTAPGKKRPVEHSPVEPDSSSGTGKAGQQPAKKRLNFGQTGDSESVPDPQPLGEPPATPAAVGPTTMASGGGAPMADNNEGADGVGNASGNWHCDSTWLGDRVITTSTRTWALPTYNNHLYKQISSASTGASNDNHYFGYSTPWGYFDFNRFHCHFSPRDWQRLINNNWGFRPKRLNFKLFNIQVKEVTQNEGTKTIANNLTSTIQVFTDSEYQLPYVLGSAHQGCLPPFPADVFMIPQYGYLTLNNGSQAVGRSSFYCLEYFPSQMLRTGNNFQFTYTFEDVPFHSSYAHSQSLDRLMNPLIDQYLYYLSRTQTTGGTANTQTLGFSQGGPNTMANQAKNWLPGPCYRQQRVSTTTGQNNNSNFAWTAGTKYHLNGRNSLANPGIAMATHKDDKERFFPSNGILIFGKQNAARDNADYSDVMLTSEEEIKTTNPVATEEYGIVADNLQQQNTAPQIGTVNSQGALPGMVWQNRDVYLQGPIWAKIPHTDGNFHPSPLMGGFGLKHPPPQILIKNTPVPADPPTTFNQSKLNSFITQYSTGQVSVEIEWELQKENSKRWNPEIQYTSNYYKSTSVDFAVNTEGVYSEPHPIGTRYLTRPL

SEQ ID NO: 2054 - protein, 736 aa, Artificial Sequence
  Description of Artificial Sequence: Synthetic polypeptide
MAADGYLPDWLEDNLSEGIREWWALKPGAPKPKANQQKQDDGRGLVLPGYKYLGPFNGLDKGEPVNAADAAALEHDKAYDQQLQAGDNPYLRYNHADAEFQERLQGDTSFGGNLGRAVFQAKKRVLEPLGLVEEGAKTAPGKKRPVEQSPQEPDSSSGIGKTGQQPAKKRLNFGQTGDSESVPDPQPLGEPPATPAAVGPTTMASGGGAPMADNNEGADGVGNASGNWHCDSTWLGDRVITTSTRTWALPTYNNHLYKQISSASTGASNDNHYFGYSTPWGYFDFNRFHCHFSPRDWQRLINNNWGFRPKRLNFKLFNIQVKEVTDNNGVKTIANNLTSTIQVFTDSEYQLPYVLGSAHQGCLPPFPADVFMIPQYGYLTLNNGSQAVGRSSFYCLEYFPSQMLRTGNNFQFTYTFEDVPFHSSYAHSQSLDRLMNPLIDQYLYYLSRTQTTGGTANTQTLGFSQGGPNTMANQAKNWLPGPCYRQQRVSTTTGQNNNSNFAWTAGTKYHLNGRNSLANPGIAMATHKDDKERFFPSNGILIFGKQNAARDNADYSDVMLTSEEEIKTTNPVATEEYGIVADNLQQQNTAPQIGTVNSQGALPGMVWQNRDVYLQGPIWAKIPHTDGNFHPSPLMGGFGLKHPPPQILIKNTPVPADPPTTFNQSKLNSFITQYSTGQVSVEIEWELQKENSKRWNPEIQYTSNYYKSTSVDFAVNTEGVYSEPHPIGTRYLTRPL

SEQ ID NO: 2055 - protein, 738 aa, Artificial Sequence
  Description of Artificial Sequence: Synthetic polypeptide
MAADGYLPDWLEDTLSEGIRQWWKLKPGPPPPKPAERHKDDSRGLVLPGYKYLGPFNGLDKGEPVNAADAAALEHDKAYDQQLKAGDNPYLRYNHADAEFQERLKEDTSFGGNLGRAVFQAKKRVLEPLGLVEEGAKTAPGKKRPVEPSPQRSPDSSTGIGKKGQQPARKRLNFGQTGDSESVPDPQPLGEPPAAPSGVGPNTMAAGGGAPMADNNEGADGVGSSSGNWHCDSQWLGDRVITTSTRTWALPTYNNHLYKQISNSTSGGSSNDNAYFGYSTPWGYFDFNRFHCHFSPRDWQRLINNNWGFRPKRLNFKLFNIQVKEVTDNNGVKTIANNLTSTVQVFTDSEYQLPYVLGSAHQGCLPPFPADVFMIPQYGYLTLNNGSQAVGRSSFYCLEYFPSQMLRTGNNFTFSYTFEDVPFHSSYAHSQSLDRLMNPLIDQYLYYLSRTQTTGGTANTQTLGFSQGGPNTMANQAKNWLPGPCYRQQRVSTTTGQNNNSNFAWTAGTKYHLNGRNSLANPGIAMATHKDDKERFFPSNGILIFGKQNAARDNADYSDVMLTSEEEIKTTNPVATEEYGIVADNLQQQNTAPQIGTVNSQGALPGMVWQNRDVYLQGPIWAKIPHTDGHFHPSPLMGGFGLKHPPPQILIKNTPVPANPPTTFNQSKLNSFITQYSTGQVSVEIEWELQKENSKRWNPEVQYTSNYAKSANVDFTVDNNGLYTEPRPIGTRYLTRPL

SEQ ID NO: 2056 - protein, 738 aa, Artificial Sequence; identical to SEQ ID NO: 2055
  Description of Artificial Sequence: Synthetic polypeptide

SEQ ID NO: 2057 - protein, 736 aa, Artificial Sequence
  Description of Artificial Sequence: Synthetic polypeptide
MAADGYLPDWLEDNLSEGIREWWALKPGAPKPKANQQKQDDGRGLVLPGYKYLGPFNGLDKGEPVNAADAAALEHDKAYDQQLKAGDNPYLRYNHADAEFQERLQEDTSFGGNLGRAVFQAKKRLLEPLGLVEEGAKTAPGKKRPVEQSPQEPDSSSGIGKTGQQPAKKRLNFGQTGDSESVPDPQPLGEPPATPAAVGPTTMASGGGAPMADNNEGADGVGNSSGNWHCDSTWMGDRVITTSTRTWALPTYNNHLYKQISSASTGASNDNHYFGYSTPWGYFDFNRFHCHFSPRDWQRLINNNWGFRPKRLNFKLFNIQVKEVTQNEGTKTIANNLTSTIQVFTDSEYQLPYVLGSAHQGCLPPFPADVFIIPQYGYLTLNNGSQAVGRSSFYCLEYFPSQMLRTGNNFTFSYTFEDVPFHSSYAHSQSLDRLMNPLIDQYLYYLSRTQTTGGTANTQTLGFSQGGPNTMANQAKNWLPGPCYRQQRVSTTTGQNNNSNFAWTAGTKYHLNGRNSLANPGIAMATHKDDKERFFPSNGILIFGKQNAARDNADYSDVMLTSEEEIKTTNPVATEEYGIVADNLQQQNTAPQIGTVNSQGALPGMVWQNRDVYLQGPIWAKIPHTDGNFHPSPLMGGFGLKHPPPQILIKNTPVPADPPTTFNQSKLNSFITQYSTGQVSVEIEWELQKENSKRWNPEIQYTSNYYKSTSVDFAVNTEGVYSEPHPIGTRYLTRPL

SEQ ID NO: 2058 - protein, 736 aa, Artificial Sequence
  Description of Artificial Sequence: Synthetic polypeptide
MAADGYLPDWLEDNLSEGIREWWALKPGAPKPKANQQKQDDGRGLVLPGYKYLGPFNGLDKGEPVNAADAAALEHDKAYDQQLKAGDNPYLRYNHADAEFQERLQEDTSFGGNLGRAVFQAKKRVLEPFGLVEEAAKTAPGKKRPVEQSPQEPDSSSGIGKTGQQPAKKRLNFGQTGDSESVPDPQPLGEPPATPAAVGPTTMASGGGAPMADNNEGADGVGNASGNWHCDSTWLGDRVITTSTRTWALPTYNNHLYKQISSASTGASNDNHYFGYSTPWGYFDFNRFHCHFSPRDWQRLINNNWGFRPKRLNFKLFNIQVKEVTQNEGTKTIANNLTSTIQVFTDSEYQLPYVLGSAHQGCLPPFPADVFMIPQYGYLTLNNGSQAVGRSSFYCLEYFPSQMLRTGNNFTFSYTFEDVPFHSSYAHSQSLDRLMNPLIDQYLYYLSRTQTTGGTANTQTLGFSQGGPNTMANHAKNWLPGPCYRQQRVSTTTGQNNNSNFAWTAGTKYHLNGRNSLANPGIAMATHKDDKERFFPSNGILIFGKQNAARDNADYSDVMLTSEEEIKTTNPVATEEYGIVADNLQQQNTAPQIGTVNSQGALPGMVWQNRDVYLQGPIWAKIPHTDGNFHPSPLMGGFGLKHPPPQILIKNTPVPADPPTTFNQSKLNSFITQYSTGQVSVEIEWELQKENSKRWNPEIQYTSNYYKSTSVDFAVNTEGVYSEPHPIGTRYLTRPL

SEQ ID NO: 2059 - protein, 736 aa, Artificial Sequence
  Description of Artificial Sequence: Synthetic polypeptide
MAADGYLPDWLEDNLSEGIREWWALKPGAPKPKANQQKQDDGRGLVLPGYKYLGPFNGLDKGEPVNEADAAALEHDKAYDQQLKAGDNPYLRYNHADAEFQERLQEDTSFGGNLGRAVFQAKKRLLEPLGLVEEAAKTAPGKKRPVEQSPQEPDSSAGIGKSGAQPAKKRLNFGQTGDSESVPDPQPLGEPPATPAAVGPTTMASGGGAPMADNNEGADGVGNASGNWHCDSTWLGDRVITTSTRTWALPTYNNHLYKQISSASTGASNDNHYFGYSTPWGYFDFNRFHCHFSPRDWQRLINNNWGFRPKRLNFKLFNIQVKEVTDNDGVKTIANNLTSTIQVFTDSEYQLPYVLGSAHQGCLPPFPADVFMIPQYGYLTLNNGSQAVGRSSFYCLEYFPSQMLRTGNNFQFTYTFEDVPFHSSYAHSQSLDRLMNPLIDQYLYYLSRTQTTGGTANTQTLGFSQGGPNTMANQAKNWLPGPCYRQQRVSTTTGQNNNSNFAWTAGTKYHLNGRNSLANPGIAMATHKDDKERFFPSNGILIFGKQNAARDNADYSDVMLTSEEEIKTTNPVATEEYGIVADNLQQQNTAPQIGTVNSQGALPGMVWQNRDVYLQGPIWAKIPHTDGNFHPSPLMGGFGLKHPPPQILIKNTPVPADPPTTFNQSKLNSFITQYSTGQVSVEIEWELQKENSKRWNPEIQYTSNYYKSTSVDFAVNTEGVYSEPHPIGTRYLTRPL

SEQ ID NO: 2060 - protein, 736 aa, Artificial Sequence
  Description of Artificial Sequence: Synthetic polypeptide
MAADGYLPDWLEDNLSEGIREWWALKPGAPKPKANQQKQDDGRGLVLPGYKYLGPFNGLDKGEPVNAADAAALEHDKAYDQQLKAGDNPYLRYNHADAEFQERLQEDTSFGGNLGRAVFQAKKRVLEPLGLVEEGAKTAPGKKRPVEQSPQEPDSSAGIGKTGAQPAKKRLNFGQTGDSESVPDPQPLGEPPATPAAVGPTTMASGGGAPMADNNEGADGVGSASGNWHCDSTWLGDRVITTSTRTWALPTYNNHLYKQISSASTGASNDNHYFGYSTPWGYFDFNRFHCHFSPRDWQRLINNNWGFRPKRLNFKLFNIQVKEVTDNNGVKTIANNLTSTIQVFTDSEYQLPYVLGSAHQGCLPPFPADVFMIPQYGYLTLNNGSQAVGRSSFYCLEYFPSQMLRTGNNFTFSYTFEDVPFHSSYAHSQSLDRLMNPLIDQYLYYLSRTQTTGGTANTQTLGFSQGGPNTMANQAKNWLPGPCYRQQRVSTTTGQNNNSNFAWTAGTKYHLNGRNSLANPGIAMATHKDDKERFFPSNGILIFGKQNAARDNADYSDVMLTSEEEIKTTNPVATEEYGIVADNLQQQNTAPQIGTVNSQGALPGMVWQNRDVYLQGPIWAKIPHTDGNFHPSPLMGGFGLKHPPPQILIKNTPVPADPPTTFNQSKLNSFITQYSTGQVSVEIEWELQKENSKRWNPEIQYTSNYYKSTSVDFAVNTEGVYSEPHPIGTRYLTRPL

SEQ ID NO: 2061 - protein, 736 aa, Artificial Sequence
  Description of Artificial Sequence: Synthetic polypeptide
MAADGYLPDWLEDNLSEGIREWWDLKPGAPKPKANQQKQDDGRGLVLPGYKYLGPFNGLDKGEPVNAADAAALEHDKAYDQQLKAGDNPYLRYNHADAEFQERLQEDTSFGGNLGRAVFQAKKRLLEPLGLVEEAAKTAPGKKRPVEQSPQEPDSSAGIGKSGAQPAKKRLNFGQTGDTESVPDPQPIGEPPAAPSGVGPNTMAAGGGAPMADNNEGADGVGSSSGNWHCDSQWLGDRVITTSTRTWALPTYNNHLYKQISSASTGASNDNHYFGYSTPWGYFDFNRFHCHFSPRDWQRLINNNWGFRPKRLNFKLFNIQVKEVTQNEGTKTIANNLTSTIQVFTDSEYQLPYVLGSAHQGCLPPFPADVFMIPQYGYLTLNNGSQAVGRSSFYCLEYFPSQMLRTGNNFQFTYTFEDVPFHSSYAHSQSLDRLMNPLIDQYLYYLSRTQTTGGTANTQTLGFSQGGPNTMANHAKNWLPGPCYRQQRVSTTTGQNNNSNFAWTAGTKYHLNGRNSLANPGIAMATHKDDKERFFPSNGILIFGKQNAARDNADYSDVMLTSEEEIKTTNPVATEEYGIVADNLQQQNTAPQIGTVNSQGALPGMVWQNRDVYLQGPIWAKIPHTDGNFHPSPLMGGFGLKHPPPQILIKNTPVPADPPTTFNQSKLNSFITQYSTGQVSVEIEWELQKENSKRWNPEIQYTSNYYKSTSVDFAVNTEGVYSEPHPIGTRYLTRPL

SEQ ID NO: 2062 - protein, 737 aa, Artificial Sequence; identical to SEQ ID NO: 2044
  Description of Artificial Sequence: Synthetic polypeptide

SEQ ID NO: 2063 - protein, 737 aa, Artificial Sequence
  Description of Artificial Sequence: Synthetic polypeptide
MAADGYLPDWLEDNLSEGIREWWALKPGAPKPKANQQKQDDGRGLVLPGYKYLGPFNGLDKGEPVNAADAAALEHDKAYDQQLKAGDNPYLRYNHADAEFQERLKEDTSFGGNLGRAVFQAKKRVLEPFGLVEEGAKTAPGKKRPVEQSPQEPDSSSGIGKTGQQPAKKRLNFGQTGDSESVPDPQPLGEPPAAPSGVGPNTMAAGGGAPMADNNEGADGVGSSSGNWHCDSQWLGNRVITTSTRTWALPTYNNHLYKQISNSTSGGSSNDNAYFGYSTPWGYFDFNRFHCHFSPRDWQRLINNNWGFRPKRLNFKLFNIQVKEVTDNNGVKTIANNLTSTVQVFTDSEYQLPYVLGSAHQGCLPPFPADVFMIPQYGYLTLNNGSQAVGRSSFYCLEYFPSQMLRTGNNFQFTYTFEDVPFHSSYAHSQSLDRLMNPLIDQYLYYLSRTQTTGGTANTQTLGFSQGGPNTMANQAKNWLPGPCYRQQRVSTTTGQNNNSNFAWTAGTKYHLNGRNSLANPGIAMATHKDDKERFFPSNGILIFGKQNAARDNADYSDVMLTSEEEIKTTNPVATEEYGIVADNLQQQNTAPQIGTVNSQGALPGMVWQNRDVYLQGPIWAKIPHTDGNFHPSPLMGGFGLKHPPPQILIKNTPVPADPPTTFNQSKLNSFITQYSTGQVSVEIEWELQKENSKRWNPEIQYTSNYYKSTSVDFAVNTEGVYSEPHPIGTRYLTRPL

SEQ ID NO: 2064 - protein, 736 aa, Artificial Sequence
  Description of Artificial Sequence: Synthetic polypeptide
MAADGYLPDWLEDNLSEGIREWWDLKPGAPKPKANQQKQDDGRGLVLPGYKYLGPFNGLDRGEPVNAADAAALEHDKAYDQQLKAGDNPYLRYNHADAEFQERLQEDTSFGGNLGRAVFQAKKRVLEPLGLVEEGAKTAPGKKRPVEQSPQEPDSSSGIGKTGQQPAKKRLNFGQTGDSESVPDPQPLGEPPATPAAVGPTTMASGGGAPMADNNEGADGVGNASGNWHCDSTWLGDRVITTSTRTWALPTYNNHLYKQISSASTGASNDNHYFGYSTPWGYFDFNRFHCHFSPRDWQRLINNNWGFRPKRLNFKLFNIQVKEVTDNNGVKTIANNLTSTIQVFTDSEYQLPYVLGSAHQGCLPPFPADVFMIPQYGYLTLNNGSQAVGRSSFYCLEYFPSQMLRTGNNFQFTYTFEDVPFHSSYAHSQSLDRLMNPLIDQYLYYLSRTQTTGGTANTQTLGFSQGGPNTMANQAKNWLPGPCYRQQRVSTTTGQNNNSNFAWTAGTKYHLNGRNSLANPGIAMATHKDDKERFFPSNGILIFGKQNAARDNADYSDVMLTSEEEIKTTNPVATEEYGIVADNLQQQNTAPQIGTVNSQGALPGMVWQNRDVYLQGPIWAKIPHTDGNFHPSPLMGGFGLKHPPPQILIKNTPVPADPPTTFNQSKLNSFITQYSTGQVSVEIEWELQKENSKRWNPEIQYTSNYYKSTSVDFAVNTEGVYSEPHPIGTRYLTRPL

SEQ ID NO: 2065 - protein, 736 aa, Artificial Sequence
  Description of Artificial Sequence: Synthetic polypeptide
MAADGYLPDWLEDNLSEGIREWWDLKPGAPKPKANQQKQDDGRGLVLPGYKYLGPFNGLDKGEPVNAADAAALEHDKAYDQQLKAGDNPYLRYNHADAEFQERLQEDTSFGGNLGRAVFQAKKRVLEPLGLVEEGAKTAPGKKRPVEQSPQEPDSSSGIGKKGQQPARKRLNFGQTGDSESVPDPQPLGEPPAAPSGVGSLTMASGGGAPMADNNEGADGVGNASGNWHCDSTWLGDRVITTSTRTWALPTYNNHLYKQISSASTGASNDNHYFGYSTPWGYFDFNRFHCHFSPRDWQRLINNNWGFRPKRLNFKLFNIQVKEVTQNEGTKTIANNLTSTVQVFTDSDYQLPYVLGSAHQGCLPPFPADVFMIPQYGYLTLNNGSQAVGRSSFYCLEYFPSQMLRTGNNFQFTYTFEDVPFHSSYAHSQSLDRLMNPLIDQYLYYLSRTQTTGGTANTQTLGFSQGGPNTMANQAKNWLPGPCYRQQRVSTTTGQNNNSNFAWTAGTKYHLNGRNSLSNPGIAMATHKDDKERFFPSNGILIFGKQNAARDNADYSDVMLTSEEEIKTTNPVATEEYGIVADNLQQQNTAPQIGTVNSQGALPGMVWQNRDMYLQGPIWAKIPHTDGNFHPSPLMGGFGLKHPPPQILIKNTPVPADPPTTFNQSKLNSFITQYSTGQVSVEIEWELQKENSKRWNPEIQYTSNYYKSTSVDFAVNTEGVYSEPHPIGTRYLTRPL

SEQ ID NO: 2066 - protein, 736 aa, Artificial Sequence
  Description of Artificial Sequence: Synthetic polynucleotide
MAADGYLPDWLEDNLSEGIREWWALKPGAPKPKANQQKQDDGRGLVLPGYKYLGPFNGLDKGEPVNAADAAALEHDKAYDQQLKAGDNPYLRYNHADAEFQERLQEDTSFGGNLGRAVFQAKKRVLEPFGLVEEGAKTAPGKKRPVEQSPQEPDSSSGIGKTGQQPAKKRLNFGQTGGSESVPDPQPLGEPPATPAAVGPTTMAAGGGAPMADNNEGADGVGSSSGNWHCDSTWLGDRVITTSTRTWALPTYNNHLYKQISSASTGASNDNHYFGYSTPWGYFDFNRFHCHFSPRDWQRLINNNWGFRPKRLNFKLFNIQVKEVTDNNGVKTIANNLTSTVQVFTDSEYQLPYVLGSAHQGCLPPFPADVFMIPQYGYLTLNNGSQAVGRSSFYCLEYFPSQMLRTGNNFTFSYTFEEVPFHSSYAHSQSLDRLMNPLIDQYLYYLSRTQTTGGTANTQTLGFSQGGPNTMANQAKNWLPGPCYRQQRVSTTTGQNNNSNFAWTAGTKYHLNGRNSLANPGIAMASHKDDKERFFPSNGILIFGKQNAARDNADYSDVMLTSEEEIKTTNPVATEEYGIVADNLQQQNTAPQIGTVNSQGALPGMVWQNRDVYLQGPIWAKIPHTDGNFHPSPLMGGFGLKHPPPQILIKNTPVPADPPTTFNQSKLNSFITQYSTGQVSVEIEWELQKENSKRWNPEIQYTSNYYKSTSVDFAVNTEGVYSEPHPIGTRYLTRPL

SEQ ID NO: 2067 - DNA, 2211 bp, Artificial Sequence
  Description of Artificial Sequence: Synthetic polynucleotide
atggctgccgatggttatcttccagattggctcgaggacaacctctctgagggcattcgcgagtggtgggacttgaaacctgcatccccgaaacccaaagccaaccagcaaaagcaggacgacggccggggtctggtgcttcctggctacaagtacctcggacccttcaacggactcgacaagggggagcccgtcaacgcggcggacgcagcggccctcgagcacgacaaggcctacgaccagcagctcaaagcgggtgacaatccgtacctgcggtataaccacgccgacgccgagtttcaggagcgtctgcaagaagatacgtcttttgggggcaacctcgggcgagcagtcttccaggccaaaaagaggcttcttgaacctcttggtctggttgaggaagcggctaagacggctcctggaaagaagaggcctgtagagcagtctcctcaggaaccggactcctccgcgggtattggcaaatcgggtgcacagcccgccaaaaagagactcaatttcggtcagactggcggcacagagtcagttccagaccctcaacctctcggagaacctccagcagcgccctctggtgtgggacctaatacaatggctgcaggcggtggcgcaccaatggcagacaataacgaaggcgccgacggagtgggtagttcctcgggaaattggcattgcgattccacatggctgggcgacagagtcatcaccaccagcaccagaacctgggccctgcccacttacaacaaccatctctacaagcaaatctccagtgcttcaacgggggccagcaacgacaaccactacttcggctacagcaccccctgggggtattttgatttcaacagattccactgccacttctcaccacgtgactggcagcgactcatcaacaacaactggggattccggcccaagagactcagcttcaagctcttcaacatccaggtcaaggaggtcacgcagaatgaaggcaccaagaccatcgccaataacctcaccagcaccatccaggtgtttacggactcggagtaccagctgccgtacgttctcggctctgcccaccagggctgcctgcctccgttcccggcggacgtgttcatgattccccagtacggatacctaacactcaacaacggtagtcaggccgtgggacgctcctccttctactgcctggaatactttccttcgcagatgctgagaaccggcaacaacttccagtttacttacaccttcgaggacgtgcctttccacagcagctacgcccacagccagagcttggaccggctgatgaatcctctgattgaccagtacctgtactacttgtctcggactcaaacaacaggaggcacggcaaatacgcagactctgggcttcagccaaggtgggcctaatacaatggccaatcaggcaaagaactggctgccaggaccctgttaccgccaacaacgcgtctcaacgacaaccgggcaaaacaacaatagcaactttgcctggactgctgggaccaaataccatctgaatggaagaaattcattggctaatcctggcatcgctatggcaacacacaaagacgacaaggagcgtttttttcccagtaacgggatcctgatttttggcaaacaaaatgctgccagagacaatgcggattacagcgatgtcatgctcaccagcgaggaagaaatcaaaaccactaaccctgtggctacagaggaatacggtatcgtggcagataacttgcagcagcaaaacacggctcctcaaattggaactgtcaacagccagggggccttacccggtatggtctggcagaaccgggacgtgtacctgcagggtcccatctgggccaagattcctcacacggacggcaacttccacccgtctccgctgatgggcggctttggcctgaaacatcctccgcctcagatcctgatcaagaacacgcctgtacctgcggatcctccgaccaccttcaaccagtcaaagctgaactctttcatcacgcaatacagcaccggacaggtcagcgtggaaattgaatgggagctgcagaaggaaaacagcaagcgctggaaccccgagatccagtacacctccaactactacaaatctacaagtgtggactttgctgttaatacagaaggcgtgtactctgaaccccaccccattggcacccgttacctcacccgtcccctgtaa

SEQ ID NO: 2068 - DNA, 2211 bp, Artificial Sequence
  Description of Artificial Sequence: Synthetic polynucleotide
atggctgccgatggttatcttccagattggctcgaggacaacctctctgagggcattcgcgagtggtgggacttgaaacctggagccccgaaacccaaagccaaccagcaaaagcaggacgacggccggggtctggtgcttcctggctacaagtacctcggacccttcaacggactcgacaagggggagcccgtcaacgcggcggacgcagcggccctcgagcacgacaaggcctacgaccagcagctcaaagcgggtgacaatccgtacctgcggtataaccacgccgacgccgagtttcaggagcgtctgcaagaagatacgtcttttgggggcaacctcgggcgagcagtcttccaggccaagaagagggttctcgaaccttttggtctggttgaggaaggcgctaagacggctcctggaaagaaacgtccggtagagcagtcgccacaagagccagactcctcctcgggcattggcaagacaggccagcagcccgctaaaaagagactcaattttggtcagactggcgactcagagtcagtccccgacccacaacctctcggagaacctccagcaacccccgctgctgtgggacctactacaatggcttcaggtggtggcgcaccaatggcagacaataacgaaggcgccgacggagtgggtaatgcctcaggaaattggcattgcgattcccaatggctgggggacagagtcatcaccaccagcacccgaacctgggccctgcccacctacaacaatcacctctacaagcaaatctccagtgcttcaacgggggccagcaacgacaaccactacttcggctacagcaccccctgggggtattttgatttcaacagattccactgccatttctcaccacgtgactggcagcgactcatcaacaacaattggggattccggcccaagagactcaacttcaaactcttcaacatccaagtcaaggaggtcacgcagaatgaaggcaccaagaccatcgccaataacctcaccagcaccatccaggtgtttacggactcggagtaccagctgccgtacgttctcggctccgcccaccagggctgcctgcctccgttcccggcggacgtgttcatgattccccagtacggctacctaacactcaacaacggtagtcaggccgtgggacgctcctccttctactgcctggaatactttccttcgcagatgctgagaaccggcaacaacttccagtttacttacaccttcgaggacgtgcctttccacagcagctacgcccacagccagagcttggaccggctgatgaatcctctgattgaccagtacctgtactacttgtctcggactcaaacaacaggaggcacggcaaatacgcagactctgggcttcagccaaggtgggcctaatacaatggccaatcaggcaaagaactggctgccaggaccctgttaccgccaacaacgcgtctcaacgacaaccgggcaaaacaacaatagcaactttgcctggactgctgggaccaaataccatctgaatggaagaaattcattggctaatcctggcatcgctatggcaacacacaaagacgacaaggagcgtttttttcccagtaacgggatcctgatttttggcaaacaaaatgctgccagagacaatgcggattacagcgatgtcatgctcaccagcgaggaagaaatcaaaaccactaaccctgtggctacagaggaatacggtatcgtggcagataacttgcagcagcaaaacacggctcctcaaattggaactgtcaacagccagggggccttacccggtatggtctggcagaaccgggacgtgtacctgcagggtcccatctgggccaagattcctcacacggacggcaacttccacccgtctccgctgatgggcggctttggcctgaaacatcctccgcctcagatcctgatcaagaacacgcctgtacctgcggatcctccgaccaccttcaaccagtcaaagctgaactctttcatcacgcaatacagcaccggacaggtcagcgtggaaattgaatgggagctgcagaaggaaaacagcaagcgctggaaccccgagatccagtacacctccaactactacaaatctacaagtgtggactttgctgttaatacagaaggcgtgtactctgaaccccaccccattggcacccgttacctcacccgtcccctgtaa

SEQ ID NO: 2069 - DNA, 2211 bp, Artificial Sequence
  Description of Artificial Sequence: Synthetic polynucleotide
atggctgccgatggttatcttccagattggctcgaggacaacctctctgagggcattcgcgagtggtgggacttggaacctggagccccgaagcccaaagccaaccagcaaaagcaggacgacggccggggtctggtgcttcctggctacaagtacctcggacccttcaacggactcgacaagggggagcccgtcaacgcggcggacgcagcggccctcgagcacgacaaggcctacgaccagcagctcaaagcgggtgacaatccgtacctgcggtataaccacgccgacgccgagtttcaggagcgtctgcaagaagatacgtcttttgggggcaacctcgggcgagcagtcttccaggccaagaagcgggttctcgaacctctcggtctggttgaggaaggcgctaagacggctcctggaaagaaacgtccggtagagcagtcgccacaagagccagactcctcctcgggcatcggcaagacaggccagcagcccgctaaaaagagactcaattttggtcagactggcgactcagagtcagtccccgatccacaacctctcggagaacctccagcaacccccgctgctgtgggacctactacaatggcttcaggcggtggcgcaccaatggcagacaataacgaaggcgccgacggagtgggtaatgcctcaggaaattggcattgcgattccacatggctgggcgacagagtcatcaccaccagcacccgcacctgggccttgcccacctacaataaccacctctacaagcaaatctccagtgcttcaacaggggccagcaacgacaaccactacttcggctacagcaccccctgggggtattttgacttcaacagattccactgccacttctcaccacgtgactggcagcgactcatcaacaacaactggggattccggcctaagcgactcaacttcaagctcttcaacattcaggtcaaagaggttacggacaacaatggagtcaagaccatcgccaataaccttaccagcacggtccaggtcttcacggactcggagtaccagttgccgtacgtcctcggctctgcgcaccagggctgcctccctccgttcccggcggacgtgttcatgattccgcagtacggctacctaacgctcaacaacggtagtcaggccgtgggacgctcctccttctactgcctggaatactttccttcgcagatgctgagaaccggcaacaacttccagtttacttacaccttcgaggacgtgcctttccacagcagctacgcccacagccagagcttggaccggctgatgaatcctctgattgaccagtacctgtactacttgtctcggactcaaacaacaggaggcacggcaaatacgcagactctgggcttcagccaaggtgggcctaatacaatggccaatcaggcaaagaactggctgccaggaccctgttaccgccaacaacgcgtctcaacgacaaccgggcaaaacaacaatagcaactttgcctggactgctgggaccaaataccatctgaatggaagaaattcattggctaatcctggcatcgctatggcaacacacaaagacgacaaggagcgtttttttcccagtaacgggatcctgatttttggcaaacaaaatgctgccagagacaatgcggattacagcgatgtcatgctcaccagcgaggaagaaatcaaaaccactaaccctgtggctacagaggaatacggtatcgtggcagataacttgcagcagcaaaacacggctcctcaaattggaactgtcaacagccagggggccttacccggtatggtctggcagaaccgggacgtgtacctgcagggtcccatctgggccaagattcctcacacggacggcaacttccacccgtctccgctgatgggcggctttggcctgaaacatcctccgcctcagatcctgatcaagaacacgcctgtacctgcggatcctccgaccaccttcaaccagtcaaagctgaactctttcatcacgcaatacagcaccggacaggtcagcgtggaaattgaatgggagctgcagaaggaaaacagcaagcgctggaaccccgagatccagtacacctccaactactacaaatctacaagtgtggactttgctgttaatacagaaggcgtgtactctgaaccccaccccattggcacccgttacctcacccgtcccctgtaa

SEQ ID NO: 2070 - DNA, 2211 bp, Artificial Sequence
  Description of Artificial Sequence: Synthetic polynucleotide
atggctgccgatggttatcttccagattggctcgaggacactctctctgaaggaataagacagtggtggaagctcaaacctggcccaccaccaccaaagcccgcagagcggcataaggacgacagcaggggtcttgtgcttcctgggtacaagtacctcggacccttcaacggactcgacaagggagagccggtcaacgaggcagacgccgcggccctcgagcacgacaaagcctacgaccggcagctcgacagcggagacaacccgtacctcaagtacaaccacgccgacgcggagtttcaggagcgccttaaagaagatacgtcttttgggggcaacctcgggcgagcagtcttccaggccaagaagagggttctcgaaccttttggtctggttgaggaaggtgctaagacggctcctggaaagaaacgtccggtagagcagtcgccacaagagccagactcctcctcgggcattggcaagacaggccagcagcccgctaaaaagagactcaattttggtcagactggcgactcagagtcagtccccgacccacaacctctcggagaacctccagcaacccccgctgctgtgggacctactacaatggcttcaggcggtggcgcaccaatggcagacaataacgaaggcgccgacggagtgggtaatgcctcaggaaattggcattgcgattccacatggctgggcgacagagtcatcaccaccagcacccgaacatgggccttgcccacctataacaaccacctctacaagcaaatctccagtgcttcaacgggggccagcaacgacaaccactacttcggctacagcaccccctgggggtattttgacttcaacagattccactgccacttctcaccacgtgactggcagcgactcatcaacaacaactggggattccggcctaagcgactcaacttcaagctcttcaacattcaggtcaaagaggttacggacaacaatggagtcaagaccatcgccaataaccttaccagcacggtccaggtcttcacggactcagactatcagctcccgtacgtgctcgggtcggctcacgagggctgcctcccgccgttcccagcggacgttttcatgattcctcagtacggctacctaacactcaacaacggtagtcaggccgtgggacgctcctccttctactgcctggaatactttccttcgcagatgctgagaaccggcaacaacttccagtttacttacaccttcgaggacgtgcctttccacagcagctacgcgcacagccagagtctggaccggctgatgaatcctctgattgaccagtacctgtactacttgtctcggactcaaacaacaggaggcacggcaaatacgcagactctgggcttcagccaaggtgggcctaatacaatggccaatcaggcaaagaactggctgccaggaccctgttaccgccaacaacgcgtctcaacgacaaccgggcaaaacaacaatagcaactttgcctggactgctgggaccaaataccatctgaatggaagaaattcattggctaatcctggcatcgctatggcaacacacaaagacgacaaggagcgtttttttcccagtaacgggatcctgattttcggcaaacaaaatgctgccagagacaatgcggattacagcgatgtcatgctcaccagcgaggaagaaatcaaaaccactaaccctgtggctacagaggaatacggtatcgtggcagataacttgcagcagcaaaacacggctcctcaaattggaactgtcaacagccagggggccttacccggtatggtctggcagaaccgggacgtgtacctgcagggtcccatctgggccaagattcctcacacggacggcaacttccacccgtctccgctgatgggcggctttggcctgaaacatcctccgcctcagatcctgatcaagaacacgcctgtacctgcggatcctccgaccaccttcaaccagtcaaagctgaactctttcatcacgcaatacagcaccggacaggtcagcgtggaaattgaatgggagctgcagaaggaaaacagcaagcgctggaaccccgagatccagtacacctccaactactacaaatctacaagtgtggactttgctgttaatacagaaggcgtgtactctgaaccccaccccattggcaccagatacctgactcgtaatctgtaa

SEQ ID NO: 2071 - DNA, 2208 bp, Artificial Sequence
  Description of Artificial Sequence: Synthetic polynucleotide
atggctgccgatggttatcttccagattggctcgaggacactctctctgaaggaataagacagtggtggaagctcaaacctggcccaccaccaccaaagcccgcagagcggcataaggacgacagcaggggtcttgtgcttcctgggtacaagtacctcggacccttcaacggactcgacaagggagagccggtcaacgaggcagacgccgcggccctcgagcacgacaaagcctacgaccggcagctcgacagcggagacaacccgtacctcaagtacaaccacgccgacgcggagtttcaggagcgccttaaagaagatacgtcttttgggggcaacctcggacgagcagtcttccaggcgaaaaagagggttcttgaacctctgggcctggttgaggaacctgttaagacggctccgggaaaaaagaggccggtagagcagtcgccacaagagccagactcctcctcgggcatcggcaagaaaggccagcagcccgctaaaaagagactcaattttggtcagactggcgactcagagtcagtccccgacccacaacctctcggagaacctccagcaacccccgctgctgtgggacctactacaatggcttcaggcggtggcgcaccaatggcggacaataacgaaggcgccgatggagtgggtaatgcctcaggaaattggcattgcgattccacatggctgggcgacagagtcatcaccaccagcacccgaacatgggccttgcccacctataacaaccacctctacaagcaaatctccagtgcttcaacgggggccagcaacgacaaccactacttcggctacagcaccccctgggggtattttgacttcaacagattccactgccacttctcaccacgtgactggcagcgactcatcaacaacaactggggattccggcctaagcgactcaacttcaagctcttcaacattcaggtcaaagaggttacggacaacaatggagtcaagaccatcgccaataaccttaccagcacggtccaggtcttcacggactcagactatcagctcccgtacgttctcggctctgcccaccagggctgcctgcctccgttcccggcggacgtgttcatgattccccagtacggctacctaacactcaacaacggtagtcaggccgtgggacgctcctccttctactgcctggaatactttccttcgcagatgctgagaaccggcaacaacttccagtttacttacaccttcgaggacgtgcctttccacagcagctacgcccacagccagagcttggaccggctgatgaatcctctgattgaccagtacctgtactacttgtctcggactcaaacaacaggaggcacggcaaatacgcagactctgggcttcagccaaggtgggcctaatacaatggccaatcaggcaaagaactggctgccaggaccctgttaccgccaacaacgcgtctcaacgacaaccgggcaaaacaacaatagcaactttgcctggactgctgggaccaaataccatctgaatggaagaaattcattggctaatcctggcatcgctatggcaacacacaaagacgacaaggagcgtttttttcccagtaacgggatcctgatttttggcaaacaaaatgctgccagagacaatgcggattacagcgatgtcatgctcaccagcgaggaagaaatcaaaaccactaaccctgtggctacagaggaatacggtatcgtggcagataacttgcagcagcaaaacacggctcctcaaattggaactgtcaacagccagggggccttacccggtatggtctggcagaaccgggacgtgtacctgcagggtcccatctgggccaagattcctcacacggacggcaacttccacccgtctccgctgatgggcggctttggcctgaaacatcctccgcctcagatcctgatcaagaacacgcctgtacctgcggatcctccgaccaccttcaaccagtcaaagctgaactctttcatcacgcaatacagcaccggacaggtcagcgtggaaattgaatgggagctgcagaaggaaaacagcaagcgctggaaccccgagatccagtacacctccaactactacaaatctacaagtgtggactttgctgttaatacagaaggcgtgtactctgaaccccaccccattggcacccgttacctcacccgtcccctg

SEQ ID NO: 2072 - DNA, 2211 bp, Artificial Sequence
  Description of Artificial Sequence: Synthetic polynucleotide
atggctgccgatggttatcttccagattggctcgaggacactctctctgaaggaataagacagtggtggaagctcaaacctggcccaccaccaccaaagcccgcagagcggcataaggacgacagcaggggtcttgtgcttcctgggtacaagtacctcggacccttcaacggactcgacaagggagagccggtcaacgaggcagacgccgcggccctcgagcacgacaaagcctacgaccagcagctccaagcgggtgacaatccgtacctgcggtataaccacgccgacgccgagtttcaggagcgtcttcaaggagatacgtcttttgggggcaacctcggacgagcagtcttccaggccaaaaagaggcttcttgaacctcttggtctggttgaggaagcggctaagacggctcctggaaagaagaggcctgtagagcagtctcctcaggaaccggactcctccgcgggtattggcaaatcgggtgcacagcccgctaaaaagagactcaatttcggtcagactggcgacacagagtcagtcccagaccctcaaccaatcggagaacctcccgcagccccctcaggtgtgggatctcttacaatggcttcaggtggtggcgcaccagtggcagacaataacgaaggtgccgatggagtgggtagttcctcgggaaattggcattgcgattcccaatggctgggggacagagtcatcaccaccagcacccgaacatgggccttgcccacctataacaaccacctctacaagcaaatctccagtgcttcaacgggggccagcaacgacaaccactacttcggctacagcaccccctgggggtattttgacttcaaccgcttccactgccacttctcaccacgtgactggcagcgactcatcaacaacaactggggattccggcccaagagactcagcttcaagctcttcaaccatccaggtcaaggaggtcacgcagaatgaaggcaccaagaccatcgccaataacctcaccagcacatccaggtgtttacggactcggagtaccagctgccgtacgttctcggctctgcccaccagggctgcctgcctccgttcccggcggacgtgttcatgattccccagtacggctacctaacactcaacaacggtagtcaggccgtgggacgctcctccttctactgcctggaatactttccttcgcagatgctgagaaccggcaacaacttccagttcacttacaccttcgaggacgtgcctttccacagcagctacgcgcacagccagagcttggaccggctgatgaatcctctgattgaccagtacctgtactacttgtctcggactcaaacaacaggaggcacggcaaatacgcagactctgggcttcagccaaggtgggcctaatacaatggccaatcaggcaaagaactggctgccaggaccctgttaccgccaacaacgcgtctcaacgacaaccgggcaaaacaacaatagcaactttgcctggactgctgggaccaaataccatctgaatggaagaaattcattgggtaatcctggcatcgctatggcaacacacaaagacgacaaggagcgtttttttcccagtaacgggatcctgatttttggcaaacaaaatgctgccagagacaatgcggattacagcgatgtcatgctcaccagcgaggaagaaatcaaaaccactaaccctgtggctacagaggaatacggtatcgtggcagataacttgcagcagcaaaacacggctcctcaaattggaactgtcaacagccagggggccttacccggtatggtctggcagaaccgggacgtgtacctgcagggtcccatctgggccaagattcctcacacggacggcaacttccacccgtctccgctgatgggcggctttggcctgaaacatcctccgcctcagatcctcatcaaaaacacacctgtacctgcggatcctccaacggccttcaaccagtcaaagctgaactctttcatcacgcaatacagcaccggacaggtcagcgtggaaattgaatgggagctgcagaaggaaaacagcaagcgctggaaccccgagatccagtacacctccaactactacaaatctacaagtgtggactttgctgttaatacagaaggcgtgtactctgaaccccaccccattggcacccgttacctcacccgtcccctgtaa

SEQ ID NO: 2073 - DNA, 2214 bp, Artificial Sequence
  Description of Artificial Sequence: Synthetic polynucleotide
atggctgccgatggttatcttccagattggctcgaggacaacctctctgagggcattcgcgagtggtgggacttgaaacatggagccccgaaacccaaagccaaccagcaaaagcaggacgacggccggggtctggtgcttcctggctacaagtacctcggacccttcaacggactcgacaagggggagcccgtcaacgcggcggatgcagcggccctcgagcacgacaaggcctacgaccagcagctcaaagcgggtgacaatccgtacctgcggtataaccacgccgacgccgagtttcaggagcgtctgcaagaagatacgtcttttgggggcaacctcgggcgagcagtcttccaggccaagaagagggttctcgaaccttttggtctggttgaggaaggtgctaagacggctcctggaaagaaacgtccggtagagcagtcgccacaagagccagactcctcctcgggcattggcaagacaggccagcagcccgctaaaaagagactcaattttggtcagactggcgactcagagtcagtccccgacccacaacctctcggagaacctccagcaacccccgctgctgtgggacctactacaatggcttcaggcggtggcgcaccaatggcagacaataacgaaggcgccgacggagtgggtaatgcctcaggaaattggcattgcgattccacatggctgggcgacagagtcatcaccaccagcacccgaacatgggccttgcccacctataacaaccacctctacaagcaaatctccaacgggacttcgggaggaagcaccaacgacaacacctacttcggctacagcaccccctgggggtattttgactttaacagattccactgccacttctcaccacgtgactggcagcgactcatcaacaacaactggggattccggcccaagagactcaacttcaaactcttcaacatccaagtcaaggaggtcacgcagaatgaaggcaccaagaccatcgccaataacctcaccagcaccatccaggtgtttacggactcggagtaccagctgccgtacgttctcggctccgcccaccagggctgcctgcctccgttcccggcggacgtgttcatgattccccagtacggctacctaacactcaacaacggtagtcaggccgtgggacgctcctccttctactgcctggaatactttccttcgcagatgctgagaacgggcaacaactttaccttcagctacacctttgaggacgttcctttccacagcagctacgctcacagccagagtctggaccgtctcatgaatcctctgattgaccagtacctgtactacttgtctcggactcaaacaacaggaggcacggcaaatacgcagactctgggcttcagccaaggtgggcctaatacaatggccaatcaggcaaagaactggctgccaggaccctgttaccgccaacaacgcgtctcaacgacaaccgggcaaaacaacaatagcaactttgcctggactgctgggaccaaataccatctgaatggaagaaattcattggctaatcctggcatcgctatggcaacacacaaagacgacaaggagcgtttttttcccagtaacgggatcctgatttttggcaaacaaaatgctgccagagacaatgcggattacagcgatgtcatgctcaccagcgaggaagaaatcaaaaccactaaccctgtggctacagaggaatacggtatcgtggcagataacttgcagcagcaaaacacggctcctcaaattggaactgtcaacagccagggggccttacccggtatggtctggcagaaccgggacgtgtacctgcagggtcccatctgggccaagattcctcacacggacggcaacttccacccgtctccgctgatgggcggctttggcctgaaacatcctccgcctcagatcctgatcaagaacacgcctgtacctgcggatcctccgaccaccttcaaccagtcaaagctgaactctttcatcacgcaatacagcaccggacaggtcagcgtggaaattgaatgggagctgcagaaggaaaacagcaagcgctggaaccccgagatccagtacacctccaactactacaaatctacaagtgtggactttgctgttaatacagaaggcgtgtactctgatccccaccccattggcacccgttacctcacccgtcccctgtaa

SEQ ID NO: 2074 - DNA, 2214 bp, Artificial Sequence
  Description of Artificial Sequence: Synthetic polynucleotide
atggctgccgatggttatcttccagattggctcgaggacaacctctctgagggcattcgcgagtggtgggcgctgaaacctggagccccgaagcccaaagccaaccagcaaaagcaggacgacggccggggtctggtgcttcctggctacaagtacctcggacccttcaacggactcgacaaaggagagccggtcaacgaggcggacgcggcagccctcgaacacgacaaggcctacgaccagcagctcaaagcgggtgacaatccgtacctgcggtataaccacgccgacgccgagtttcaggagcgtctgcaagaagatacgtcttttgggggcaacctcgggcgagcagtcttccaggccaagaagcgggttctcgaacctctcggtctggttgaggaaggcgctaagacggctcctggaaagaagagaccggtagagccatcaccccagcgttctccagactcctctacgggcatcggcaagaaaggccagcagcccgccagaaaaagactcaattttggtcagactggcgactcagagtcagttccagaccctcaacctctcggagaacctccagcagcgccctctggtgtgggacctaatacaatggcttcaggcggtggcgcaccaatggcagacaataacgagggcgccgacggagtgggtaattcctcgggaaattggcattgcgattccacatggatgggcgacagagtcatcaccaccagcacccgaacctgggccctgcccacctacaacaaccacctctacaagcaaatctccagtgcttcaacgggggccagcaacgacaaccactacttcggctacagcaccccctgggggtattttgactttaacagattccactgccacttttcaccacgtgactggcagcgactcatcaacaacaactggggattccggcccaagagactcaacttcaagctcttcaacatccaagtcaaggaggtcacgcagaatgaaggcaccaagaccatcgccaataacctcaccagcaccatccaggtgtttacggactcggagtaccagctgccgtacgttctcggctctgcccaccagggctgcctgcctccgttcccggcggacgtgttcatgattccccagtacggctacctaacactcaacaacggtagtcaggccgtgggacgctcctccttctactgcctggaatactttccttcgcagatgctgagaaccggcaacaacttccagtttacttacaccttcgaggacgtgcctttccacagcagctacgcgcacagccagagcttggaccggctgatgaatcctctgattgaccagtacctgtactacttgtctcggactcaaacaacaggaggcacggcaaatacgcagactctgggcttcagccaaggtgggcctaatacaatggccaatcaggcaaagaactggctgccaggaccctgttaccgccaacaacgcgtctcaacgacaaccgggcaaaacaacaatagcaactttgcctggactgctgggaccaaataccatctgaatggaagaaattcattggctaatcctggcatcgctatggcaacacacaaagacgacaaggagcgtttttttcccagtaacgggatcctgatttttggcaaacaaaatgctgccagagacaatgcggattacagcgatgtcatgctcaccagcgaggaagaaatcaaaaccactaaccctgtggctacagaggaatacggtatcgtggcagataacttgcagcagcaaaacacggctcctcaaattggaactgtcaacagccagggggccttacccggtatggtctggcagaaccgggacgtgtacctgcagggtcccatctgggccaagattcctcacacggacggcaacttccacccgtctccgctgatgggcggctttggcctgaaacatcctccgcctcagatcctgatcaagaacacgcctgtacctgcggatcctccgaccaccttcaaccagtcaaagctgaactctttcatcacacaatacagcaccggacaggtcagcgtggaaattgaatgggagctgcagaaggaaaacagcaagcgctggaaccccgagatccagtacacctccaactactacaaatctacaagtgtggactttgctgttaatacagaaggcgtgtactctgaaccccaccccattggcacccgttacctcacccgtcccctgtaa

SEQ ID NO: 2075 - DNA, 2211 bp, Artificial Sequence
  Description of Artificial Sequence: Synthetic polynucleotide
  misc_feature (676)..(676): n is a, c, g, or t
atggctgccgatggttatcttccagattggctcgaggacactctctctgaaggaataagacagtggtggaagctcaaacctggcccaccaccaccaaagcccgcagagcggcataaggacgacagcaggggtcttgtgcttcctgggtacaagtacctcggacccttcaacggactcgacaagggagagccggtcaacgaggcagacgccgcggccctcgagcacgacaaagcctacgaccggcagctcgacagcggagacaacccgtacctcaagtacaaccacgccgacgcggagtttcaggagcgccttaaagaagatacgtcttttgggggcaacctcggacgagcagtcttccaggcgaaaaagagggttcttgaacctctgggcctggttgaggaacctgttaagacggctccgggaaaaaagaggccggtagagcagtcgccacaagagccagactcctcctcgggcatcggcaagaaaggccagcagcccgctaaaaagagactcaattttggtcagactggcgactcagagtcagtccccgacccacaacctctcggagaacctccagcaacccccgctgctgtgggacctactacaatggcttcaggcggtggcgcaccaatggcggacaataacgaaggcgccgatggagtgggtaatgcctcangaaattggcattgcgattccacatggctgggcgacagagtcatcaccaccagcacccgaacatgggccttgccacctataacaaccacctctacaagcaaatctccagtgcttcaacgggggcgcagcaacgacaaccactacttcggctacagcaccccctgggggtattttgacttcaacagattccactgccacttctcaccacgtgactggcagcgactcatcaacaacaactggggattccggcctaagcgactcaacttcaagctcttcaacattcaggtcaaagaggttacggacaacaatggagtcaagaccatcgccaataaccttaccagcacggtccaggtcttcacggactcagactatcagctcccgtacgttctcggctctgcccaccagggctgcctgcctccgttcccggcggacgtgttcatgattccccagtacggctacctaacactcaacaacggtagtcaggccgtgggacgctcctccttctactgcctggaatactttccttcgcagatgctgagaaccggcaacaacttccagtttacttacaccttcgaggacgtgcctttccacagcagctacgcccacagccagagcttggaccggctgatgaatcctctgattgaccagtacctgtactacttgtctcggactcaaacaacaggaggcacggcaaatacgcagactctgggcttcagccaaggtgggcctaatacaatggccaatcaggcaaagaactggctgccaggaccctgttaccgccaacaacgcgtctcaacgacaaccgggcaaaacaacaatagcaactttgcctggactgctgggaccaaataccatctgaatggaagaaattcattggctaatcctggcatcgctatggcaacacacaaagacgacaaggagcgtttttttcccagtaacgggatcctgatttttggcaaacaaaatgctgccagagacaatgcggattacagcgatgtcatgctcaccagcgaggaagaaatcaaaaccactaaccctgtggctacagaggaatacggtatcgtggcagataacttgcagcagcaaaacacggctcctcaaattggaactgtcaacagccagggggccttacccggtatggtttggcagaaccgggacgtgtacctgcagggtcccatctgggccaagattcctcacacggacggcaacttccacccgtctccgctgatgggcggctttggcctgaaacatcctccgcctcagatcctgatcaagaacacgcctgtacctgcggatcctccgaccaccttcaaccagtcaaagctgaactctttcatcacacagtactccacgggacaggtcagcgtggaaattgaatgggagctgcagaaggaaaacagcaagcgctggaacccggagatccagtacacttccaactactacaaatctacaaatgtggactttgctgttaacacagaaggcgtgtactctgaaccccaccccattggcacccgttacctcacccgtcccctgtaa

SEQ ID NO: 2076 - DNA, 2211 bp, Artificial Sequence
  Description of Artificial Sequence: Synthetic polynucleotide
  misc_feature (715)..(715): n is a, c, g, or t
atggctgccgatggttatcttccagattggctcgaggacaacctctctgagggcattcgcgagtggtgggacttgaaacctggagccccgaaacccaaagccaaccagcaaaagcaggacgacggccggggtctggtgcttcctggctacaagtacctcggacccttcaacggactcgacaagggggagcccgtcaacgcggcggatgcagcggccctcgagcacgacaaggcctacgaccagcagctccaagcgggtgacaatccgtacctgcggtataaccacgccgacgccgagtttcaggagcgtcttcaaggagatacgtcttttgggggcaacctcggacgagcagtcttccaggccaagaagcgggttctcgaacctctcggtctggttgaggaagcggctaagacggctcctggaaagaagaggcctgtagagcagtctcctcaggaaccggactcctccgcgggtattggcaaatcgggtgcacagcccgctaaaaagagactcaatttcggtcagactggcgacacagagtcagtcccagaccctcaaccaatcggagaacctcccgcagccccctctggtgtgggacctaatacaatggctgcaggcggtggcgcaccaatggcagacaataacgaaggcgccgatggagtgggtagttcctcgggaaattggcattgcgattccacatggctgggcgacagantcatcaccaccagcacccgaacctgggccctgcccacctataacaaccatctctacaagcaaatctccagtgcttcaacgggggccagcaacgacaaccactacttcggctacagcaccccctgggggtattttgacttcaacagattccactgccacttctcaccacgtgactggcagcgactcatcaacaacaactggggattccggcctaagcgactcaacttcaagctcttcaacattcaggtcaaagaggttacggacaacaatggagtcaagaccatcgccaataaccttaccagcacggtccaggtcttcacggactcggagtaccagttgccgtacgtcctcggctctgcgcaccagggctgcctgcctccgttcccggcggacgtgttcatgattccgcagtacggctacctaacgctcaacaatggcagccaggcagtgggacggtcatccttttactgcctggaatatttcccatcgcagatgctgagaacgggcaacaactttaccttcagctacacttttgaggacgttcctttccacagcagctacgctcacagccagagtctggaccgtctcatgaatcctctgattgaccagtacctgtactacttgtctcggactcaaacaacaggaggcacggcaaatacgcagactctgggcttcagccaaggtgggcctaatacaatggccaatcaggcaaagaactggctgccaggaccctgttaccgccaacaacgcgtctcaacgacaaccggacaaaacaacaatagcaactttgcctggactgctgggaccaaataccatctgaatggaagaaattcattggctaatcctggcatcgctatggcaacacacaaagacgacaaggagcgtttttttcccagtaacgggatcctgatttttggcaaacaaaatgctgccagagacaatgcggattacagcgatgtcatgctcaccagcgaggaagaaatcaaaaccactaaccctgtggctacagaggaatacggtatcgtggcagataactttcagcagcaaaacacggctcctcaaattggaactgtcaacagccagggggccttacccggtatggtctggcagaaccgggacgtgtacctgcagggtcccatctgggccaagattcctcacacggacggcaacttccacccgtctccgctgatgggcggctttggcctgaaacatcctccgcctcagatcctgatcaagaacacgcctgtacctgcggatcctccgaccaccttcaaccagtcaaagctgaactctttcatcacgcaatacagcaccggacaggtcagcgtggaaattgaatgggagctgcagaaggaaaacagcaagcgctggaaccccgagatccagtacacctccaactactacaaatctacaagtgtggactttgctgttaatacagaaggcgtgtactctgaaccccaccccattggcacccgttacctcacccgtcccctgtaa

SEQ ID NO: 2077 - DNA, 2211 bp, Artificial Sequence
  Description of Artificial Sequence: Synthetic polynucleotide
atggctgccgatggttatcttccagattggctcgaggacaacctctctgagggcattcgcgagtggtgggcgctgaaacctggagccccgaagcccaaagccaaccagcaaaagcaggacgacggccggggtctggtgcttcctggctacaagtacctcggacccttcaacggactcgacaaaggagagccggtcaacgaggcggacgcggcagccctcgaacacgacaaagcttacgaccagcagctcaaggccggtgacaacccctacctcaagtataaccacgccgacgccgagtttcaggagcgtctgcaagaagatacgtcttttgggggcaacctcgggcgagcagtcttccaggccaaaaagaggcttcttgaacctcttggtctggttgaggaagcggctaagacggctcctggaaagaagaggcctgtagagcagtctcctcaggaaccggactcctccgcgggtattggcaaatcgggtgcacagcccgctaaaaagagactcaatttcggtcagactggcgacacagagtcagtcccagacccacaacctctcggagaacctccagcaacccccgctgctgtgggacctactacaatggcttcaggcggtggcgcaccaatggcggacaataacgaaggcgccgatggagtgggtaatgcctcaggaaattggcattgcgattccacatggctgggcgacagagtcatcaccaccagcacccgaacatgggccttgcccacctataacaaccacctctacaagcaaatctccagtgcttcaacgggggccagcaacgacaaccactacttcggctacagcaccccctgggggtattttgacttcaacagattccactgccacttctcaccacgtgactggcagcgactcatcaacaacaactggggattccggcccaagagactcagcttcaagctcttcaacatccaggtcaaggaggtcacgcagaatgaaggcaccaagaccatcgccaataacctcaccagcaccatccaggtgtttacggactcggagtaccagctgccgtacgttctcggctccgcccaccagggctgcctgcctccgttcccggcggacgtgttcatgattccccagtacggctacctaacactcaacaacggtagtcaggccgtgggacgctcctccttctactgcctggaatactttccttcgcagatgctgagaaccggcaacaacttccagtttacttacaccttcgaggacgtgcctttccacagcagctacgcccacagccagagcttggaccggctgatgaatcctctgattgaccagtacctgtactacttgtctcggactcaaacaacaggaggcacggcaaatacgcagactctgggcttcagccaaggtgggcctaatacaatggccaatcaggcaaagaactggctgccaggaccctgttaccgccaacaacgcgtctcaacgacaaccgggcaaaacaacaatagcaactttgcctggactgctgggaccaaataccatctgaatggaagaaattcattggctaatcctggcatcgctatggcaacacacaaagacgacaaggagcgtttttttcccagtaacgggatcctgatttttggcaaacaaaatgctgccagagacaatgcggattacagcgatgtcatgctcaccagcgaggaagaaatcaaaaccactaaccctgtggctacagaggaatacggtatcgtggcagataacttgcagcagcaaaacacggctcctcaaattggaactgtcaacagccagggggccttacccggtatggtctggcagaaccgggacgtgtacctgcagggtcccatctgggccaagattcctcacacggacggcaacttccacccgtctccgctgatgggcggctttggcctgaaacatcctccgcctcagatcctgatcaagaacacgcctgtacctgcggatcctccgaccaccttcaaccagtcaaagctgaactctttcatcacgcaatacagcaccggacaggtcagcgtggaaattgaatgggagctgcagaaggaaaacagcaagcgctggaaccccgagatccagtacacctccaactactacaaatctacaagtgtggactttgctgttaatacagaaggcgtgtactctgaaccccaccccattggcacccgttacctcacccgtcccctgtaa

SEQ ID NO: 2078 - DNA, 2211 bp, Artificial Sequence
  Description of Artificial Sequence: Synthetic polynucleotide
atggctgccgatggttatcttccagattggctcgaggacactctctctgaaggaataagacagtggtggaagctcaaacctggcccaccaccaccaaagcccgcagagcggcataaggacgacagcaggggtcttgtgcttcctgggtacaagtacctcggacccttcaacggactcgacaagggagagccggtcaacgaggcagacgccgcggccctcgagcacgacaaagcctacgaccagcagctccaagcgggtgacaatccgtacctgcggtataaccacgccgacgccgagtttcaggagcgtcttcaaggagatacgtcttttgggggcaacctcggacgagcagtcttccaggccaaaaagaggcttcttgaacctcttggtctggttgaggaagcggctaagacggctcctggaaagaagaggcctgtagagcagtctcctcaggaaccggactcctccgcgggtattggcaaatcgggtgcacagcccgctaaaaagagactcaatttcggtcagactggcgacacagagtcagtcccagaccctcaaccaatcggagaacctcccgcagccccctcaggtgtgggatctcttacaatggcttcaggtggtggcgcaccagtggcagacaataacgaaggtgccgatggagtgggtagttcctcgggaaattggcattgcgattcccaatggctgggggacagagtcatcaccaccagcacccgaacatgggccttgcccacctataacaaccacctctacaagcaaatctccagtgcttcaacgggggccagcaacgacaaccactacttcggctacagcaccccctgggggtattttgacttcaaccgcttccactgccacttctcaccacgtgactggcagcgactcatcaacaacaactggggattccggcccaagagactcagcttcaagctcttcaacatccaggtcaaggaggtcacgcagaatgaaggcaccaagaccatcgccaataacctcaccagcaccatccaggtgtttacggactcggagtaccagctgccgtacgttctcggctctgcccaccagggctgcctgcctccgttcccggcggacgtgttcatgattccccagtacggctacctaacactcaacaacggtagtcaggccgtgggacgctcctccttctactgcctggaatactttccttcgcagatgctgagaaccggcaacaacttccagtttacttacaccttcgaggacgtgcctttccacagcagctacgcccacagccagagcttggaccggctgatgaatcctctgattgaccagtacctgtactacttgtctcggactcaaacaacaggaggcacggcaaatacgcagactctgggcttcagccaaggtgggcctaatacaatggccaatcaggcaaagaactggctgccaggaccctgttaccgccaacaacgcgtctcaacgacaaccgggcaaaacaacaatagcaactttgcctggactgctgggaccaaataccatctgaatggaagaaattcattggctaatcctggcatcgctatggcaacacacaaagacgacaaggagcgtttttttcccagtaacgggatcctgatttttggcaaacaaaatgctgccagagacaatgcggattacagcgatgtcatgctcaccagcgaggaagaaatcaaaaccactaaccctgtggctacagaggaatacggtatcgtggcagataacttgcagcagcaaaacacggctcctcaaattggaactgtcaacagccagggggccttacccggtatggtctggcagaaccgggacgtgtacctgcagggtcccatctgggccaagattcctcacacggacggcaacttccacccgtctccgctgatgggcggctttggcctgaaacatcctccgcctcagatcctgatcaagaacacgcctgtacctgcggatcctccgaccaccttcaaccagtcaaagctgaactctttcatcacgcaatacagcaccggacaggtcagcgtggaaattgaatgggagctgcagaaggaaaacagcaagcgctggaaccccgagatccagtacacctccaactactacaaatctacaagtgtggactttgctgttaatacagaaggcgtgtactctgaaccccaccccattggcacccgttacctcacccgtcccctgtaa

SEQ ID NO: 2079 - DNA, 2217 bp, Artificial Sequence
  Description of Artificial Sequence: Synthetic polynucleotide
atggctgccgatggttatcttccagattggctcgaggacaacctctctgagggaataagacagtggtggaagctcaaacctggcccaccaccaccaaagcccgcagagcggcataaggacgacagcaggggtcttgtgcttcctgggtacaagtacctcggacccttcaacggactcgacaagggagagccggtcaacgcggcggacgcagcggccctcgagcacgacaaggcctacgaccagcagctcaaagcgggtgacaatccgtacctgcggtataaccacgccgacgccgagtttcaggagcgtctgcaagaagatacgtcttttgggggcaacctcgggcgagcagtcttccaggccaagaagcgggttctcgaacctctcggtctggttgaggaaggcgctaagacggctcctggaaagaagagaccggtagagccatcaccccagcgttctccagactcctctacgggcatcggcaagaaaggccagcagcccgctaaaaagagactcaattttggtcagactggcgactcagagtcagtccccgacccacaacctctcggagaacctccagcaacccccgctgctgtgggacctactacaatggcttcaggcggtggcgcaccaatggcagacaataacgaaggcgccgacggagtgggtaatgcctcaggaaattggcattgcgattccacatggctgggggacagagtcatcaccaccagcacccgaacctgggccctgcccacctacaacaaccacctctacaagcaaatctccaacgggacttcgggaggaagcaccaacgacaacacctacttcggctgcgtcacgccctgggggtattttgactttaacaaattccactgccacttttcaccggatgactggcaacgactcatcaacaacggctggggattccggactaagcgactcaacttcaagctcttcagcatgaaagtcaaaaagggtacggacaacactggaatcaagaccatcgcgaataaccttaccaacacggtccatgtcttcgcggactcggagtaccagttgccgtacgtcctcggctctgcgcaccagggctgcctccctccgttcccggcggacgtgttcatgattccgcagtacggctacctaacgctcaacaatggcagccaggcagtgggacggtcatccttttactgcctggaatatttcccatcgcagatgctgagaacgggcaacaactttaccttcagctacacctttgaggacgttcctttccacagcagctacgctcacagccagagtctggaccgtctcatgaatcctctgattgaccagtacctgtactacttgtctcggactcaaacaacaggaggcacggcaaatacgcagactctgggcttcagccaaggtgggcctaatacaatggccaatcaggcaaagaactggctgccaggaccctgttaccgccaacaacgcgtctcaacgacaaccgggcaaaacaacaatagcaactttgcctggactgctgggaccaaataccatctgaatggaagaaattcattggctaatcctggcatcgctatggcaacacacaaagacgacaaggagcgtttttttcccagtaacgggatcctgatttttggcaaacaaaatgctgccagagacaatgcggattacagcgatgtcatgctcaccagcgaggaagaaatcaaaaccactaaccctgtggctacagaggaatacggtatcgtggcagataacttgcagcagcaaaacacggctcctcaaattggaactgtcaacagccagggggccttacccggtatggtctggcagaaccgggacgtgtacctgcagggtcccatctgggccaagattcctcacacggacggcaacttccacccgtctccgctgatgggcggctttggcctgaaacatcctccgcctcagatcctgatcaagaacacgcctgtacctgcggatcctccgaccaccttcaaccagtcaaagctgaactctttcatcacgcaatacagcaccggacaggtcagcgtggagatcgagtgggagctgcagaaggaaaacagcaagcgctggaacccggagatccagtacacctccaactactacaaatctacaagtgtggactttgctgttaatacagaaggcgtgtactctgaaccccaccccattggcacccgttacctcacccgtcccctgtaa

SEQ ID NO: 2080 - DNA, 2214 bp, Artificial Sequence
  Description of Artificial Sequence: Synthetic polynucleotide
atggctgccgatggttatcttccagattggctcgaggacactctctctgaaggaataagacagtggtggaagctcaaacctggcccaccaccaccaaagcccgcagagcggcataaggacgacagcaggggtcttgtgcttcctgggtacaagtacctcggacccttcaacggactcgacaagggggagcccgtcaacgcggcggacgcagcggccctcgagcacgacaaggcctacgaccagcagctcaaagcgggtgacaatccgtacctgcggtataaccacgccgacgccgagtttcaggagcgtctgcaagaagatacgtcttttgggggcaacctcgggcgagcagtcttccaggccaagaagcgggttctcgaacctctcggtctggttgaggaaggcgctaagacggctcctggaaagaagagaccggtagagccatcaccccagcgttctccagactcctctacgggcatcggcaagaaaggccagcagcccgcgaaaaagagactcaactttgggcagactggcgactcagagtcagtgcccgaccctcaaccaatcggagaaccccccgcaggcccctctggtctgggatctggtacaatggctgcaggcggtggcgctccaatggcagacaataacgaaggcgccgatggagtgggtagttcctcgggaaattggcattgcgattccacatggctgggggacagagtcatcaccaccagcacccgaacctgggccctgcccacctacaacaaccacctctacaaacaaatttccagcgcttcaacgggagcctcgaacgacaatcactactttggctacagcaccccctgggggtattttgacttcaacagattccactgccacttctcaccacgtgactggcagcgactcatcaacaacaactggggattccggcctaagcgactcaacttcaagctcttcaacattcaggtcaaagaggttacggacaacaatggagtcaagaccatcgccaataaccttaccagcacggtccaggtcttcacggactcggagtaccagttgccgtacgtcctcggctctgcgcaccagggctgcctccctccgttcccggcggacgtgttcatgattccgcagtacggctacctaacgctcaacaatggcagccaggcagtgggacggtcatccttttactgcctggaatatttcccatcgcagatgctgagaacgggcaacaactttaccttcagctacacctttgaggacgttcctttccacagcagctacgctcacagccagagtctggaccgtctcatgaatcctctgattgaccagtacctgtactacttgtctcggactcaaacaacaggaggcacggcaaatacgcagactctgggcttcagccaaggtgggcctaatacaatggccaatcaggcaaagaactggctgccaggaccctgttaccgccaacaacgcgtctcaacgacaaccgggcaaaacaacaatagcaactttgcctggactgctgggaccaaataccatctgaatggaagaaattcattggctaatcctggcatcgctatggcaacacacaaagacgacaaggagcgtttttttcccagtaacgggatcctgatttttggcaaacaaaatgctgccagagacaatgcggattacagcgatgtcatgctcaccagcgaggaagaaatcaaaaccactaaccctgtggctacagaggaatacggtatcgtggcagataacctgcagcagcaaaacacggctcctcaaattggaactgtcaacagccagggggccttacccggtatggtctggcagaaccgggacgtgtacctgcagggtcccatctgggccaagattcttcacacggacggcaactttcacccttctccgctgatgggagggtttggaatgaagcacccgcctcctccgatcctgatcaagaacacgcctgtacctgcggatcctccgaccaccttcaaccagtcaaagctgaactctttcatcacgcaatacagcaccggacaggtcagcgtggaaattgaatgggagctgccgaaggaaaacagcaagcgctggaaccccgagatccagtacacctccaactactacaaatctacaagtgtggactttgctgttaatacagaaggtgtgtactatgaaccccaccccattggcacccgttacctcacccctcccctgtaa

SEQ ID NO: 2081 - DNA, 2214 bp, Artificial Sequence
  Description of Artificial Sequence: Synthetic polynucleotide
atggctgccgatggttatcttccagattggctcgaggacaacctctctgagggcattcgcgagtggtgggcgctgaaacctggagccccgaagcccaaagccaaccagcaaaagcaggacgacggccggggtctggtgcttcctggctacaagtacctcggacccttcaacggactcgacaagggggagcccgtcaacgcggcggacgcagcggccctcgagcacgacaaggcctacgaccagcagctcaaagcgggtgacaatccgtacctgcggtataaccacgccgacgccgagtttcaggagcgtctgcaagaagatacgtcttttgggggcaacctcgggcgagcagtcttccaggccaagaagcgggttctcgaacctctcggtctggttgaggaaggcgctaagacggctcctggaaagaagagaccggtagagccatcaccccagcgctctccagactcctctacgggcatcggcaagaaaggccaacagcccgccagaaaaagactcaattttggtcagactggcgactcagagtcagttccagaccctcaacctctcggagaacctccagcagcgccctctggtgtggcacctaatacaatggctgcaggcggtggcgcaccaatggcagacaataacgaaggcgccgacggagtgggtaatgcctcaggaaattggcattgcgattccacatggctgggcgacagagtcatcaccaccagcacccgaacatgggccttgcccacctataacaaccacctctacaagcaaatctccagtgcttcaacgggggccagcaacgacaaccactacttcggctacagcaccccctgggggtattttgatttcaacagattccactgccacttttcaccacgtgactggcagcgactcatcacaacaattgggggattccggcctaagcgactcaacttcaagctcttcaacattcaggtcaaagaggttacggacaacaatggagtcaagaccatcgccaataaccttaccagcacggtccaggtcttcacggactcggagtaccagttgccgtacgtcctcggctctgcgcaccagggctgcctccctccgttcccggcggacgtgttcatgattccgcagtacggctacctaacgctcaacaatggcagccaggcagtgggacggtcatccttttactgcctggaatatttcccatcgcagatgctgagaacgggcaacaactttaccttcagctacacctttgaggacgttcctttccacagcagctacgctcacagccagagtctggaccggctgatgaatcctctgattgaccagtacctgtactacttgtctcggactcaaacaacaggaggcacggcaaatacgcagactctgggcttcagccaaggtgggcctaatacaatggccaatcaggcaaagaactggctgccaggaccctgttaccgccaacaacgcgtctcaacgacaaccgggcaaaacaacaatagcaactttgcctggactgctgggaccaaataccatctgaatggaagaaattcattggctaatcctggcatcgctatggcaacacacaaagacgacaaggagcgtttttttcccagtaacgggatcctgatttttggcaaacaaaatgctgccagagacaatgcggattacagcgatgtcatgctcaccagcgaggaagaaatcaaaaccactaaccctgtggctacagaggaatacggtatcgtggcagataacttgcagcagcaaaacacggctcctcaaattggaactgtcaacagccagggggccttacccggtatggtctggcagaaccgggacgtgtacctgcagggtcccatctgggccaagattcctcacacggacggcaacttccacccgtctccgctgatgggcggctttggcctgaaacatcctccgcctcagatcctgatcaagaacacgcctgtacctgcggatcctccgaccaccttcaaccagtcaaagctgaactctttcatcacgcaatacagcaccggacaggtcagcgtggaaattgaatgggagctgcagaaggaaaacagcaagcgctggaaccccgagatccagtacacctccaactactacaaatctacaagtgtggactttgctgttaatacagaaggcgtgtactctgaaccccaccccattggcacccgttacctcacccgtcccctgtaa

SEQ ID NO: 2082 - DNA, 2211 bp, Artificial Sequence
  Description of Artificial Sequence: Synthetic polynucleotide
atggctgccgatggttatcttccagattggctcgaggacactctctctgaaggaataagacagtggtggaagctcaaacctggcccaccaccaccaaagcccgcagagcggcataaggacgacggccggggtctggtgcttcctggctacaagtacctcggacccttcaacggactcgacaagggggagcccgtcaacgcggcggacgcagcggccctcgagcacgacaaggcctacgaccagcagctcaaagcgggtgacaatccgtacctgcggtataaccacgccgacgccgagtttcaggagcgtctgcaagaagatacgtcttttgggggcaacctcggacgagcagtcttccaggcgaaaaagagggttcttgaacctctgggcctggttgaggaacctgttaagacggctccgggaaaaaagaggccggtagagcagtcgccacaagagccagactcctcctcgggcatcggcaagaaaggccagcagcccgctaaaaagagactcaattttggtcagactggcgactcagagtcagtccccgacccacaacctctcggagaacctccagcaacccccgctgctgtgggacctactacaatggcttcaggcggtggcgcaccaatggcagacaataacgaaggcgccgacggagtgggtaatgcctcaggaaattggcattgcgattccacatggatgggcgacagagtcatcaccaccagcacccgaacatgggccttgcccacctataacaaccacctctacaagcaaatctccagtgcttcaacgggggccagcaacgacaaccactacttcggctacagcaccccctgggggtattttgactttaacagattccactgccacttttcaccacgtgactggcagcgactcatcaacaacaactggggattccggcctaagcgactcaacttcaagctcttcaacattcaggtcaaggaggtcacgcagaatgaaggcaccaagaccatcgccaataacctcaccagcaccatccaggtgtttacggactcggagtaccagctgccgtacgttctcggctccgcccaccagggctgcctgcctccgttcccggcggacgtgttcatgatcccccagtacggctacctaacactcaacaacggtagtcaggccgtgggacgctcctccttctactgcctggaatactttccttcgcagatgctgagaaccggcaacaacttccagtttacttacaccttcgaggacgtgcctttccacagcagctacgcgcacagccagagcttggaccggctgatgaatcctctgattgaccagtacctgtactacttgtctcggactcaaacaacaggaggcacggcaaatacgcagactctgggcttcagccaaggtgggcctaatacaatggccaatcacgcaaagaactggctgccaggaccctgttaccgccaacaacgcgtctcaacgacaaccgggcaaaacaacaatagcaactttgcctggactgctgggaccaaataccatctgaatggaagaaattcattggctaatcctggcatcgctatggcaacacacaaagacgacaaggagcgtttttttcccagtaacgggatcctgatttttggcaaacaaaatgctgccagagacaatgcggattacagcgatgtcatgctcaccagcgaggaagaaatcaaaaccactaaccctgtggctacagaggaatacggtatcgtggcagataacttgcagcagcaaaacacggctcctcaaattggaactgtcaacagccagggggccttacccggtatggtctggcagaaccgggacgtgtacctgcagggtcccatctgggccaagattcctcacacggacggcaacttccacccgtctccgctgatgggcggcttcggcctgaaacatcctccgcctcagatcctgatcaagaacacgcctgtacctgcggatcctccgaccaccttcaaccagtcaaagctgaactctttcatcacgcaatacagcaccggacaggtcagcgtggaaattgaatgggagctgcagaaggaaaacagcaagcgctggaaccccgagatccagtacacctccaactactacaaatctacaagtgtggactttgctgttaatacagaaggcgtgtactctgaaccccaccccattggcacccgttacctcacccgtcccctgtaa

SEQ ID NO: 2083 - DNA, 2214 bp, Artificial Sequence
  Description of Artificial Sequence: Synthetic polynucleotide
atggctgccgatggttatcttccagattggctcgaggacaacctctctcagggcattcgcgagtggtgggacttgaaacctggagccccgaaacccaaagccaaccagcaaaagcaggacgacggccggggtctggtgcttcctggctacaagtacctcggacccttcaacggactcgacaagggggagcccgtcaacgcggcggacgcagcggccctcgagcacgacaaggcctacgaccagcagctcaaagcgggtgacaatccgtacctgcggtataaccacgccgacgccgagtttcaggagcgtctgcaagaagatacgtcttttgggggcaacctcggacgagcagtcttccaggccaagaagcgggttctcgaacctctcggtctggttgaggaaggcgctaagacggctcctggaaagaagagaccggtagagccatcaccccagcgttctccagactcctctacgggcatcggcaagaaaggccaacagcccgccagaaaaagactcaattttggtcagactggcgactcagagtcagttccagaccctcaacctctcggagaacctccagcagcgcccgctgctgtgggacctactacaatggcttcaggcggtggcgcaccaatggcagacaataacgaaggcgccgacggagtgggtagttcctcgggaaattggcattgcgattcccaatggctgggggacagagtcatcaccaccagcacccgaacctgggccctgcccacctacaacaaccacctctacaagcaaatctccagtgcttcaacgggggccagcaacgacaaccactacttcggctacagcaccccctgggggtattttgacttcaacagattccactgccacttttcaccacgtgactggcaaagactcatcaacaacaactggggattccggcccaagagactcagcttcaagctcttcaacatccaggtcaaggaggtcacgcagaatgaaggcaccaagaccatcgccaataacctcaccagcaccatccaggtgtttacggactcggagtaccagctgccgtacgttctcggctctgcccaccagggctgcctgcctccgttcccggcggacgtgttcatgattccccagtacgggtacctgactctgaacaatggcagtcaggccgtgggccgttcctccttctactgcctggagtactttccttctcaaatgctgagaaccggcaacaacttccagtttacttacaccttcgaggacgtgcctttccacagcagctacgcccacagccagagcttggaccggctgatgaatcctctgattgaccagtacctgtactacttgtctcggactcaaacaacaggaggcacgacaaatgcgcagactctgggcttcagccaaggtgggcctaatacaatggccaatcaggcaaagaactggctgccaggaccctgttaccgccaacaacgcgtctcaacgacaaccgggcaaaacaacaatagcaactttgcctggactgctgggaccaaataccatctgaatggaagaaattcattggctaatcctggcatcgctatggcaacacacaaagacgacaaggagcgtttttttcccagtaacgggatcctgatttttggcaaacaaaatgctgccagagacaatgcggattacagcgatgtcatgctcaccagcgaggaagaaatcaaaaccactaaccctgtggctacagaggaatacggtatcgtggcagataacttgcagcagcaaaacacggctcctcaaattggaactgtcaacagccagggggccttacccggtatggtctggcagaaccgggacgtgtacctgcagggtcccatctgggccaagattcctcacacggacggcaacttccacccgtctccgctgatgggcggctttggcctgaaacatcctccgcctcagatcctgatcaagaacacgcctgtacctgcggatcctccgaccaccttcaaccagtcaaagctgaactctttcatcacacagtactccacgggacaggtcagcgtggaaattgaatgggagctgcagaaggaaaacagcaagcgctggaacccggagatccagtacacttccaactactacaaatctacaaatgtggactttgctgttaacacagaaggcgtgtactctgaaccccaccccattggcacccgttacctcacccgtcccctgtaa

SEQ ID NO: 2084 - DNA, 2211 bp, Artificial Sequence
  Description of Artificial Sequence: Synthetic polynucleotide
atggctgccgatggttatcttccagattggctcgaggacaacctctctgagggcattcgcgagtggtgggacttgaaacctggagccccgaaacccaaagccaaccagcaaaagcaggacgacggccggggtctggtgcttcctggctacaagtacctcggacccttcaacggactcgacaagggggagcccgtcaacgcggcggacgcagcggccctcgagcacgacaaggcctacgaccagcagctcaaagcgggtgacaatccgtacctgcggtataaccacgccgacgccgagtttcaggagcgtctgcaagaagatacgtcttttgggggcaacctcgggcgagcagtcttccaggccaagaagagggttctcgaaccttttggtctggttgaggaaggcgctaagacggctcctggaaagaaacgtccggtagagcagtcgccacaagagccagactcctcctcgggcatcggcaagacaggccagcagcccgctaaaaagagactcaatttcggtcagactggcgacacagagtcagtcccagaccctcaaccaatcggagaacctcccgcagccccctcaggtgtgggacctaatacaatggctgcaggcggtggcgcaccaatggcagacaataacgaaggcgccgacggagtgggtagttcctcgggaaattggcattgcgattccacatggatgggtgacagagtcatcaccaccagcacccgaacctgggccctgcccacctacaataaccacctctacaagcaaatctccagtgcttcaacgggggccagcaacgacaaccactacttcggctacagcaccccctgggggtattttgacttcaacagattccactgccacttctcaccacgtgactggcagcgactcatcaacaacaactggggattccggcctaagcgactcaacttcaagctcttcaacattcaggtcaaggaggtcacgcagaatgaaggcaccaagaccatcgccaataacctcaccagcaccatccaggtgtttacggactcggagtaccagctgccgtacgttctcggctctgcccaccagggctgcctgcctccgttcccggcggacgtgttcatgattccccagtacggctacctaacactcaacaacggtagtcaggccgtgggacgctcctccttctactgcctggaatactttccttcgcagatgctgagaaccggcaacaacttccagtttacttacaccttcgaggacgtgcctttccacagcagctacgcccacagccagagcttggaccggctgatgaatcctctgattgaccagtacctgtactacttgtctcggactcaaacaacaggaggcacggcaaatacgcagactctgggcttcagccaaggtgggcctaatacaatggccaatcaggcaaagaactggctgccaggaccctgttaccgccaacaacgcgtctcaacgacaaccgggcaaaacaacaatagcaactttgcctggactgctgggaccaaataccatctgaatggaagaaattcattggctaatcctggcatcgctatggcaacacacaaagacgacaaggagcgtttttttcccagtaacgggatcctgatttttggcaaacaaaatgctgccagagacaatgcggattacagcgatgtcatgctcaccagcgaggaagaaatcaaaaccactaaccctgtggctacagaggaatacggtatcgtggcagataacttgcagcagcaaaacacggctcctcaaattggaactgtcaacagccagggggccttacccggtatggtctggcagaaccgggacgtgtacctgcagggtcccatctgggccaagattcctcacacggacggcaacttccacccgtctccgctgatgggcggctttggcctgaaacatcctccgcctcagatcctgatcaagaacacgcctgtacctgcggatcctccgaccaccttcaaccagtcaaagctgaactctttcatcacacagtactccacgggacaggtcagcgtggaaattgaatgggagctgcagaaggaaaacagcaagcgctggaacccggagatccagtacacttccaactactacaaatctacaaatgtggactttgctgttaacacagaaggcgtgtactctgaaccccaccccattggcacccgttacttcacccgtcccctgtaa

SEQ ID NO: 2085 - DNA, 2211 bp, Artificial Sequence
  Description of Artificial Sequence: Synthetic polynucleotide
atggctgccgatggttatcttccagattggctcgaggacaacctctctgagggcattcgcgagtggtgggacttgaaacctggagccccgaaacccaaagccaaccagcaaaagcaggacgacggccggggtctggtgcttcctggctacaagtacctcggacccttcaacggactcgacaagggggagcccgtcaacgcggcggacgcagcggccctcgagcacgacaaggcctacgaccagcagctcaaagcgggtgacaatccgtacctgcggtataaccacgccgacgccgagtttcaggagcgtctgcaagaagatacgtcttttgggggcaacctcgggcgagcagtcttccaggccaagaagcgggttctcgaacctctcggtctggttgaggaaggcgctaagacggctcctggaaagaaacgtccggtagagcagtcgccacaagagccagactcctcctcgggcatcggcaagacaggccagcagcccgctaaaaaaagactcaattttggtcagactggcgactcagagtcagttccagaccctcaacctctcggagaacctccagcaacccccgctgctgtgggacctactacaatggcttcaggtggtggcgcaccaatggcagacaataacgagggcgccgacggagtgggtaattcctcgggaaattggcattgcgattccacatggatgggcgacagagtcatcaccaccagcacccgaacctgggccctgcccacctacaacaatcacctctacaagcaaatctccagtgcttcaacgggggccagcaacgacaaccactacttcggctacagcaccccctgggggtattttgacttcaacagattccactgccacttctcaccacgtgactggcagcgactcatcaacaacaactggggattccggcctaagcgactcaacttcaagctcttcaacattcaggtcaaagaggttacggacaacaatggagtcaagaccatcgccaataaccttaccagcacggtccaggtcttcacggactcggagtaccagttgccgtacgtcctcggctctgcgcaccagggctgcctccctccgttcccggcggacgtgttcatgattccgcagtacggctacctaacgctcaacaacggtagtcaggccgtgggacgctcctccttctactgcctggaatactttccttcgcagatgctgagaaccggcaacaacttccagtttacttacaccttcgaggacgtgcctttccacagcagctacgcccacagccagagcttggaccggctgatgaatcctctgattgaccagtacctgtactacttgtctcggactcaaacaacaggaggcacggcaaatacgcagactctgggcttcagccaaggtgggcctaatacaatggccaatcaggcaaagaactggctgccaggaccctgttaccgccaacaacgcgtctcgacgacaaccgggcaaaacaacaatagcaactttgcctggactgctgggaccaaataccatctgaatggaagaaattcattggctaatcctggcatcgctatggcaacacacaaagacgacaaggagcgtttttttcccagtaacgggatcctgatttttggcaaacaaaatgctgccagagacaatgcggattacagcgatgtcatgctcaccagcgaggaagaaatcaaaaccactaaccctgtggctacagaggaatacggtatcgtggcagataacttgcagcagcaaaacacggctcctcaaattggaactgtcaacagccagggggccttacccggtatggtttggcagaaccgggacgtgtacctgcagggtcccatctgggccaagattcctcacacggacggcaacttccacccgtctccgctgatgggcggctttggcctgaaacatcctccgcctcagatcctgatcaagaacacgcctgtacctgcggatcctccgaccaccttcaaccagtcaaagctgaactctttcatcacacagtactccacgggacaggtcagcgtggaaattgaatgggagctgcagaaggaaaacagcaagcgctggaacccggagatccagtacacttccaactactacaaatctacaaatgtggactttgctgttaacacagaaggcgtgtactctgaaccccaccccattggcacccgttacctcacccgtcccctgtaa

SEQ ID NO: 2086 - DNA, 2211 bp, Artificial Sequence
  Description of Artificial Sequence: Synthetic polynucleotide
atggctgccgatggttatcttccagattggctcgaggacaacctctctgagggcattcgcgagtggtgggacttgaaacctggagccccgaagcccaaagccaaccagcaaaagcaggacgacggccggggtctggtgcttcctggctacaagtacctcggacccttcaacggactcgacaagggggagcccgtcaacgcggcggacgcagcggccctcgagcacgacaaggcctacgaccagcagctcaaagcgggtgacaatccgtacctgcggtataaccacgccgacgccgagtttcaggagcgtctgcaagaagatacgtcttttgggggcaacctcgggcgagcagtcttccaggccaagaagcgggttctcgaacctctcggtctggttgaggaaggcgctaagacggctcctggaaagaaacgtccggtagagcagtcaccacaagagccagactcctcctcgggcatcggcaagacaggccagcagcccgctaaaaagagactcaattttggtcagactggcgactcagagtcagtccccgacccacaacctctcggagaacctccagcaacccccgctgctgtgggacctactacaatggcttcaggcggtggcgcaccaatggcggacaataacgaaggcgccgatggagtgggtaatgcctcaggaaattggcattgcgattccacatggctgggcgacagagtcatcaccaccagcacccgaacatgggccttgcccacctataacaaccacctctacaagcaaatctccagtgcttcaacgggggccagcaacgacaaccactacttcggctacagcaccccctgggggtattttgactttaacagattccactgccacttctcaccacgtgactggcagcgactcatcaacaacaactggggattccggcccaagagactcaacttcaagctcttcaacatccaggtcaaggaggtcacgcagaatgaaggcaccaagaccatcgccaataacctcaccagcaccatccaggtgtttacggactcggagtaccagctgccgtacgttctcggctctgcccaccagggctgcctgcctccgttcccggcggacgtgttcatgattccccagtacggctacctgactctgaacaatggcagtcaggccgtgggccgttcctccttctactgcctagagtactttccttctcaaatgctgagaacgggcaacaactttgagttcagctaccagtttgaggacgtgccttttcacagcagctacgcgcacagccaaagcctggaccggctgatgaatcctctgattgaccagtacctgtactacttgtctcggactcaaacaacaggaggcacggcaaatacgcagactctgggcttcagccaaggtgggcctaatacaatggccaatcaggcaaagaactggctgccaggaccctgttaccgccaacaacgcgtctcaacgacaaccgggcaaaacaacaatagcaactttgcctggactgctgggaccaaataccatatgaatggaagaaattcattggttaatcctggcatcgctatggcaacacacaaagacgacaaggagcgtttttttcccagtaacgggatcctgatttttggcaaacaaaatgttgccagagacaatgcggattacagcgatgtcatgctcaccagcgaggaagaaatcaaaaccactaaccctgtggctacagaggaatacggtattgtggcagataacttgcagcagcaaaacacggctcctcaaattggaactgtcaacagccagggggccttacccggtatggtctggcagaaccgggacgtgtacctgcagggtcccatctgggccaagattcctcacacggacggcaacttccacccgtcgccgctgatgggcggctttggcctgaaacatcctccgcctcagatcctgatcaagaacacgcctgtacctgcggatcctccgaccaccttcaaccagtcaaagctgaactctttcatcacgcaatacagcaccggacaggtcagcgtggaaattgaatgggagctgcagaaggaaaacagcaagcgctggaaccccgagatccagtacacctccaactactacaaatctacaagtgtggactttgctgttaatacagaaggcgtgtactctgaaccccaccccattggcacccgttacctcacccgtcccctgtaa

SEQ ID NO: 2087 - protein, 736 aa, Artificial Sequence
  Description of Artificial Sequence: Synthetic polypeptide
MAADGYLPDWLEDTLSEGIRQWWKLKPGPPPPKPAERHKDDSRGLVLPGYKYLGPFNGLDKGEPVNEADAAALEHDKAYDRQLDSGDNPYLKYNHADAEFQERLKEDTSFGGNLGRAVFQAKKRVLEPLGLVEEPVKTAPGKKRPVEQSPQEPDSSSGIGKKGQQPAKKRLNFGQTGDSESVPDPQPLGEPPATPAAVGPTTMASGGGAPMADNNEGADGVGNASGNWHCDSTWMGDRVITTSTRTWALPTYNNHLYKQISSASTGASNDNHYFGYSTPWGYFDFNRFHCHFSPRDWQRLINNNWGFRPKRLNFRLFNIQVKEVTDNNGVKTIANNLTSTVQVFTDSEYQLPYVLGSAHQGCLPPFPADVFMIPQYGYLTLNNGSQAVGRSSFYCLEYFPSQMLRTGNNFTFSYTFEEVPFHSSYAHSQSLDRLMNPLIDQYLYYLSRTQTTGGTANTQTLGFSQGGPNTMANQAKNWLPGPCYRQQRVSTTTGQNNNSNFAWTAGTKYHLNGRNSLANPGIAMATHKDDKERFFPSNGILIFGKQNAARDNADYSDVMLTSEEEIKTTNPVATEEYGIVADNLQQQNTAPQIGTVNSQGALPGMVWQNRDVYLQGPIWAKIPHTDGNFHPSPLMGGFGLKHPPPQILIKNTPVPADPPTTFNQSKLNSFITQYSTGQVSVEIEWELQKENSKRWNPEIQYTSNYYKSTSVDFAVNTEGVYSEPHPIGTRYLTRPL

SEQ ID NO: 2088 - protein, 736 aa, Artificial Sequence
  Description of Artificial Sequence: Synthetic polypeptide
MAADGYLPDWLEDNLSEGIREWWDLKPASPKPKANQQKQDDGRGLVLPGYKYLGPFNGLDKGEPVNAADAAALEHDKAYDQQLKAGDNPYLRYNHADAEFQERLQEDTSFGGNLGRAVFQAKKRLLEPLGLVEEAAKTAPGKKRPVEQSPQEPDSSAGIGKSGAQPAKKRLNFGQTGGTESVPDPQPLGEPPAAPSGVGPNTMAAGGGAPMADNNEGADGVGSSSGNWHCDSTWLGDRVITTSTRTWALPTYNNHLYKQISSASTGASNDNHYFGYSTPWGYFDFNRFHCHFSPRDWQRLINNNWGFRPKRLSFKLFNIQVKEVTQNEGTKTIANNLTSTIQVFTDSEYQLPYVLGSAHQGCLPPFPADVFMIPQYGYLTLNNGSQAVGRSSFYCLEYFPSQMLRTGNNFQFTYTFEDVPFHSSYAHSQSLDRLMNPLIDQYLYYLSRTQTTGGTANTQTLGFSQGGPNTMANQAKNWLPGPCYRQQRVSTTTGQNNNSNFAWTAGTKYHLNGRNSLANPGIAMATHKDDKERFFPSNGILIFGKQNAARDNADYSDVMLTSEEEIKTTNPVATEEYGIVADNLQQQNTAPQIGTVNSQGALPGMVWQNRDVYLQGPIWAKIPHTDGNFHPSPLMGGFGLKHPPPQILIKNTPVPADPPTTFNQSKLNSFITQYSTGQVSVEIEWELQKENSKRWNPEIQYTSNYYKSTSVDFAVNTEGVYSEPHPIGTRYLTRPL

SEQ ID NO: 2089 - protein, 736 aa, Artificial Sequence; identical to SEQ ID NO: 2028
  Description of Artificial Sequence: Synthetic polypeptide

SEQ ID NO: 2090 - protein, 736 aa, Artificial Sequence
  Description of Artificial Sequence: Synthetic polypeptide
MAADGYLPDWLEDNLSEGIREWWDLEPGAPKPKANQQKQDDGRGLVLPGYKYLGPFNGLDKGEPVNAADAAALEHDKAYDQQLKAGDNPYLRYNHADAEFQERLQEDTSFGGNLGRAVFQAKKRVLEPLGLVEEGAKTAPGKKRPVEQSPQEPDSSSGIGKTGQQPAKKRLNFGQTGDSESVPDPQPLGEPPATPAAVGPTTMASGGGAPMADNNEGADGVGNASGNWHCDSTWLGDRVITTSTRTWALPTYNNHLYKQISSASTGASNDNHYFGYSTPWGYFDFNRFHCHFSPRDWQRLINNNWGFRPKRLNFKLFNIQVKEVTDNNGVKTIANNLTSTVQVFTDSEYQLPYVLGSAHQGCLPPFPADVFMIPQYGYLTLNNGSQAVGRSSFYCLEYFPSQMLRTGNNFQFTYTFEDVPFHSSYAHSQSLDRLMNPLIDQYLYYLSRTQTTGGTANTQTLGFSQGGPNTMANQAKNWLPGPCYRQQRVSTTTGQNNNSNFAWTAGTKYHLNGRNSLANPGIAMATHKDDKERFFPSNGILIFGKQNAARDNADYSDVMLTSEEEIKTTNPVATEEYGIVADNLQQQNTAPQIGTVNSQGALPGMVWQNRDVYLQGPIWAKIPHTDGNFHPSPLMGGFGLKHPPPQILIKNTPVPADPPTTFNQSKLNSFITQYSTGQVSVEIEWELQKENSKRWNPEIQYTSNYYKSTSVDFAVNTEGVYSEPHPIGTRYLTRPL

SEQ ID NO: 2091 - protein, 736 aa, Artificial Sequence; identical to SEQ ID NO: 2028
  Description of Artificial Sequence: Synthetic polypeptide

SEQ ID NO: 2092 - protein, 736 aa, Artificial Sequence
  Description of Artificial Sequence: Synthetic polypeptide
MAADGYLPDWLEDTLSEGIRQWWKLKPGPPPPKPAERHKDDSRGLVLPGYKYLGPFNGLDKGEPVNEADAAALEHDKAYDRQLDSGDNPYLKYNHADAEFQERLKEDTSFGGNLGRAVFQAKKRVLEPLGLVEEPVKTAPGKKRPVEQSPQEPDSSSGIGKKGQQPAKKRLNFGQTGDSESVPDPQPLGEPPATPAAVGPTTMASGGGAPMADNNEGADGVGNASGNWHCDSTWLGDRVITTSTRTWALPTYNNHLYKQISSASTGASNDNHYFGYSTPWGYFDFNRFHCHFSPRDWQRLINNNWGFRPKRLNFKLFNIQVKEVTDNNGVKTIANNLTSTVQVFTDSDYQLPYVLGSAHQGCLPPFPADVFMIPQYGYLTLNNGSQAVGRSSFYCLEYFPSQMLRTGNNFQFTYTFEDVPFHSSYAHSQSLDRLMNPLIDQYLYYLSRTQTTGGTANTQTLGFSQGGPNTMANQAKNWLPGPCYRQQRVSTTTGQNNNSNFAWTAGTKYHLNGRNSLANPGIAMATHKDDKERFFPSNGILIFGKQNAARDNADYSDVMLTSEEEIKTTNPVATEEYGIVADNLQQQNTAPQIGTVNSQGALPGMVWQNRDVYLQGPIWAKIPHTDGNFHPSPLMGGFGLKHPPPQILIKNTPVPADPPTTFNQSKLNSFITQYSTGQVSVEIEWELQKENSKRWNPEIQYTSNYYKSTSVDFAVNTEGVYSEPHPIGTRYLTRPL

SEQ ID NO: 2093 - protein, 734 aa, Artificial Sequence
  Description of Artificial Sequence: Synthetic polypeptide
MAADGYLPDWLEDTLSEGIRQWWKLKPGPPPPKPAERHKDDSRGLVLPGYKYLGPFNGLDKGEPVNEADAAALEHDKAYDQQLQAGDNPYLRYNHADAEFQERLQGDTSFGGNLGRAVFQAKKRLLEPLGLVEEAAKTAPGKKRPVEQSPQEPDSSAGIGKSGAQPAKKRLNFGQTGDTESVPDPQPIGEPPAAPSGVGSLTMASGGGAPVADNNEGADGVGSSSGNWHCDSQWLGDRVITTSTRTWALPTYNNHLYKQISSASTGASNDNHYFGYSTPWGYFDFNRFHCHFSPRDWQRLINNNWGFRPKRLSFKLFNHPGQGGHAERHQDHRQPHQHIQVFTDSEYQLPYVLGSAHQGCLPPFPADVFMIPQYGYLTLNNGSQAVGRSSFYCLEYFPSQMLRTGNNFQFTYTFEDVPFHSSYAHSQSLDRLMNPLIDQYLYYLSRTQTTGGTANTQTLGFSQGGPNTMANQAKNWLPGPCYRQQRVSTTTGQNNNSNFAWTAGTKYHLNGRNSLGNPGIAMATHKDDKERFFPSNGILIFGKQNAARDNADYSDVMLTSEEEIKTTNPVATEEYGIVADNLQQQNTAPQIGTVNSQGALPGMVWQNRDVYLQGPIWAKIPHTDGNFHPSPLMGGFGLKHPPPQILIKNTPVPADPPTAFNQSKLNSFITQYSTGQVSVEIEWELQKENSKRWNPEIQYTSNYYKSTSVDFAVNTEGVYSEPHPIGTRYLTRPL

SEQ ID NO: 2094 - protein, 737 aa, Artificial Sequence
  Description of Artificial Sequence: Synthetic polypeptide
MAADGYLPDWLEDNLSEGIREWWDLKHGAPKPKANQQKQDDGRGLVLPGYKYLGPFNGLDKGEPVNAADAAALEHDKAYDQQLKAGDNPYLRYNHADAEFQERLQEDTSFGGNLGRAVFQAKKRVLEPFGLVEEGAKTAPGKKRPVEQSPQEPDSSSGIGKTGQQPAKKRLNFGQTGDSESVPDPQPLGEPPATPAAVGPTTMASGGGAPMADNNEGADGVGNASGNWHCDSTWLGDRVITTSTRTWALPTYNNHLYKQISNGTSGGSTNDNTYFGYSTPWGYFDFNRFHCHFSPRDWQRLINNNWGFRPKRLNFKLFNIQVKEVTQNEGTKTIANNLTSTIQVFTDSEYQLPYVLGSAHQGCLPPFPADVFMIPQYGYLTLNNGSQAVGRSSFYCLEYFPSQMLRTGNNFTFSYTFEDVPFHSSYAHSQSLDRLMNPLIDQYLYYLSRTQTTGGTANTQTLGFSQGGPNTMANQAKNWLPGPCYRQQRVSTTTGQNNNSNFAWTAGTKYHLNGRNSLANPGIAMATHKDDKERFFPSNGILIFGKQNAARDNADYSDVMLTSEEEIKTTNPVATEEYGIVADNLQQQNTAPQIGTVNSQGALPGMVWQNRDVYLQGPIWAKIPHTDGNFHPSPLMGGFGLKHPPPQILIKNTPVPADPPTTFNQSKLNSFITQYSTGQVSVEIEWELQKENSKRWNPEIQYTSNYYKSTSVDFAVNTEGVYSDPHPIGTRYLTRPL

SEQ ID NO: 2095 - protein, 737 aa, Artificial Sequence
  Description of Artificial Sequence: Synthetic polypeptide
MAADGYLPDWLEDNLSEGIREWWALKPGAPKPKANQQKQDDGRGLVLPGYKYLGPFNGLDKGEPVNEADAAALEHDKAYDQQLKAGDNPYLRYNHADAEFQERLQEDTSFGGNLGRAVFQAKKRVLEPLGLVEEGAKTAPGKKRPVEPSPQRSPDSSTGIGKKGQQPARKRLNFGQTGDSESVPDPQPLGEPPAAPSGVGPNTMASGGGAPMADNNEGADGVGNSSGNWHCDSTWMGDRVITTSTRTWALPTYNNHLYKQISSASTGASNDNHYFGYSTPWGYFDFNRFHCHFSPRDWQRLINNNWGFRPKRLNFKLFNIQVKEVTQNEGTKTIANNLTSTIQVFTDSEYQLPYVLGSAHQGCLPPFPADVFMIPQYGYLTLNNGSQAVGRSSFYCLEYFPSQMLRTGNNFQFTYTFEDVPFHSSYAHSQSLDRLMNPLIDQYLYYLSRTQTTGGTANTQTLGFSQGGPNTMANQAKNWLPGPCYRQQRVSTTTGQNNNSNFAWTAGTKYHLNGRNSLANPGIAMATHKDDKERFFPSNGILIFGKQNAARDNADYSDVMLTSEEEIKTTNPVATEEYGIVADNLQQQNTAPQIGTVNSQGALPGMVWQNRDVYLQGPIWAKIPHTDGNFHPSPLMGGFGLKHPPPQILIKNTPVPADPPTTFNQSKLNSFITQYSTGQVSVEIEWELQKENSKRWNPEIQYTSNYYKSTSVDFAVNTEGVYSEPHPIGTRYLTRPL

SEQ ID NO: 2096 - protein, 736 aa, Artificial Sequence
  Description of Artificial Sequence: Synthetic polypeptide
  MOD_RES (226)..(226): Xaa can be any naturally occurring amino acid
MAADGYLPDWLEDTLSEGIRQWWKLKPGPPPPKPAERHKDDSRGLVLPGYKYLGPFNGLDKGEPVNEADAAALEHDKAYDRQLDSGDNPYLKYNHADAEFQERLKEDTSFGGNLGRAVFQAKKRVLEPLGLVEEPVKTAPGKKRPVEQSPQEPDSSSGIGKKGQQPAKKRLNFGQTGDSESVPDPQPLGEPPATPAAVGPTTMASGGGAPMADNNEGADGVGNASXNWHCDSTWLGDRVITTSTRTWALPPITTTSTSKSPVLQRGRSNDNHYFGYSTPWGYFDFNRFHCHFSPRDWQRLINNNWGFRPKRLNFKLFNIQVKEVTDNNGVKTIANNLTSTVQVFTDSDYQLPYVLGSAHQGCLPPFPADVFMIPQYGYLTLNNGSQAVGRSSFYCLEYFPSQMLRTGNNFQFTYTFEDVPFHSSYAHSQSLDRLMNPLIDQYLYYLSRTQTTGGTANTQTLGFSQGGPNTMANQAKNWLPGPCYRQQRVSTTTGQNNNSNFAWTAGTKYHLNGRNSLANPGIAMATHKDDKERFFPSNGILIFGKQNAARDNADYSDVMLTSEEEIKTTNPVATEEYGIVADNLQQQNTAPQIGTVNSQGALPGMVWQNRDVYLQGPIWAKIPHTDGNFHPSPLMGGFGLKHPPPQILIKNTPVPADPPTTFNQSKLNSFITQYSTGQVSVEIEWELQKENSKRWNPEIQYTSNYYKSTNVDFAVNTEGVYSEPHPIGTRYLTRPL

SEQ ID NO: 2097 - protein, 736 aa, Artificial Sequence
  Description of Artificial Sequence: Synthetic polypeptide
  MOD_RES (239)..(239): Xaa can be any naturally occurring amino acid
MAADGYLPDWLEDNLSEGIREWWDLKPGAPKPKANQQKQDDGRGLVLPGYKYLGPFNGLDKGEPVNAADAAALEHDKAYDQQLQAGDNPYLRYNHADAEFQERLQGDTSFGGNLGRAVFQAKKRVLEPLGLVEEAAKTAPGKKRPVEQSPQEPDSSAGIGKSGAQPAKKRLNFGQTGDTESVPDPQPIGEPPAAPSGVGPNTMAAGGGAPMADNNEGADGVGSSSGNWHCDSTWLGDRXITTSTRTWALPTYNNHLYKQISSASTGASNDNHYFGYSTPWGYFDFNRFHCHFSPRDWQRLINNNWGFRPKRLNFKLFNIQVKEVTDNNGVKTIANNLTSTVQVFTDSEYQLPYVLGSAHQGCLPPFPADVFMIPQYGYLTLNNGSQAVGRSSFYCLEYFPSQMLRTGNNFTFSYTFEDVPFHSSYAHSQSLDRLMNPLIDQYLYYLSRTQTTGGTANTQTLGFSQGGPNTMANQAKNWLPGPCYRQQRVSTTTGQNNNSNFAWTAGTKYHLNGRNSLANPGIAMATHKDDKERFFPSNGILIFGKQNAARDNADYSDVMLTSEEEIKTTNPVATEEYGIVADNFQQQNTAPQIGTVNSQGALPGMVWQNRDVYLQGPIWAKIPHTDGNFHPSPLMGGFGLKHPPPQILIKNTPVPADPPTTFNQSKLNSFITQYSTGQVSVEIEWELQKENSKRWNPEIQYTSNYYKSTSVDFAVNTEGVYSEPHPIGTRYLTRPL

SEQ ID NO: 2098 - protein, 736 aa, Artificial Sequence
  Description of Artificial Sequence: Synthetic polypeptide
MAADGYLPDWLEDNLSEGIREWWALKPGAPKPKANQQKQDDGRGLVLPGYKYLGPFNGLDKGEPVNEADAAALEHDKAYDQQLKAGDNPYLKYNHADAEFQERLQEDTSFGGNLGRAVFQAKKRLLEPLGLVEEAAKTAPGKKRPVEQSPQEPDSSAGIGKSGAQPAKKRLNFGQTGDTESVPDPQPLGEPPATPAAVGPTTMASGGGAPMADNNEGADGVGNASGNWHCDSTWLGDRVITTSTRTWALPTYNNHLYKQISSASTGASNDNHYFGYSTPWGYFDFNRFHCHFSPRDWQRLINNNWGFRPKRLSFKLFNIQVKEVTQNEGTKTIANNLTSTIQVFTDSEYQLPYVLGSAHQGCLPPFPADVFMIPQYGYLTLNNGSQAVGRSSFYCLEYFPSQMLRTGNNFQFTYTFEDVPFHSSYAHSQSLDRLMNPLIDQYLYYLSRTQTTGGTANTQTLGFSQGGPNTMANQAKNWLPGPCYRQQRVSTTTGQNNNSNFAWTAGTKYHLNGRNSLANPGIAMATHKDDKERFFPSNGILIFGKQNAARDNADYSDVMLTSEEEIKTTNPVATEEYGIVADNLQQQNTAPQIGTVNSQGALPGMVWQNRDVYLQGPIWAKIPHTDGNFHPSPLMGGFGLKHPPPQILIKNTPVPADPPTTFNQSKLNSFITQYSTGQVSVEIEWELQKENSKRWNPEIQYTSNYYKSTSVDFAVNTEGVYSEPHPIGTRYLTRPL

SEQ ID NO: 2099 - protein, 736 aa, Artificial Sequence
  Description of Artificial Sequence: Synthetic polypeptide
MAADGYLPDWLEDTLSEGIRQWWKLKPGPPPPKPAERHKDDSRGLVLPGYKYLGPFNGLDKGEPVNEADAAALEHDKAYDQQLQAGDNPYLRYNHADAEFQERLQGDTSFGGNLGRAVFQAKKRLLEPLGLVEEAAKTAPGKKRPVEQSPQEPDSSAGIGKSGAQPAKKRLNFGQTGDTESVPDPQPIGEPPAAPSGVGSLTMASGGGAPVADNNEGADGVGSSSGNWHCDSQWLGDRVITTSTRTWALPTYNNHLYKQISSASTGASNDNHYFGYSTPWGYFDFNRFHCHFSPRDWQRLINNNWGFRPKRLSFKLFNIQVKEVTQNEGTKTIANNLTSTIQVFTDSEYQLPYVLGSAHQGCLPPFPADVFMIPQYGYLTLNNGSQAVGRSSFYCLEYFPSQMLRTGNNFQFTYTFEDVPFHSSYAHSQSLDRLMNPLIDQYLYYLSRTQTTGGTANTQTLGFSQGGPNTMANQAKNWLPGPCYRQQRVSTTTGQNNNSNFAWTAGTKYHLNGRNSLANPGIAMATHKDDKERFFPSNGILIFGKQNAARDNADYSDVMLTSEEEIKTTNPVATEEYGIVADNLQQQNTAPQIGTVNSQGALPGMVWQNRDVYLQGPIWAKIPHTDGNFHPSPLMGGFGLKHPPPQILIKNTPVPADPPTTFNQSKLNSFITQYSTGQVSVEIEWELQKENSKRWNPEIQYTSNYYKSTSVDFAVNTEGVYSEPHPIGTRYLTRPL

SEQ ID NO: 2100 - protein, 738 aa, Artificial Sequence
  Description of Artificial Sequence: Synthetic polypeptide
MAADGYLPDWLEDNLSEGIRQWWKLKPGPPPPKPAERHKDDSRGLVLPGYKYLGPFNGLDKGEPVNAADAAALEHDKAYDQQLKAGDNPYLRYNHADAEFQERLQEDTSFGGNLGRAVFQAKKRVLEPLGLVEEGAKTAPGKKRPVEPSPQRSPDSSTGIGKKGQQPAKKRLNFGQTGDSESVPDPQPLGEPPATPAAVGPTTMASGGGAPMADNNEGADGVGNASGNWHCDSTWLGDRVITTSTRTWALPTYNNHLYKQISNGTSGGSTNDNTYFGCVTPWGYFDFNKFHCHFSPDDWQRLINNGWGFRTKRLNFKLFSMKVKKGTDNTGIKTIANNLTNTVHVFADSEYQLPYVLGSAHQGCLPPFPADVFMIPQYGYLTLNNGSQAVGRSSFYCLEYFPSQMLRTGNNFTFSYTFEDVPFHSSYAHSQSLDRLMNPLIDQYLYYLSRTQTTGGTANTQTLGFSQGGPNTMANQAKNWLPGPCYRQQRVSTTTGQNNNSNFAWTAGTKYHLNGRNSLANPGIAMATHKDDKERFFPSNGILIFGKQNAARDNADYSDVMLTSEEEIKTTNPVATEEYGIVADNLQQQNTAPQIGTVNSQGALPGMVWQNRDVYLQGPIWAKIPHTDGNFHPSPLMGGFGLKHPPPQILIKNTPVPADPPTTFNQSKLNSFITQYSTGQVSVEIEWELQKENSKRWNPEIQYTSNYYKSTSVDFAVNTEGVYSEPHPIGTRYLTRPL

SEQ ID NO: 2101 - protein, 737 aa, Artificial Sequence
  Description of Artificial Sequence: Synthetic polypeptide
MAADGYLPDWLEDTLSEGIRQWWKLKPGPPPPKPAERHKDDSRGLVLPGYKYLGPFNGLDKGEPVNAADAAALEHDKAYDQQLKAGDNPYLRYNHADAEFQERLQEDTSFGGNLGRAVFQAKKRVLEPLGLVEEGAKTAPGKKRPVEPSPQRSPDSSTGIGKKGQQPAKKRLNFGQTGDSESVPDPQPIGEPPAGPSGLGSGTMAAGGGAPMADNNEGADGVGSSSGNWHCDSTWLGDRVITTSTRTWALPTYNNHLYKQISSASTGASNDNHYFGYSTPWGYFDFNRFHCHFSPRDWQRLINNNWGFRPKRLNFKLFNIQVKEVTDNNGVKTIANNLTSTVQVFTDSEYQLPYVLGSAHQGCLPPFPADVFMIPQYGYLTLNNGSQAVGRSSFYCLEYFPSQMLRTGNNFTFSYTFEDVPFHSSYAHSQSLDRLMNPLIDQYLYYLSRTQTTGGTANTQTLGFSQGGPNTMANQAKNWLPGPCYRQQRVSTTTGQNNNSNFAWTAGTKYHLNGRNSLANPGIAMATHKDDKERFFPSNGILIFGKQNAARDNADYSDVMLTSEEEIKTTNPVATEEYGIVADNLQQQNTAPQIGTVNSQGALPGMVWQNRDVYLQGPIWAKILHTDGNFHPSPLMGGFGMKHPPPPILIKNTPVPADPPTTFNQSKLNSFITQYSTGQVSVEIEWELPKENSKRWNPEIQYTSNYYKSTSVDFAVNTEGVYYEPHPIGTRYLTPPL

SEQ ID NO: 2102 - protein, 737 aa, Artificial Sequence
  Description of Artificial Sequence: Synthetic polypeptide
MAADGYLPDWLEDNLSEGIREWWALKPGAPKPKANQQKQDDGRGLVLPGYKYLGPFNGLDKGEPVNAADAAALEHDKAYDQQLKAGDNPYLRYNHADAEFQERLQEDTSFGGNLGRAVFQAKKRVLEPLGLVEEGAKTAPGKKRPVEPSPQRSPDSSTGIGKKGQQPARKRLNFGQTGDSESVPDPQPLGEPPAAPSGVAPNTMAAGGGAPMADNNEGADGVGNASGNWHCDSTWLGDRVITTSTRTWALPTYNNHLYKQISSASTGASNDNHYFGYSTPWGYFDFNRFHCHFSPRDWQRLITTIGGFRPKRLNFKLFNIQVKEVTDNNGVKTIANNLTSTVQVFTDSEYQLPYVLGSAHQGCLPPFPADVFMIPQYGYLTLNNGSQAVGRSSFYCLEYFPSQMLRTGNNFTFSYTFEDVPFHSSYAHSQSLDRLMNPLIDQYLYYLSRTQTTGGTANTQTLGFSQGGPNTMANQAKNWLPGPCYRQQRVSTTTGQNNNSNFAWTAGTKYHLNGRNSLANPGIAMATHKDDKERFFPSNGILIFGKQNAARDNADYSDVMLTSEEEIKTTNPVATEEYGIVADNLQQQNTAPQIGTVNSQGALPGMVWQNRDVYLQGPIWAKIPHTDGNFHPSPLMGGFGLKHPPPQILIKNTPVPADPPTTFNQSKLNSFITQYSTGQVSVEIEWELQKENSKRWNPEIQYTSNYYKSTSVDFAVNTEGVYSEPHPIGTRYLTRPL

SEQ ID NO: 2103 - protein, 736 aa, Artificial Sequence
  Description of Artificial Sequence: Synthetic polypeptide
MAADGYLPDWLEDTLSEGIRQWWKLKPGPPPPKPAERHKDDGRGLVLPGYKYLGPFNGLDKGEPVNAADAAALEHDKAYDQQLKAGDNPYLRYNHADAEFQERLQEDTSFGGNLGRAVFQAKKRVLEPLGLVEEPVKTAPGKKRPVEQSPQEPDSSSGIGKKGQQPAKKRLNFGQTGDSESVPDPQPLGEPPATPAAVGPTTMASGGGAPMADNNEGADGVGNASGNWHCDSTWMGDRVITTSTRTWALPTYNNHLYKQISSASTGASNDNHYFGYSTPWGYFDFNRFHCHFSPRDWQRLINNNWGFRPKRLNFKLFNIQVKEVTQNEGTKTIANNLTSTIQVFTDSEYQLPYVLGSAHQGCLPPFPADVFMIPQYGYLTLNNGSQAVGRSSFYCLEYFPSQMLRTGNNFQFTYTFEDVPFHSSYAHSQSLDRLMNPLIDQYLYYLSRTQTTGGTANTQTLGFSQGGPNTMANHAKNWLPGPCYRQQRVSTTTGQNNNSNFAWTAGTKYHLNGRNSLANPGIAMATHKDDKERFFPSNGILIFGKQNAARDNADYSDVMLTSEEEIKTTNPVATEEYGIVADNLQQQNTAPQIGTVNSQGALPGMVWQNRDVYLQGPIWAKIPHTDGNFHPSPLMGGFGLKHPPPQILIKNTPVPADPPTTFNQSKLNSFITQYSTGQVSVEIEWELQKENSKRWNPEIQYTSNYYKSTSVDFAVNTEGVYSEPHPIGTRYLTRPL

SEQ ID NO: 2104 - protein, 737 aa, Artificial Sequence
  Description of Artificial Sequence: Synthetic polypeptide
MAADGYLPDWLEDNLSQGIREWWDLKPGAPKPKANQQKQDDGRGLVLPGYKYLGPFNGLDKGEPVNAADAAALEHDKAYDQQLKAGDNPYLRYNHADAEFQERLQEDTSFGGNLGRAVFQAKKRVLEPLGLVEEGAKTAPGKKRPVEPSPQRSPDSSTGIGKKGQQPARKRLNFGQTGDSESVPDPQPLGEPPAAPAAVGPTTMASGGGAPMADNNEGADGVGSSSGNWHCDSQWLGDRVITTSTRTWALPTYNNHLYKQISSASTGASNDNHYFGYSTPWGYFDFNRFHCHFSPRDWQRLINNNWGFRPKRLSFKLFNIQVKEVTQNEGTKTIANNLTSTIQVFTDSEYQLPYVLGSAHQGCLPPFPADVFMIPQYGYLTLNNGSQAVGRSSFYCLEYFPSQMLRTGNNFQFTYTFEDVPFHSSYAHSQSLDRLMNPLIDQYLYYLSRTQTTGGTTNAQTLGFSQGGPNTMANQAKNWLPGPCYRQQRVSTTTGQNNNSNFAWTAGTKYHLNGRNSLANPGIAMATHKDDKERFFPSNGILIFGKQNAARDNADYSDVMLTSEEEIKTTNPVATEEYGIVADNLQQQNTAPQIGTVNSQGALPGMVWQNRDVYLQGPIWAKIPHTDGNFHPSPLMGGFGLKHPPPQILIKNTPVPADPPTTFNQSKLNSFITQYSTGQVSVEIEWELQKENSKRWNPEIQYTSNYYKSTNVDFAVNTEGVYSEPHPIGTRYLTRPL

SEQ ID NO: 2105 - protein, 736 aa, Artificial Sequence
  Description of Artificial Sequence: Synthetic polypeptide
MAADGYLPDWLEDNLSEGIREWWDLKPGAPKPKANQQKQDDGRGLVLPGYKYLGPFNGLDKGEPVNAADAAALEHDKAYDQQLKAGDNPYLRYNHADAEFQERLQEDTSFGGNLGRAVFQAKKRVLEPFGLVEEGAKTAPGKKRPVEQSPQEPDSSSGIGKTGQQPAKKRLNFGQTGDTESVPDPQPIGEPPAAPSGVGPNTMAAGGGAPMADNNEGADGVGSSSGNWHCDSTWMGDRVITTSTRTWALPTYNNHLYKQISSASTGASNDNHYFGYSTPWGYFDFNRFHCHFSPRDWQRLINNNWGFRPKRLNFKLFNIQVKEVTQNEGTKTIANNLTSTIQVFTDSEYQLPYVLGSAHQGCLPPFPADVFMIPQYGYLTLNNGSQAVGRSSFYCLEYFPSQMLRTGNNFQFTYTFEDVPFHSSYAHSQSLDRLMNPLIDQYLYYLSRTQTTGGTANTQTLGFSQGGPNTMANQAKNWLPGPCYRQQRVSTTTGQNNNSNFAWTAGTKYHLNGRNSLANPGIAMATHKDDKERFFPSNGILIFGKQNAARDNADYSDVMLTSEEEIKTTNPVATEEYGIVADNLQQQNTAPQIGTVNSQGALPGMVWQNRDVYLQGPIWAKIPHTDGNFHPSPLMGGFGLKHPPPQILIKNTPVPADPPTTFNQSKLNSFITQYSTGQVSVEIEWELQKENSKRWNPEIQYTSNYYKSTNVDFAVNTEGVYSEPHPIGTRYFTRPL

SEQ ID NO: 2106 - protein, 736 aa, Artificial Sequence
  Description of Artificial Sequence: Synthetic polypeptide
MAADGYLPDWLEDNLSEGIREWWDLKPGAPKPKANQQKQDDGRGLVLPGYKYLGPFNGLDKGEPVNAADAAALEHDKAYDQQLKAGDNPYLRYNHADAEFQERLQEDTSFGGNLGRAVFQAKKRVLEPLGLVEEGAKTAPGKKRPVEQSPQEPDSSSGIGKTGQQPAKKRLNFGQTGDSESVPDPQPLGEPPATPAAVGPTTMASGGGAPMADNNEGADGVGNSSGNWHCDSTWMGDRVITTSTRTWALPTYNNHLYKQISSASTGASNDNHYFGYSTPWGYFDFNRFHCHFSPRDWQRLINNNWGFRPKRLNFKLFNIQVKEVTDNNGVKTIANNLTSTVQVFTDSEYQLPYVLGSAHQGCLPPFPADVFMIPQYGYLTLNNGSQAVGRSSFYCLEYFPSQMLRTGNNFQFTYTFEDVPFHSSYAHSQSLDRLMNPLIDQYLYYLSRTQTTGGTANTQTLGFSQGGPNTMANQAKNWLPGPCYRQQRVSTTTGQNNNSNFAWTAGTKYHLNGRNSLANPGIAMATHKDDKERFFPSNGILIFGKQNAARDNADYSDVMLTSEEEIKTTNPVATEEYGIVADNLQQQNTAPQIGTVNSQGALPGMVWQNRDVYLQGPIWAKIPHTDGNFHPSPLMGGFGLKHPPPQILIKNTPVPADPPTTFNQSKLNSFITQYSTGQVSVEIEWELQKENSKRWNPEIQYTSNYYKSTNVDFAVNTEGVYSEPHPIGTRYLTRPL

SEQ ID NO: 2107 - protein, 736 aa, Artificial Sequence
  Description of Artificial Sequence: Synthetic polypeptide
MAADGYLPDWLEDNLSEGIREWWDLKPGAPKPKANQQKQDDGRGLVLPGYKYLGPFNGLDKGEPVNAADAAALEHDKAYDQQLKAGDNPYLRYNHADAEFQERLQEDTSFGGNLGRAVFQAKKRVLEPLGLVEEGAKTAPGKKRPVEQSPQEPDSSSGIGKTGQQPAKKRLNFGQTGDSESVPDPQPLGEPPATPAAVGPTTMASGGGAPMADNNEGADGVGNASGNWHCDSTWLGDRVITTSTRTWALPTYNNHLYKQISSASTGASNDNHYFGYSTPWGYFDFNRFHCHFSPRDWQRLINNNWGFRPKRLNFKLFNIQVKEVTQNEGTKTIANNLTSTIQVFTDSEYQLPYVLGSAHQGCLPPFPADVFMIPQYGYLTLNNGSQAVGRSSFYCLEYFPSQMLRTGNNFEFSYQFEDVPFHSSYAHSQSLDRLMNPLIDQYLYYLSRTQTTGGTANTQTLGFSQGGPNTMANQAKNWLPGPCYRQQRVSTTTGQNNNSNFAWTAGTKYHMNGRNSLVNPGIAMATHKDDKERFFPSNGILIFGKQNVARDNADYSDVMLTSEEEIKTTNPVATEEYGIVADNLQQQNTAPQIGTVNSQGALPGMVWQNRDVYLQGPIWAKIPHTDGNFHPSPLMGGFGLKHPPPQILIKNTPVPADPPTTFNQSKLNSFITQYSTGQVSVEIEWELQKENSKRWNPEIQYTSNYYKSTSVDFAVNTEGVYSEPHPIGTRYLTRPL

SEQ ID NO: 2108 - DNA, 2217 bp, Artificial Sequence
  Description of Artificial Sequence: Synthetic polynucleotide
atggctgccgatggttatcttccagattggctcgaggacaacctctctgagggcattcgcgagtggtgggcgctgaaacctggagccccgaagcccaaagccaaccagcaaaagcaggacgacggccggggtctggtgcttcctggctacaagtacctcggacccttcaacggactcgacaagggggagcccgtcaacgcggcggacgcagcggccctcgagcacgacaaggcctacgaccagcagctgcaggcgggtgacaatccgtacctgcggtataaccacgccgacgccgagtttcaggagcgtctgcaagaagatacgtcttttgggggcaacctcgggcgagcagtcttccaggccaagaagcgggttctcgaacctctcggtctggttgaggaaggcgctaagacggctcctggaaagaagagaccggtagagccatcaccccagcgttctccagactcctctacgggcatcggcaagaaaggccaacagcccgccagaaaaagactcaattttggtcagactggcgactcagagtcagttccagaccctcaacctctcggagaacctccagcagcgccctctggtgtgggacctaatacaatggctgcaggcggtggcgcaccaatggcagacaataacgaaggcgccgacggagtgggtagttcctcgggaaattggcattgcgattccacatggctgggcgacagagtcatcaccaccagcacccgaacctgggccctgcccacctacaacaaccacctctacaagcaaatctccaacgggacatcgggaggagccaccaacgacaacacctacttcggctacagcaccccctgggggtattttgactttaacagattccactgccacttttcaccacgtgactggcagcgactcatcaacaacaactggggattccggcccaagagactcagcttcaagctcttcaacatccaggtcaaggaggtcacgcagaatgaaggcaccaagaccatcgccaataacctcaccagcaccatccaggtgtttacggactcggagtaccagctgccgtacgttctcggctctgcccaccagggctgcctgcctccgttcccggcggacgtgttcatgattccccagtacggctacctaacactcaacaacggtagtcaggccgtgggacgctcctccttctactgcctggaatactttccttcgcagatgctgagaaccggcaacaacttccagtttacttacaccttcgaggacgtgcctttccacagcagctacgcccacagccagagcttggaccggctgatgaatcctctgattgaccagtacctgtactacttgtctcggactcaaacaacaggaggcacggcaaatacgcagactctgggcttcagccaaggtgggcctaatacaatggccaatcaggcaaagaactggctgccaggaccctgttaccgccaacaacgcgtctcaacgacaaccgggcaaaacaacaatagcaactttgcctggactgctgggaccaaataccatctgaatggaagaaattcattggctaatcctggcatcgctatggcaacacacaaagacgacgaggagcgtttttttcccagtaacgggatcctgatttttggcaaacaaaatgctgccagagacaatgcggattacagcgatgtcatgctcaccagcgaggaagaaatcaaaaccactaaccctgtggctacagaggaatacggtatcgtggcagataacttgcagcagcaaaacacggctcctcaaattggaactgtcaacagccagggggccttacccggtatggtttggcagaaccgggacgtgtacctgcagggtcccatctgggccaagattcctcacacggacggcaacttccacccgtctccgctgatgggcggctttggcctgaaacatcctccgcctcagatcctgatcaagaacacgcctgtacctgcggatcctccgaccaccttcaaccagtcaaagctgaactctttcatcacgcaatacagcaccggacaggtcagcgtggaaattgaatgggagctgcagaaggaaaacagcaagcgctggaaccccgagatccagtacacctccaactactacaaatctacaagtgtggactttgctgttaatacagaaggcgtgtactctgaaccccgccccattggcacccgttacctcacccgtaatctgtaa

SEQ ID NO: 2109 - protein, 738 aa, Artificial Sequence; identical to SEQ ID NO: 105
  Description of Artificial Sequence: Synthetic polypeptide

SEQ ID NO: 2110 - protein, 735 aa, Artificial Sequence
  Description of Artificial Sequence: Synthetic polypeptide
MAADGYLPDWLEDNLSEGVREWWALQPGAPKPKANQQHQDNARGLVLPGYKYLGPGNGLDKGEPVNAADAAALEHDKAYDQQLKAGDNPYLKYNHADAEFQQRLQGDTSFGGNLGRAVFQAKKRVLEPLGLVEQAGETAPGKKRPLIESPQQPDSSTGIGKKGKQPAKKKLVFEDETGAGDGPPEGSTSGAMSDDSEMRAAAGGAAVEGGQGADGVGNASGDWHCDSTWSEGHVTTTSTRTWVLPTYNNHLYKRLGESLQSNTYNGFSTPWGYFDFNRFHCHFSPRDWQRLINNNWGMRPKAMRVKIFNIQVKEVTTSNGETTVANNLTSTVQIFADSSYELPYVMDAGQEGSLPPFPNDVFMVPQYGYCGLVTGNTSQQQTDRNAFYCLEYFPSQMLRTGNNFEITYSFEKVPFHSMYAHSQSLDRLMNPLIDQYLWGLQSTTTGTTLNAGTATTNFTKLRPTNFSNFKKNWLPGPSIKQQGFSKTANQNYKIPATGSDSLIKYETHSTLDGRWSALTPGPPMATAGPADSKFSNSQLIFAGPKQNGNTATVPGTLIFTSEEELAATNATDTDMWGNLPGGDQSNSNLPTVDRLTALGAVPGMVWQNRDIYYQGPIWAKIPHTDGHFHPSPLIGGFGLKHPPPQIFIKNTPVPANPATTFSSTPVNSFITQYSTGQVSVQIDWEIQKERSKRWNPEVQFTSNYGQQNSLLWAPDAAGKYTEPRAIGTRYLTHHL

SEQ ID NO: 2111 - protein, 735 aa, Artificial Sequence
  Description of Artificial Sequence: Synthetic polypeptide
MAADGYLPDWLEDNLSEGVREWWALQPGAPKPKANQQHQDNARGLVLPGYKYLGPGNGLDKGEPVNAADAAALEHDKAYDQQLKAGDNPYLKYNHADAEFQQRLQGDTSFGGNLGRAVFQAKKRVLEPLGLVEQAGETAPGKKRPLIESPQQPDSSTGIGKKGKQPAKKKLVFEDETGAGDGPPEGSTSGAMSDDSEMRAAAGGAAVEGGQGADGVGNASGDWHCDSTWSEGHVTTTSTRTWVLPTYNNHLYKRLGESLQSNTYNGFSTPWGYFDFNRFHCHFSPRDWQRLINNNWGMRPKAMRVKIFNIQVKEVTTSNGETTVANNLTSTVQIFADSSYELPYVMDAGQEGSLPPFPNDVFMVPQYGYCGLVTGNTSQQQTDRNAFYCLEYFPSQMLRTGNNFEITYSFEKVPFHSMYAHSQSLDRLMNPLIDQYLWGLQSTTTGTTLNAGTATTNFTKLRPTNFSNFKKNWLPGPSIKQQGFSKTANQNYLIPATGSDSLIRYETHSTLDGRWSALTPGPPMATAGPADSKFSNSQLIFAGPKQNGNTATVPGTLIFTSEEELAATNATDTDMWGNLPFRDLSSSNLPTVDRSTPLGAVPGMVWQNRDIYYQGPIWAKIPHTDGHFHPSPLIGGFGLKHPPPQIFIKNTPVPANPATTFSSTPVNSFITQYSTGQVSVQIDWEIQKERSKRWNPEVQFTSNYGQQNSLLWAPDAAGKYTEPRAIGTRYLTHHL

SEQ ID NO: 2112 - protein, 735 aa, Artificial Sequence
  Description of Artificial Sequence: Synthetic polypeptide
MAADGYLPDWLEDNLSEGVREWWALQPGAPKPKANQQHQDNARGLVLPGYKYLGPGNGLDKGEPVNAADAAALEHDKAYDQQLKAGDNPYLKYNHADAEFQQRLQGDTSFGGNLGRAVFQAKKRVLEPLGLVEQAGETAPGKKRPLIESPQQPDSSTGIGKKGKQPAKKKLVFEDETGAGDGPPEGSTSGAMSDDSEMRAAAGGAAVEGGQGADGVGNASGDWHCDSTWSEGHVTTTSTRTWVLPTYNNHLYKRLGESLQSNTYNGFSTPWGYFDFNRFHCHFSPRDWQRLINNNWGMRPKAMRVKIFNIQVKEVTTSNGETTVANNLTSTVQIFADSSYELPYVMDAGQEGSLPPFPNDVFMVPQYGYCGLVTGNTSQQQTDRNAFYCLEYFPSQMLRTGNNFEITYSFEKVPFHSMYAHSQSLDRLMNPLIDQYLWGLQSTTTGTTLNAGTATTNFTKLRPTNFSNFKKNWLPGPSIKQQGFSKTANQNYYIPATGSDSLILYETHSTLDGRWSALTPGPPMATAGPADSKFSNSQLIFAGPKQNGNTATVPGTLIFTSEEELAATNATDTDMWGNLPGGDQSNSNLPTVDRLTALGAVPGMVWQNRDIYYQGPIWAKIPHTDGHFHPSPLIGGFGLKHPPPQIFIKNTPVPANPATTFSSTPVNSFITQYSTGQVSVQIDWEIQKERSKRWNPEVQFTSNYGQQNSLLWAPDAAGKYTEPRAIGTRYLTHHL

SEQ ID NO: 2113 - protein, 735 aa, Artificial Sequence
  Description of Artificial Sequence: Synthetic polypeptide
MAADGYLPDWLEDNLSEGVREWWALQPGAPKPKANQQHQDNARGLVLPGYKYLGPGNGLDKGEPVNAADAAALEHDKAYDQQLKAGDNPYLKYNHADAEFQQRLQGDTSFGGNLGRAVFQAKKRVLEPLGLVEQAGETAPGKKRPLIESPQQPDSSTGIGKKGKQPAKKKLVFEDETGAGDGPPEGSTSGAMSDDSEMRAAAGGAAVEGGQGADGVGNASGDWHCDSTWSEGHVTTTSTRTWVLPTYNNHLYKRLGESLQSNTYNGFSTPWGYFDFNRFHCHFSPRDWQRLINNNWGMRPKAMRVKIFNIQVKEVTTSNGETTVANNLTSTVQIFADSSYELPYVMDAGQEGSLPPFPNDVFMVPQYGYCGLVTGNTSQQQTDRNAFYCLEYFPSQMLRTGNNFEITYSFEKVPFHSMYAHSQSLDRLMNPLIDQYLWGLQSTTTGTTLNAGTATTNFTKLRPTNFSNFKKNWLPGPSIKQQGFSKTANQNYGIPATGSDSLIKYETHSTLDGRWSALTPGPPIATAGPADSKFSNSQLIFAGPKQNGNTATVPGTLIFTSEEELAATNATDTDMWGNLPLYDASSSNLPTVDRLTLLGAVPGMVWQNRDIYYQGPIWAKIPHTDGHFHPSPLIGGFGLKHPPPQIFIKNTPVPANPATTFSSTPVNSFITQYSTGQVSVQIDWEIQKERSKRWNPEVQFTSNYGQQNSLLWAPDAAGKYTEPRAIGTRYLTHHL

SEQ ID NO: 2114 - protein, 735 aa, Artificial Sequence
  Description of Artificial Sequence: Synthetic polypeptide
MAADGYLPDWLEDNLSEGVREWWALQPGAPKPKANQQHQDNARGLVLPGYKYLGPGNGLDKGEPVNAADAAALEHDKAYDQQLKAGDNPYLKYNHADAEFQQRLQGDTSFGGNLGRAVFQAKKRVLEPLGLVEQAGETAPGKKRPLIESPQQPDSSTGIGKKGKQPAKKKLVFEDETGAGDGPPEGSTSGAMSDDSEMRAAAGGAAVEGGQGADGVGNASGDWHCDSTWSEGHVTTTSTRTWVLPTYNNHLYKRLGESLQSNTYNGFSTPWGYFDFNRFHCHFSPRDWQRLINNNWGMRPKAMRVKIFNIQVKEVTTSNGETTVANNLTSTVQIFADSSYELPYVMDAGQEGSLPPFPNDVFMVPQYGYCGLVTGNTSQQQTDRNAFYCLEYFPSQMLRTGNNFEITYSFEKVPFHSMYAHSQSLDRLMNPLIDQYLWGLQSTTTGTTLNAGTATTNFTKLRPTNFSNFKKNWLPGPSIKQQGFSKTANQNYTIPATGSDSLITYETHSTLDGRWSALTPGPPGATAGPADSKFSNSQLIFAGPKQNGNTATVPGTLIFTSEEELAATNATDTDMWGNLPRVDTSASNLPTVDRYTNLGAVPGMVWQNRDIYYQGPIWAKIPHTDGHFHPSPLIGGFGLKHPPPQIFIKNTPVPANPATTFSSTPVNSFITQYSTGQVSVQIDWEIQKERSKRWNPEVQFTSNYGQQNSLLWAPDAAGKYTEPRAIGTRYLTHHL

SEQ ID NO: 2115 - protein, 735 aa, Artificial Sequence
  Description of Artificial Sequence: Synthetic polypeptide
MAADGYLPDWLEDNLSEGVREWWALQPGAPKPKANQQHQDNARGLVLPGYKYLGPGNGLDKGEPVNAADAAALEHDKAYDQQLKAGDNPYLKYNHADAEFQQRLQGDTSFGGNLGRAVFQAKKRVLEPLGLVEQAGETAPGKKRPLIESPQQPDSSTGIGKKGKQPAKKKLVFEDETGAGDGPPEGSTSGAMSDDSEMRAAAGGAAVEGGQGADGVGNASGDWHCDSTWSEGHVTTTSTRTWVLPTYNNHLYKRLGESLQSNTYNGFSTPWGYFDFNRFHCHFSPRDWQRLINNNWGMRPKAMRVKIFNIQVKEVTTSNGETTVANNLTSTVQIFADSSYELPYVMDAGQEGSLPPFPNDVFMVPQYGYCGLVTGNTSQQQTDRNAFYCLEYFPSQMLRTGNNFEITYSFEKVPFHSMYAHSQSLDRLMNPLIDQYLWGLQSTTTGTTLNAGTATTNFTKLRPTNFSNFKKNWLPGPSIKQQGFSKTANQNYSIPATGSDSLIKYETHSTLDGRWSALTPGPPFATAGPADSKFSNSQLIFAGPKQNGNTATVPGTLIFTSEEELAATNATDTDMWGNLPDYDSSLSNLPTVDRDTTLGAVPGMVWQNRDIYYQGPIWAKIPHTDGHFHPSPLIGGFGLKHPPPQIFIKNTPVPANPATTFSSTPVNSFITQYSTGQVSVQIDWEIQKERSKRWNPEVQFTSNYGQQNSLLWAPDAAGKYTEPRAIGTRYLTHHL

SEQ ID NO: 2116 - protein, 735 aa, Artificial Sequence
  Description of Artificial Sequence: Synthetic polypeptide
MAADGYLPDWLEDNLSEGVREWWALQPGAPKPKANQQHQDNARGLVLPGYKYLGPGNGLDKGEPVNAADAAALEHDKAYDQQLKAGDNPYLKYNHADAEFQQRLQGDTSFGGNLGRAVFQAKKRVLEPLGLVEQAGETAPGKKRPLIESPQQPDSSTGIGKKGKQPAKKKLVFEDETGAGDGPPEGSTSGAMSDDSEMRAAAGGAAVEGGQGADGVGNASGDWHCDSTWSEGHVTTTSTRTWVLPTYNNHLYKRLGESLQSNTYNGFSTPWGYFDFNRFHCHFSPRDWQRLINNNWGMRPKAMRVKIFNIQVKEVTTSNGETTVANNLTSTVQIFADSSYELPYVMDAGQEGSLPPFPNDVFMVPQYGYCGLVTGNTSQQQTDRNAFYCLEYFPSQMLRTGNNFEITYSFEKVPFHSMYAHSQSLDRLMNPLIDQYLWGLQSTTTGTTLNAGTATTNFTKLRPTNFSNFKKNWLPGPSIKQQGFSKTANQNYSIPATGSDSLIWYETHSTLDGRWSALTPGPPCATAGPADSKFSNSQLIFAGPKQNGNTATVPGTLIFTSEEELAATNATDTDMWGNLPQGDSSLSNLPTVDRMTVLGAVPGMVWQNRDIYYQGPIWAKIPHTDGHFHPSPLIGGFGLKHPPPQIFIKNTPVPANPATTFSSTPVNSFITQYSTGQVSVQIDWEIQKERSKRWNPEVQFTSNYGQQNSLLWAPDAAGKYTEPRAIGTRYLTHHL

SEQ ID NO: 2117 - protein, 735 aa, Artificial Sequence
  Description of Artificial Sequence: Synthetic polypeptide
MAADGYLPDWLEDNLSEGVREWWALQPGAPKPKANQQHQDNARGLVLPGYKYLGPGNGLDKGEPVNAADAAALEHDKAYDQQLKAGDNPYLKYNHADAEFQQRLQGDTSFGGNLGRAVFQAKKRVLEPLGLVEQAGETAPGKKRPLIESPQQPDSSTGIGKKGKQPAKKKLVFEDETGAGDGPPEGSTSGAMSDDSEMRAAAGGAAVEGGQGADGVGNASGDWHCDSTWSEGHVTTTSTRTWVLPTYNNHLYKRLGESLQSNTYNGFSTPWGYFDFNRFHCHFSPRDWQRLINNNWGMRPKAMRVKIFNIQVKEVTTSNGETTVANNLTSTVQIFADSSYELPYVMDAGQEGSLPPFPNDVFMVPQYGYCGLVTGNTSQQQTDRNAFYCLEYFPSQMLRTGNNFEITYSFEKVPFHSMYAHSQSLDRLMNPLIDQYLWGLQSTTTGTTLNAGTATTNFTKLRPTNFSNFKKNWLPGPSIKQQGFSKTANQNYCIPATGSDSLIRYETHSTLDGRWSALTPGPPLATAGPADSKFSNSQLIFAGPKQNGNTATVPGTLIFTSEEELAATNATDTDMWGNLPYKDSSRSNLPTVDRETSLGAVPGMVWQNRDIYYQGPIWAKIPHTDGHFHPSPLIGGFGLKHPPPQIFIKNTPVPANPATTFSSTPVNSFITQYSTGQVSVQIDWEIQKERSKRWNPEVQFTSNYGQQNSLLWAPDAAGKYTEPRAIGTRYLTHHL

SEQ ID NO: 2118 - protein, 735 aa, Artificial Sequence
  Description of Artificial Sequence: Synthetic polypeptide
MAADGYLPDWLEDNLSEGVREWWALQPGAPKPKANQQHQDNARGLVLPGYKYLGPGNGLDKGEPVNAADAAALEHDKAYDQQLKAGDNPYLKYNHADAEFQQRLQGDTSFGGNLGRAVFQAKKRVLEPLGLVEQAGETAPGKKRPLIESPQQPDSSTGIGKKGKQPAKKKLVFEDETGAGDGPPEGSTSGAMSDDSEMRAAAGGAAVEGGQGADGVGNASGDWHCDSTWSEGHVTTTSTRTWVLPTYNNHLYKRLGESLQSNTYNGFSTPWGYFDFNRFHCHFSPRDWQRLINNNWGMRPKAMRVKIFNIQVKEVTTSNGETTVANNLTSTVQIFADSSYELPYVMDAGQEGSLPPFPNDVFMVPQYGYCGLVTGNTSQQQTDRNAFYCLEYFPSQMLRTGNNFEITYSFEKVPFHSMYAHSQSLDRLMNPLIDQYLWGLQSTTTGTTLNAGTATTNFTKLRPTNFSNFKKNWLPGPSIKQQGFSKTANQNYIIPATGSDSLIYYETHSTLDGRWSALTPGPPRATAGPADSKFSNSQLIFAGPKQNGNTATVPGTLIFTSEEELAATNATDTDMWGNLPWIDNSRSNLPTVDRPTSLGAVPGMVWQNKNIYYQGPIWAKIPHTDGHFHPSPLIGGFGLKHPPPQIFIKNTPVPANPATTFTSTPVNSFITQYSTGQVSVQIDWEIQKERSKRWNPEVQFTSNYGQQNSLLWAPDAAGKYTEPRAIGTRYLTHHL

SEQ ID NO: 2119 - protein, 735 aa, Artificial Sequence
  Description of Artificial Sequence: Synthetic polypeptide
MAADGYLPDWLEDNLSEGVREWWALQPGAPKPKANQQHQDNARGLVLPGYKYLGPGNGLDKGEPVNAADAAALEHDKAYDQQLKAGDNPYLKYNHADAEFQQRLQGDTSFGGNLGRAVFQAKKRVLEPLGLVEQAGETAPGKKRPLIESPQQPDSSTGIGKKGKQPAKKKLVFEDETGAGDGPPEGSTSGAMSDDSEMRAAAGGAAVEGGQGADGVGNASGDWHCDSTWSEGHVTTTSTRTWVLPTYNNHLYKRLGESLQSNTYNGFSTPWGYFDFNRFHCHFSPRDWQRLINNNWGMRPKAMRVKIFNIQVKEVTTSNGETTVANNLTSTVQIFADSSYELPYVMDAGQEGSLPPFPNDVFMVPQYGYCGLVTGNTSQQQTDRNAFYCLEYFPSQMLRTGNNFEITYSFEKVPFHSMYAHSQSLDRLMNPLIDQYLWGLQSTTTGTTLNAGTATTNFTKLRPTNFSNFKKNWLPGPSIKQQGFSKTANQNYGIPATGSDSLIIYETHSTLDGRWSALTPGPPRATAGPADSKFSNSQLIFAGPKQNGNTATVPGTLIFTSEEELAATNATDTDMWGNLPGGDQSNSNLPTVDRLTALGAVPGMVWQNRDIYYQGPIWAKIPHTDGHFHPSPLIGGFGLKHPPPQIFIKNTPVPANPATTFSSTPVNSFITQYSTGQVSVQIDWEIQKERSKRWNPEVQFTSNYGQQNSLLWAPDAAGKYTEPRAIGTRYLTHHL

SEQ ID NO: 2120 - protein, 735 aa, Artificial Sequence
  Description of Artificial Sequence: Synthetic polypeptide
MAADGYLPDWLEDNLSEGVREWWALQPGAPKPKANQQHQDNARGLVLPGYKYLGPGNGLDKGEPVNAADAAALEHDKAYDQQLKAGDNPYLKYNHADAEFQQRLQGDTSFGGNLGRAVFQAKKRVLEPLGLVEQAGETAPGKKRPLIESPQQPDSSTGIGKKGKQPAKKKLVFEDETGAGDGPPEGSTSGAMSDDSEMRAAAGGAAVEGGQGADGVGNASGDWHCDSTWSEGHVTTTSTRTWVLPTYNNHLYKRLGESLQSNTYNGFSTPWGYFDFNRFHCHFSPRDWQRLINNNWGMRPKAMRVKIFNIQVKEVTTSNGETTVANNLTSTVQIFADSSYELPYVMDAGQEGSLPPFPNDVFMVPQYGYCGLVTGNTSQQQTDRNAFYCLEYFPSQMLRTGNNFEITYSFEKVPFHSMYAHSQSLDRLMNPLIDQYLWGLQSTTTGTTLNAGTATTNFTKLRPTNFSNFKKNWLPGPSIKQQGFSKTANQNYVIPATESDSLIYYETHSTLDGRWSALTPGPPYATAGPADSKFSNSQLIFAGPKQNGNTATVPGTLIFTSEEELAATNATDTDMWGNLPPRDDSTSNLPTVDRKTYLGAVPGMVWQNRDIYYQGPIWAKIPHTDGHFHPSPLIGGFGLKHPPPQIFIKNTPVPANPATTFSSTPVNSFITQYSTGQVSVQIDWEIQKERSKRWNPEVQFTSNYGQQNSLLWAPDAAGKYTEPRAIGTRYLTHHL

SEQ ID NO: 2121 - protein, 735 aa, Artificial Sequence
  Description of Artificial Sequence: Synthetic polypeptide
MAADGYLPDWLEDNLSEGVREWWALQPGAPKPKANQQHQDNARGLVLPGYKYLGPGNGLDKGEPVNAADAAALEHDKAYDQQLKAGDNPYLKYNHADAEFQQRLQGDTSFGGNLGRAVFQAKKRVLEPLGLVEQAGETAPGKKRPLIESPQQPDSSTGIGKKGKQPAKKKLVFEDETGAGDGPPEGSTSGAMSDDSEMRAAAGGAAVEGGQGADGVGNASGDWHCDSTWSEGHVTTTSTRTWVLPTYNNHLYKRLGESLQSNTYNGFSTPWGYFDFNRFHCHFSPRDWQRLINNNWGMRPKAMRVKIFNIQVKEVTTSNGETTVANNLTSTVQIFADSSYELPYVMDAGQEGSLPPFPNDVFMVPQYGYCGLVTGNTSQQQTDRNAFYCLEYFPSQMLRTGNNFEITYSFEKVPFHSMYAHSQSLDRLMNPLIDQYLWGLQSTTTGTTLNAGTATTNFTKLRPTNFSNFKKNWLPGPSIKQQGFSKTANQNYYIPATGSDSLIIYETHSTLDGRWSALTPGPPIATAGPADSKFSNSQLIFAGPKQNGNTATVPGTLIFTSEEELAATNSTDTDMWGNLPTDDDSRSNLPTVDRMTLLGAVPGMVWQNRDIYYQGPIWAKIPHTDGHFHPSPLIGGFGLKHPPPQIFIKNTPVPANPATTFSSTPVNSFITQYSTGQVSVQIDWEIQKERSKRWNPEVQFTSNYGQQNSLLWAPDAAGKYTEPRAIGTRYLTHHL

SEQ ID NO: 2122 - protein, 735 aa, Artificial Sequence
  Description of Artificial Sequence: Synthetic polypeptide
MAADGYLPDWLEDNLSEGVREWWALQPGAPKPKANQQHQDNARGLVLPGYKYLGPGNGLDKGEPVNAADAAALEHDKAYDQQLKAGDNPYLKYNHADAEFQQRLQGDTSFGGNLGRAVFQAKKRVLEPLGLVEQAGETAPGKKRPLIESPQQPDSSTGIGKKGKQPAKKKLVFEDETGAGDGPPEGSTSGAMSDDSEMRAAAGGAAVEGGQGADGVGNASGDWHCDSTWSEGHVTTTSTRTWVLPTYNNHLYKRLGESLQSNTYNGFSTPWGYFDFNRFHCHFSPRDWQRLINNNWGMRPKAMRVKIFNIQVKEVTTSNGETTVANNLTSTVQIFADSSYELPYVMDAGQEGSLPPFPNDVFMVPQYGYCGLVTGNTSQQQTDRNAFYCLEYFPSQMLRTGNNFEITYSFEKVPFHSMYAHSQSLDRLMNPLIDQYLWGLQSTTTGTTLNAGTATTNFTKLRPTNFSNFKKNWLPGPSIKQQGFSKTANQNYHIPATGSDSLIYYETHSTLDGRWSALTPGPPSATAGPADSKFSNSQLIFAGPKQNGNTATVPGTLIFTSEEELAATNATDTDMWGNLPRRDSSVSNLPTVDRYTDLGAVPGMVWQNRDIYYQGPIWAKIPHTDGHFHPSPLIGGFGLKHPPPQIFIKNTPVPANPATTFSSTPVNSFITQYSTGQVSVQIDWEIQKERSKRWNPEVQFTSNYGQQNSLLWAPDAAGKYTEPRAIGTRYLTHHL

SEQ ID NO: 2123 - protein, 735 aa, Artificial Sequence
  Description of Artificial Sequence: Synthetic polypeptide
MAADGYLPDWLEDNLSEGVREWWALQPGAPKPKANQQHQDNARGLVLPGYKYLGPGNGLDKGEPVNAADAAALEHDKAYDQQLKAGDNPYLKYNHADAEFQQRLQGDTSFGGNLGRAVFQAKKRVLEPLGLVEQAGETAPGKKRPLIESPQQPDSSTGIGKKGKQPAKKKLVFEDETGAGDGPPEGSTSGAMSDDSEMRAAAGGAAVEGGQGADGVGNASGDWHCDSTWSEGHVTTTSTRTWVLPTYNNHLYKRLGESLQSNTYNGFSTPWGYFDFNRFHCHFSPRDWQRLINNNWGMRPKAMRVKIFNIQVKEVTTSNGETTVANNLTSTVQIFADSSYELPYVMDAGQEGSLPPFPNDVFMVPQYGYCGLVTGNTSQQQTDRNAFYCLEYFPSQMLRTGNNFEITYSFEKVPFHSMYAHSQSLDRLMNPLIDQYLWGLQSTTTGTTLNAGTATTNFTKLRPTNFSNFKKNWLPGPSIKQQGFSKTANQNYSIPATGSDSLISYETHSTLDGRWSALTPGPPRATAGPADSKFSNSQLIFAGPKQNGNTATVPGTLIFTSEEELAATNATDTDMWGNLPRHDSSLSNLPTVDRNTGLGAVPGMVWQNRDIYYQGPIWAKIPHTDGHFHPSPLIGGFGLKHPPPQIFIKNTPVPANPATTFSSTPVNSFITQYSTGQVSVQIDWEIQKERSKRWNPEVQFTSNYGQQNSLLWAPDAAGKYTEPRAIGTRYLTHHL

SEQ ID NO: 2124 - protein, 735 aa, Artificial Sequence
  Description of Artificial Sequence: Synthetic polypeptide
MAADGYLPDWLEDNLSEGVREWWALQPGAPKPKANQQHQDNARGLVLPGYKYLGPGNGLDKGEPVNAADAAALEHDKAYDQQLKAGDNPYLKYNHADAEFQQRLQGDTSFGGNLGRAVFQAKKRVLEPLGLVEQAGETAPGKKRPLIESPQQPDSSTGIGKKGKQPAKKKLVFEDETGAGDGPPEGSTSGAMSDDSEMRAAAGGAAVEGGQGADGVGNASGDWHCDSTWSEGHVTTTSTRTWVLPTYNNHLYKRLGESLQSNTYNGFSTPWGYFDFNRFHCHFSPRDWQRLINNNWGMRPKAMRVKIFNIQVKEVTTSNGETTVANNLTSTVQIFADSSYELPYVMDAGQEGSLPPFPNDVFMVPQYGYCGLVTGNTSQQQTDRNAFYCLEYFPSQMLRTGNNFEITYSFEKVPFHSMYAHSQSLDRLMNPLIDQYLWGLQSTTTGTTLNAGTATTNFTKLRPTNFSNFKKNWLPGPSIKQQGFSKTANQNYFIPATGSDSLIRYETHSTLDGRWSALTPGPPLATAGPADSKFSNSQLIFAGPKQNGNTATVPGTLIFTSEEELAATNATDTDMWGNLPVIDFSKSNLPTVDRLTHLGAVPGMVWQNRDIYYQGPIWAKIPHTDGHFHPSPLIGGFGLKHPPPQIFIKNTPVPANPATTFSSTPVNSFITQYSTGQVSVQIDWEIQKERSKRWNPEVQFTSNYGQQNSLLWAPDAAGKYTEPRAIGTRYLTHHL

SEQ ID NO: 2125 - protein, 735 aa, Artificial Sequence
  Description of Artificial Sequence: Synthetic polypeptide
MAADGYLPDWLEDNLSEGVREWWALQPGAPKPKANQQHQDNARGLVLPGYKYLGPGNGLDKGEPVNAADAAALEHDKAYDQQLKAGDNPYLKYNHADAEFQQRLQGDTSFGGNLGRAVFQAKKRVLEPLGLVEQAGETAPGKKRPLIESPQQPDSSTGIGKKGKQPAKKKLVFEDETGAGDGPPEGSTSGAMSDDSEMRAAAGGAAVEGGQGADGVGNASGDWHCDSTWSEGHVTTTSTRTWVLPTYNNHLYKRLGESLQSNTYNGFSTPWGYFDFNRFHCHFSPRDWQRLINNNWGMRPKAMRVKIFNIQVKEVTTSNGETTVANNLTSTVQIFADSSYELPYVMDAGQEGSLPPFPNDVFMVPQYGYCGLVTGNTSQQQTDRNAFYCLEYFPSQMLRTGNNFEITYSFEKVPFHSMYAHSQSLDRLMNPLIDQYLWGLQSTTTGTTLNAGTATTNFTKLRPTNFSNFKKNWLPGPSIKQQGFSKTANQNYKIPATGSDSLIKYETHSTLDGRWSALTPGPPMATAGPADSKFSNSQLIFAGPKQNGNTATVPGTLIFTSEEELAATNATDTDMWGNLPVRDFSLSNLPTVDRTTKLGAVPGMVWQNRDIYYQGPIWAKIPHTDGHFHPSPLIGGFGLKHPPPQIFIKNTPVPANPATTFSSTPVNSFITQYSTGQVSVQIDWEIQKERSKRWNPEVQFTSNYGQQNSLLWAPDAAGKYTEPRAIGTRYLTHHL

SEQ ID NO: 2126 - protein, 735 aa, Artificial Sequence
  Description of Artificial Sequence: Synthetic polypeptide
MAADGYLPDWLEDNLSEGVREWWALQPGAPKPKANQQHQDNARGLVLPGYKYLGPGNGLDKGEPVNAADAAALEHDKAYDQQLKAGDNPYLKYNHADAEFQQRLQGDTSFGGNLGRAVFQAKKRVLEPLGLVEQAGETAPGKKRPLIESPQQPDSSTGIGKKGKQPAKKKLVFEDETGAGDGPPEGSTSGAMSDDSEMRAAAGGAAVEGGQGADGVGNASGDWHCDSTWSEGHVTTTSTRTWVLPTYNNHLYKRLGESLQSNTYNGFSTPWGYFDFNRFHCHFSPRDWQRLINNNWGMRPKAMRVKIFNIQVKEVTTSNGETTVANNLTSTVQIFADSSYELPYVMDAGQEGSLPPFPNDVFMVPQYGYCGLVTGNTSQQQTDRNAFYCLEYFPSQMLRTGNNFEITYSFEKVPFHSMYAHSQSLDRLMNPLIDQYLWGLQSTTTGTTLNAGTATTNFTKLRPTNFSNFKKNWLPGPSIKQQGFSKTANQNYFIPATGSDSLIQYETHSTLDGRWSALTPGPPMATAGPADSKFSNSQLIFAGPKQNGNTATVPGTLIFTSEEELAATNATDTDMWGNLPGGDQSNSNLPTVDRLTALGAVPGMVWQNRDIYYQGPIWAKIPHTDGHFHPSPLIGGFGLKHPPPQIFIKNTPVPANPATTFSSTPVNSFITQYSTGQVSVQIDWEIQKERSKRWNPEVQFTSNYGQQNSLLWAPDAAGKYTEPRAIGTRYLTHHL

SEQ ID NO: 2127 - protein, 735 aa, Artificial Sequence
  Description of Artificial Sequence: Synthetic polypeptide
MAADGYLPDWLEDNLSEGVREWWALQPGAPKPKANQQHQDNARGLVLPGYKYLGPGNGLDKGEPVNAADAAALEHDKAYDQQLKAGDNPYLKYNHADAEFQQRLQGDTSFGGNLGRAVFQAKKRVLEPLGLVEQAGETAPGKKRPLIESPQQPDSSTGIGKKGKQPAKKKLVFEDETGAGDGPPEGSTSGAMSDDSEMRAAAGGAAVEGGQGADGVGNASGDWHCDSTWSEGHVTTTSTRTWVLPTYNNHLYKRLGESLQSNTYNGFSTPWGYFDFNRFHCHFSPRDWQRLINNNWGMRPKAMRVKIFNIQVKEVTTSNGETTVANNLTSTVQIFADSSYELPYVMDAGQEGSLPPFPNDVFMVPQYGYCGLVTGNTSQQQTDRNAFYCLEYFPSQMLRTGNNFEITYSFEKVPFHSMYAHSQSLDRLMNPLIDQYLWGLQSTTTGTTLNAGTATTNFTKLRPTNFSNFKKNWLPGPSIKQQGFSKTANQNYEMPATGSDSLIIYETHSTLDGRWSALTPGPPFATAGPADSKFSNSQLIFAGPKQNGNTATVPGTLIFTSEEELAATNATDTDVWGNLPSGDHSQSNLPTVDRPTMLGAVPGMVWQNRDIYYQGPIWAKIPHTDGHFHPSPLIGGFGLKHPPPQIFIKNTPVPANPATTFISTPVNSFITQYSTGQVSVHIDWEIQKERSKRWNPEVQFTSDYGQHSSLLWAPDAAGKYTEPTAIGTRYLTHHL

SEQ ID NO: 2128 - protein, 734 aa, Artificial Sequence
  Description of Artificial Sequence: Synthetic polypeptide
MAADGYLPDWLEDNLSEGVREWWALQPGAPKPKANQQHQDNARGLVLPGYKYLGPGNGLDKGEPVNAADAAALEHDKAYDQQLKAGDNPYLKYNHADAEFQQRLQGDTSFGGNLGRAVFQAKKRVLEPLGLVEQAGETAPGKKRPLIESPQQPDSSTGIGKKGKQPAKKKLVFEDETGAGDGPPEGSTSGAMSDDSEMRAAAGGAAVEGGQGADGVGNASGDWHCDSTWSEGHVTTTSTRTWVLPTYNNHLYKRLGESLQSNTYNGFSTPWGYFDFNRFHCHFSPRDWQRLINNNWGMRPKAMRVKIFNIQVKEVTTSNGETTVANNLTSTVQIFADSSYELPYVMDAGQEGSLPPFPNDVFMVPQYGYCGLVTGNTSQQQTDRNAFYCLEYFPSQMLRTGNNFEITYSFEKVPFHSMYAHSQSLDRLMNPLIDQYLWGLQSTTTGTTLNAGTATTNFTKLRPTNFSNFKKNWLPGPSIKQQGFSKTANQNDIPATGSDSLIKYETHSTLDGRWSALTPGPPMATAGPADSKFSNSQLIFAGPKQNGNTATVPGTLIFTSEEELAATNATDTDMWGNLPGGDQSNSNLPTVDRLTALGAVPGMVWQNRDIYYQGPIWAKIPHTDGHFHPSPLIGGFGLKHPPPQIFIKNTPVPANPATTFSSTPVNSFITQYSTGQVSVQIDWEIQKERSKRWNPEVQFTSNYGQQNSLLWAPDAAGKYTEPRAIGTRYLTHHL

SEQ ID NO: 2129 - protein, 735 aa, Artificial Sequence
  Description of Artificial Sequence: Synthetic polypeptide
MAADGYLPDWLEDNLSEGVREWWALQPGAPKPKANQQHQDNARGLVLPGYKYLGPGNGLDKGEPVNAADAAALEHDKAYDQQLKAGDNPYLKYNHADAEFQQRLQGDTSFGGNLGRAVFQAKKRVLEPLGLVEQAGETAPGKKRPLIESPQQPDSSTGIGKKGKQPAKKKLVFEDETGAGDGPPEGSTSGAMSDDSEMRAAAGGAAVEGGQGADGVGNASGDWHCDSTWSEGHVTTTSTRTWVLPTYNNHLYKRLGESLQSNTYNGFSTPWGYFDFNRFHCHFSPRDWQRLINNNWGMRPKAMRVKIFNIQVKEVTTSNGETTVANNLTSTVQIFADSSYELPYVMDAGQEGSLPPFPNDVFMVPQYGYCGLVTGNTSQQQTDRNAFYCLEYFPSQMLRTGNNFEITYSFEKVPFHSMYAHSQSLDRLMNPLIDQYLWGLQSTTTGTTLNAGTATTNFTKLRPTNFSNFKKNWLPGPSIKQQGFSKTANQNYIIPATGSDSLITYETHSTLDGRWSALTPGPPVATAGPADSKFSNSQLIFAGPKQNGNTATVPGTLIFTSEEELAATNATDTDMWGNLPFNDDSSSNLPTVDRSTFLGAVPGMVWQNRDIYYQGPIWAKIPHTDGHFHPSPLIGGFGLKHPPPQIFIKNTPVPANPATTFSSTPVNSFITQYSTGQVSVQIDWEIQKERSKRWNPEVQFTSNYGQQNSLLWAPDAAGKYTEPRAIGTRYLTHHL

SEQ ID NO: 2130 - protein, 733 aa, Artificial Sequence
  Description of Artificial Sequence: Synthetic polypeptide
MAADGYLPDWLEDNLSEGIREWWDLKPGAPKPKANQQKQDDGRGLVLPGYKYLGPFNGLDKGEPVNAADAAALEHDKAYDQQLKAGDNPYLRYNHADAEFQERLQEDTSFGGNLGRAVFQAKKRVLEPLGLVEEGAKTAPGKKRPLESPQEPDSSSGIGKKGKQPARKRLNFEEDTGAGDGPPEGSDTSAMSSDIEMRAAPGGNAVDAGQGSDGVGNASGDWHCDSTWSEGKVTTTSTRTWVLPTYNNHLYLRLGTTSSSNTYNGFSTPWGYFDFNRFHCHFSPRDWQRLINNNWGLRPKAMRVKIFNIQVKEVTTSNGETTVANNLTSTVQIFADSSYELPYVMDAGQEGSLPPFPNDVFMVPQYGYCGIVTGENQNQTDRNAFYCLEYFPSQMLRTGNNFEMAYNFEKVPFHSMYAHSQSLDRLMNPLLDQYLWHLQSTTSGETLNQGNAATTFGKIRSGDFAFYRKNWLPGPCVKQQRFSKTASQNYKIPASGGNALLKYDTHYTLNNRWSNIAPGPPMATAGPSDGDFSNAQLIFPGPSVTGNTTTSANNLLFTSEEEIAATNPRDTDMFGQIADNNQNATTAPITGNVTAMGVLPGMVWQNRDIYYQGPIWAKIPHADGHFHPSPLIGGFGLKHPPPQIFIKNTPVPANPATTFTAARVDSFITQYSTGQVAVQIEWEIEKERSKRWNPEVQFTSNYGNQSSMLWAPDTTGKYTEPRVIGSRYLTNHL

SEQ ID NO: 2131 - protein, 742 aa, Artificial Sequence; identical to SEQ ID NO: 1942
  Description of Artificial Sequence: Synthetic polypeptide

SEQ ID NO: 2132 - protein, 733 aa, Artificial Sequence; identical to SEQ ID NO: 421
  Description of Artificial Sequence: Synthetic polypeptide

SEQ ID NO: 2133 - protein, 733 aa, Artificial Sequence; identical to SEQ ID NO: 138
  Description of Artificial Sequence: Synthetic polypeptide

SEQ ID NO: 2134 - protein, 733 aa, Artificial Sequence; identical to SEQ ID NO: 425
  Description of Artificial Sequence: Synthetic polypeptide

SEQ ID NO: 2135 - protein, 735 aa, Artificial Sequence
  Description of Artificial Sequence: Synthetic polypeptide
MAADGYLPDWLEDNLSEGVREWWALQPGAPKPKANQQHQDNARGLVLPGYKYLGPGNGLDKGEPVNAADAAALEHDKAYDQQLKAGDNPYLKYNHADAEFQQRLQGDTSFGGNLGRAVFQAKKRVLEPLGLVEQAGETAPGKKRPLIESPQQPDSSTGIGKKGKQPAKKKLVFEDETGAGDGPPEGSTSGAMSDDSEMRAAAGGAAVEGGQGADGVGNASGDWHCDSTWSEGHVTTTSTRTWVLPTYNNHLYKRLGESLQSNTYNGFSTPWGYFDFNRFHCHFSPRDWQRLINNNWGMRPKAMRVKIFNIQVKEVTTSNGETTVANNLTSTVQIFADSSYELPYVMDAGQEGSLPPFPNDVFMVPQYGYCGLVTGNTSQQQTDRNAFYCLEYFPSQMLRTGNNFEITYSFEKVPFHSMYAHSQSLDRLMNPLIDQYLWGLQSTTTGTTLNAGTATTNFTKLRPTNFSNFKKNWLPGPSIKQQGFSKTANQNYEIPATGSDSLIEYETHSTLDGRWSALTPGPPMATAGPADSKFSNSQLIFAGPKQNGNTATVPGTLIFTSEEELAATNATDTDMWGNLPGGDQSSSNLPTVDRLTALGAVPGMVWQNRDIYYQGPIWAKIPHTDGHFHPSPLIGGFGLKHPPPQIFIKNTPVPANPATTFSSTPVNSFITQYSTGQVSVQIDWEIQKERSKRWNPEVQFTSNYGQQNSLLWAPDAAGKYTEPRAIGTRYLTHHL

SEQ ID NO: 2136 - protein, 735 aa, Artificial Sequence
  Description of Artificial Sequence: Synthetic polypeptide
MAADGYLPDWLEDNLSEGVREWWALQPGAPKPKANQQHQDNARGLVLPGYKYLGPGNGLDKGEPVNAADAAALEHDKAYDQQLKAGDNPYLKYNHADAEFQQRLQGDTSFGGNLGRAVFQAKKRVLEPLGLVEQAGETAPGKKRPLIESPQQPDSSTGIGKKGKQPAKKKLVFEDETGAGDGPPEGSTSGAMSDDSEMRAAAGGAAVEGGQGADGVGNASGDWHCDSTWSEGHVTTTSTRTWVLPTYNNHLYKRLGESLQSNTYNGFSTPWGYFDFNRFHCHFSPRDWQRLINNNWGMRPKAMRVKIFNIQVKEVTTSNGETTVANNLTSTVQIFADSSYELPYVMDAGQEGSLPPFPNDVFMVPQYGYCGLVTGNTSQQQTDRNAFYCLEYFPSQMLRTGNNFEITYSFEKVPFHSMYAHSQSLDRLMNPLIDQYLWGLQSTTTGTTLNAGTATTNFTKLRPTNFSNFKKNWLPGPSIKQQGFSKTANQNYEIPATGSDSLIEYETHSTLDGRWSALTPGPPMATAGPADSKFSNSQLIFAGPKQNGNTATVPGTLIFTSEEELAATNATDTDMWGNLPGGDQSSSNLPVVRGLRALGAVPGMVWQNRDIYYQGPIWAKIPHTDGHFHPSPLIGGFGLKHPPPQIFIKNTPVPANPATTFSSTPVNSFITQYSTGQVSVQIDWEIQKERSKRWNPEVQFTSNYGQQNSLLWAPDAAGKYTEPRAIGTRYLTHHL

SEQ ID NO: 2137 - protein, 735 aa, Artificial Sequence
  Description of Artificial Sequence: Synthetic polypeptide
MAADGYLPDWLEDNLSEGVREWWALQPGAPKPKANQQHQDNARGLVLPGYKYLGPGNGLDKGEPVNAADAAALEHDKAYDQQLKAGDNPYLKYNHADAEFQQRLQGDTSFGGNLGRAVFQAKKRVLEPLGLVEQAGETAPGKKRPLIESPQQPDSSTGIGKKGKQPAKKKLVFEDETGAGDGPPEGSTSGAMSDDSEMRAAAGGAAVEGGQGADGVGNASGDWHCDSTWSEGHVTTTSTRTWVLPTYNNHLYKRLGESLQSNTYNGFSTPWGYFDFNRFHCHFSPRDWQRLINNNWGMRPKAMRVKIFNIQVKEVTTSNGETTVANNLTSTVQIFADSSYELPYVMDAGQEGSLPPFPNDVFMVPQYGYCGLVTGNTSQQQTDRNAFYCLEYFPSQMLRTGNNFEITYSFEKVPFHSMYAHSQSLDRLMNPLIDQYLWGLQSTTTGTTLNAGTATTNFTKLRPTNFSNFKKNWLPGPSIKQQGFSKTANQNYEIPATGSDSLIEYETHSTLDGRWSALTPGPPMATAGPADSKFSNSQLIFAGPKQNGNTATVPGTLIFTSEEELAATNATDTDMWGNLPGGDQSSSNLPVVNRLSALGAVPGMVWQNRDIYYQGPIWAKIPHTDGHFHPSPLIGGFGLKHPPPQIFIKNTPVPANPATTFSSTPVNSFITQYSTGQVSVQIDWEIQKERSKRWNPEVQFTSNYGQQNSLLWAPDAAGKYTEPRAIGTRYLTHHL

SEQ ID NO: 2138 - protein, 735 aa, Artificial Sequence
  Description of Artificial Sequence: Synthetic polypeptide
MAADGYLPDWLEDNLSEGVREWWALQPGAPKPKANQQHQDNARGLVLPGYKYLGPGNGLDKGEPVNAADAAALEHDKAYDQQLKAGDNPYLKYNHADAEFQQRLQGDTSFGGNLGRAVFQAKKRVLEPLGLVEQAGETAPGKKRPLIESPQQPDSSTGIGKKGKQPAKKKLVFEDETGAGDGPPEGSTSGAMSDDSEMRAAAGGAAVEGGQGADGVGNASGDWHCDSTWSEGHVTTTSTRTWVLPTYNNHLYKRLGESLQSNTYNGFSTPWGYFDFNRFHCHFSPRDWQRLINNNWGMRPKAMRVKIFNIQVKEVTTSNGETTVANNLTSTVQIFADSSYELPYVMDAGQEGSLPPFPNDVFMVPQYGYCGLVTGNTSQQQTDRNAFYCLEYFPSQMLRTGNNFEITYSFEKVPFHSMYAHSQSLDRLMNPLIDQYLWGLQSTTTGTTLNAGTATTNFTKLRPTNFSNFKKNWLPGPSIKQQGFSKTANQNYEIPATGSDSLIEYETHSTLDGRWSALTPGPPMATAGPADSKFSNSQLIFAGPKQNGNTATVPGTLIFTSEEELAATNATDTDMWGNLPGGDQSSSNLPPVMGLGALGAVPGMVWQNRDIYYQGPIWAKIPHTDGHFHPSPLIGGFGLKHPPPQIFIKNTPVPANPATTFSSTPVNSFITQYSTGQVSVQIDWEIQKERSKRWNPEVQFTSNYGQQNSLLWAPDAAGKYTEPRAIGTRYLTHHL

SEQ ID NO: 2139 - protein, 736 aa, Artificial Sequence
  Description of Artificial Sequence: Synthetic polypeptide
MAADGYLPDWLEDNLSEGVREWWALQPGAPKPKANQQHQDNARGLVLPGYKYLGPGNGLDKGEPVNAADAAALEHDKAYDQQLKAGDNPYLKYNHADAEFQQRLQGDTSFGGNLGRAVFQAKKRVLEPLGLVEQAGETAPGKKRPLIESPQQPDSSTGIGKKGKQPAKKKLVFEDETGAGDGPPEGSTSGAMSDDSEMRAAAGGAAVEGGQGADGVGNASGDWHCDSTWSEGHVTTTSTRTWVLPTYNNHLYKRLGESLQSNTYNGFSTPWGYFDFNRFHCHFSPRDWQRLINNNWGMRPKAMRVKIFNIQVKEVTTSNGETTVANNLTSTVQIFADSSYELPYVMDAGQEGSLPPFPNDVFMVPQYGYCGLVTGNTSQQQTDRNAFYCLEYFPSQMLRTGNNFEITYSFEKVPFHSMYAHSQSLDRLMNPLIDQYLWGLQSTTTGTTLNAGTATTNFTKLRPTNFSNFKKNWLPGPSIKQQGFSKTANQNYEIPATGSDSLIEYETHSTLDGRWSALTPGPPMATAGPADSKFSNSQLIFAGPKQNGNTATVPGTLIFTSEEELAATNATDTDMWGNLPGGDQSRVDRLPTVDRLTALGAVPGMVWQNRDIYYQGPIWAKIPHTDGHFHPSPLIGGFGLKHPPPQIFIKNTPVPANPATTFSSTPVNSFITQYSTGQVSVQIDWEIQKERSKRWNPEVQFTSNYGQQNSLLWAPDAAGKYTEPRAIGTRYLTHHL

SEQ ID NO: 2140 - protein, 736 aa, Artificial Sequence
  Description of Artificial Sequence: Synthetic polypeptide
MAADGYLPDWLEDNLSEGVREWWALQPGAPKPKANQQHQDNARGLVLPGYKYLGPGNGLDKGEPVNAADAAALEHDKAYDQQLKAGDNPYLKYNHADAEFQQRLQGDTSFGGNLGRAVFQAKKRVLEPLGLVEQAGETAPGKKRPLIESPQQPDSSTGIGKKGKQPAKKKLVFEDETGAGDGPPEGSTSGAMSDDSEMRAAAGGAAVEGGQGADGVGNASGDWHCDSTWSEGHVTTTSTRTWVLPTYNNHLYKRLGESLQSNTYNGFSTPWGYFDFNRFHCHFSPRDWQRLINNNWGMRPKAMRVKIFNIQVKEVTTSNGETTVANNLTSTVQIFADSSYELPYVMDAGQEGSLPPFPNDVFMVPQYGYCGLVTGNTSQQQTDRNAFYCLEYFPSQMLRTGNNFEITYSFEKVPFHSMYAHSQSLDRLMNPLIDQYLWGLQSTTTGTTLNAGTATTNFTKLRPTNFSNFKKNWLPGPSIKQQGFSKTANQNYEIPATGSDSLIEYETHSTLDGRWSALTPGPPMATAGPADSKFSNSQLIFAGPKQNGNTATVPGTLIFTSEEELAATNATDTDMWGNLPGGDQSRALRLPTVDRLTALGAVPGMVWQNRDIYYQGPIWAKIPHTDGHFHPSPLIGGFGLKHPPPQIFIKNTPVPANPATTFSSTPVNSFITQYSTGQVSVQIDWEIQKERSKRWNPEVQFTSNYGQQNSLLWAPDAAGKYTEPRAIGTRYLTHHL

SEQ ID NO: 2141 - DNA, 1172 bp, Artificial Sequence
  Description of Artificial Sequence: Synthetic polynucleotide
cttaattaggctgcgcgctcgctcgctcactgaggccgcccgggcaaagcccgggcgtcgggcgacctttggtcgcccggcctcagtgagcgagcgagcgcgcagagagggagtggccaactccatcactaggggttccttgtagttaatgattaacccgccatgctacttatctaccagggtaatggggatcctctagaactatagctagtcgacattgattattgactagttattaatagtaatcaattacggggtcattagttcatagcccatatatggagttccgcgttacataacttacggtaaatggcccgcctggctgaccgcccaacgacccccgcccattgacgtcaataatgacgtatgttcccatagtaacgccaatagggactttccattgacgtcaatgggtggactatttacggtaaactgcccacttggcagtacatcaagtgtatcatatgccaagtacgccccctattgacgtcaatgacggtaaatggcccgcctggcattatgcccagtacatgaccttatgggactttcctacttggcagtacatctacgtattagtcatcgctattaccatgtcgaggccacgttctgcttcactctccccatctcccccccctccccacccccaattttgtatttatttattttttaattattttgtgcagcgatgggggcggggggggggggcgcgcgccaggcggggcggggcggggcgaggggcggggcggggcgaggcggagaggtgcggcggcagccaatcagagcggcgcgctccgaaagtttccttttatggcgaggcggcggcggcggcggccctataaaaagcgaagcgcgcggcgggcgggagcaagctttattgcggtagtttatcacagttaaattgctaacgcagtcagtgcttctgacacaacagtctcgaacttaagctgcagaagttggtcgtgaggcactgggcaggtaagtatcaaggttacaagacaggtttaaggagaccaatagaaactgggcttgtcgagacagagaagactcttgcgtttctgataggcacctattggtcttactgacatccactttgcctttctctccacaggtgtccactcccagttcaattacagctcttaaggctagagtacttaatacgactcsactatagg

SEQ ID NO: 2142 - DNA, 3231 bp, Artificial Sequence
  Description of Artificial Sequence: Synthetic polynucleotide
taagaattcacgcgtggtacctctagagtcgacccgggcggcctcgaggacggggtgaactacgcctgaggatccgatctttttccctctgccaaaaattatggggacatcatgaagccccttgagcatctgacttctggctaataaaggaaatttattttcattgcaatagtgtgttggaattttttgtgtctctcactcggaagcaattcgttgatctgaatttcgaccacccataatacccattaccctggtagataagtagcatggcgggttaatcattaactacaaggaacccctagtgatggagttggccactccctctctgcgcgctcgctcgctcactgaggccgggcgaccaaaggtcgcccgacgcccgggctttgcccgggcggcctcagtgagcgagcgagcgcgcagccttaattaacctaattcactggccgtcgttttacaacgtcgtgactgggaaaaccctggcgttacccaacttaatcgccttgcagcacatccccctttcgccagctggcgtaatagcgaagaggcccgcaccgatcgcccttcccaacagttgcgcagcctgaatggcgaatgggacgcgccctgtagcggcgcattaagcgcggcgggtgtggtggttacgcgcagcgtgaccgctacacttgccagcgccctagcgcccgctcctttcgctttcttcccttcctttctcgccacgttcgccggctttccccgtcaagctctaaatcgggggctccctttagggttccgatttagtgctttacggcacctcgaccccaaaaaacttgattagggtgatggttcacgtagtgggccatcgccctgatagacggtttttcgccctttgacgttggagtccacgttctttaatagtggactcttgttccaaactggaacaacactcaaccctatctcggtctattcttttgatttataagggattttgccgatttcggcctattggttaaaaaatgagctgatttaacaaaaatttaacgcgaattttaacaaaatattaacgcttacaatttaggtggcacttttcggggaaatgtgcgcggaacccctatttgtttatttttctaaatacattcaaatatgtatccgctcatgagacaataaccctgataaatgcttcaataatattgaaaaaggaagagtatgagtattcaacatttccgtgtcgcccttattcccttttttgcggcattttgccttcctgtttttgctcacccagaaacgctggtgaaagtaaaagatgctgaagatcagttgggtgcacgagtgggttacatcgaactggatctcaacagcggtaagatccttgagagttttcgccccgaagaacgttttccaatgatgagcacttttaaagttctgctatgtggcgcggtattatcccgtattgacgccgggcaagagcaactcggtcgccgcatacactattctcagaatgacttggttgagtactcaccagtcacagaaaagcatcttacggatggcatgacagtaagagaattatgcagtgctgccataaccatgagtgataacactgcggccaacttacttctgacaacgatcggaggaccgaaggagctaaccgcttttttgcacaacatgggggatcatgtaactcgccttgatcgttgggaaccggagctgaatgaagccataccaaacgacgagcgtgacaccacgatgcctgtagcaatggcaacaacgttgcgcaaactattaactggcgaactacttactctagcttcccggcaacaattaatagactggatggaggcggataaagttgcaggaccacttctgcgctcggcccttccggctggctggtttattgctgataaatctggagccggtgagcgtgggtctcgcggtatcattgcagcactggggccagatggtaagccctcccgtatcgtagttatctacacgacggggagtcaggcaactatggatgaacgaaatagacagatcgctgagataggtgcctcactgattaagcattggtaactgtcagaccaagtttactcatatatactttagattgatttaaaacttcatttttaatttaaaaggatctaggtgaagatcctttttgataatctcatgaccaaaatcccttaacgtgagttttcgttccactgagcgtcagaccccgtagaaaagatcaaaggatcttcttgagatcctttttttctgcgcgtaatctgctgcttgcaaacaaaaaaaccaccgctaccagcggtggtttgtttgccggatcaagagctaccaactctttttccgaaggtaactggcttcagcagagcgcagataccaaatactgttcttctagtgtagccgtagttaggccaccacttcaagaactctgtagcaccgcctacatacctcgctctgctaatcctgttaccagtggctgctgccagtggcgataagtcgtgtcttaccgggttggactcaagacgatagttaccggataaggcgcagcggtcgggctgaacggggggttcgtgcacacagcccagcttggagcgaacgacctacaccgaactgagatacctacagcgtgagctatgagaaagcgccacgcttcccgaagggagaaaggcggacaggtatccggtaagcggcagggtcggaacaggagagcgcacgagggagcttccagggggaaacgcctggtatctttatagtcctgtcgggtttcgccacctctgacttgagcgtcgatttttgtgatgctcgtcaggggggcggagcctatggaaaaacgccagcaacgcggcctttttacggttcctggccttttgctggccttttgctcacatgttctttcctgcgttatcccctgattctgtggataaccgtattaccgcctttgagtgagctgataccgctcgccgcagccgaacgaccgagcgcagcgagtcagtgagcgaggaagcggaagagcgcccaatacgcaaaccgcctctccccgcgcgttggccgattcattaatgcagctggcacgacaggtttcccgactggaaagcgggcagtgagcgcaacgcaattaatgtgagttagctcactcattaggcaccccaggctttacactttatgcttccggctcgtatgttgtgtggaattgtgagcggataacaatttcacacaggaaacagctatgaccatgattacgccagatttaattaaggc

SEQ ID NO: 2143 - protein, 737 aa, Artificial Sequence
  Description of Artificial Sequence: Synthetic polypeptide
  MOD_RES (264)..(264): Xaa can be any naturally occurring amino acid
  MOD_RES (266)..(266): Xaa can be any naturally occurring amino acid
  MOD_RES (268)..(268): Xaa can be any naturally occurring amino acid
  MOD_RES (448)..(448): Xaa can be any naturally occurring amino acid
  MOD_RES (459)..(460): Xaa can be any naturally occurring amino acid
  MOD_RES (467)..(467): Xaa can be any naturally occurring amino acid
  MOD_RES (470)..(471): Xaa can be any naturally occurring amino acid
  MOD_RES (474)..(474): Xaa can be any naturally occurring amino acid
  MOD_RES (495)..(495): Xaa can be any naturally occurring amino acid
  MOD_RES (516)..(516): Xaa can be any naturally occurring amino acid
  MOD_RES (533)..(533): Xaa can be any naturally occurring amino acid
  MOD_RES (547)..(547): Xaa can be any naturally occurring amino acid
  MOD_RES (551)..(551): Xaa can be any naturally occurring amino acid
  MOD_RES (555)..(555): Xaa can be any naturally occurring amino acid
  MOD_RES (557)..(557): Xaa can be any naturally occurring amino acid
  MOD_RES (561)..(561): Xaa can be any naturally occurring amino acid
  MOD_RES (563)..(563): Xaa can be any naturally occurring amino acid
  MOD_RES (577)..(577): Xaa can be any naturally occurring amino acid
  MOD_RES (583)..(583): Xaa can be any naturally occurring amino acid
  MOD_RES (593)..(593): Xaa can be any naturally occurring amino acid
  MOD_RES (596)..(596): Xaa can be any naturally occurring amino acid
  MOD_RES (661)..(662): Xaa can be any naturally occurring amino acid
  MOD_RES (664)..(665): Xaa can be any naturally occurring amino acid
  MOD_RES (710)..(710): Xaa can be any naturally occurring amino acid
  MOD_RES (717)..(719): Xaa can be any naturally occurring amino acid
  MOD_RES (723)..(723): Xaa can be any naturally occurring amino acid
MAADGYLPDWLEDNLSEGIREWWDLKPGAPKPKANQQKQDDGRGLVLPGYKYLGPFNGLDKGEPVNAADAAALEHDKAYDQQLKAGDNPYLRYNHADAEFQERLQEDTSFGGNLGRAVFQAKKRVLEPLGLVEEGAKTAPGKKRPVEPSPQRSPDSSTGIGKKGQQPAKKRLNFGQTGDSESVPDPQPLGEPPAGPSGLGSGTMAAGGGAPMADNNEGADGVGNASGNWHCDSTWLGDRVITTSTRTWALPTYNNHLYKQISSXSXGXTNDNHYFGYSTPWGYFDFNRFHCHFSPRDWQRLINNNWGFRPKRLNFKLFNIQVKEVTTNDGVTTIANNLTSTVQVFSDSEYQLPYVLGSAHQGCLPPFPADVFMIPQYGYLTLNNGSQAVGRSSFYCLEYFPSQMLRTGNNFTFSYTFEDVPFHSSYAHSQSLDRLMNPLIDQYLYYLXRTQSTGGTAGXXELLFSQXGPXXMSXQAKNWLPGPCYRQQRVSKTLXQNNNSNFAWTGATKYHLNGRXSLVNPGVAMATHKDDEXRFFPSSGVLIFGKXGAGXNNTXLXNVMXTXEEEIKTTNPVATEXYGVVAXNLQSSNTAPXTGXVNSQGALPGMVWQNRDVYLQGPIWAKIPHTDGNFHPSPLMGGFGLKHPPPQILIKNTPVPANPPXXFXXAKFASFITQYSTGQVSVEIEWELQKENSKRWNPEIQYTSNYAKSXNVDFAVXXXGVYXEPRPIGTRYLTRNL

SEQ ID NO: 2144 - protein, 737 aa, Artificial Sequence
  Description of Artificial Sequence: Synthetic polypeptide
MAADGYLPDWLEDNLSEGIREWWDLKPGAPKPKANQQKQDDGRGLVLPGYKYLGPFNGLDKGEPVNAADAAALEHDKAYDQQLKAGDNPYLRYNHADAEFQERLQEDTSFGGNLGRAVFQAKKRVLEPLGLVEEGAKTAPGKKRPVEPSPQRSPDSSTGIGKKGQQPAKKRLNFGQTGDSESVPDPQPLGEPPAGPSGLGSGTMAAGGGAPMADNNEGADGVGNASGNWHCDSTWLGDRVITTSTRTWALPTYNNHLYKQISSASSGSTNDNHYFGYSTPWGYFDFNRFHCHFSPRDWQRLINNNWGFRPKRLNFKLFNIQVKEVTTNDGVTTIANNLTSTVQVFSDSEYQLPYVLGSAHQGCLPPFPADVFMIPQYGYLTLNNGSQAVGRSSFYCLEYFPSQMLRTGNNFTFSYTFEDVPFHSSYAHSQSLDRLMNPLIDQYLYYLARTQSTGGTAGNRELLFSQGGPSNMSAQAKNWLPGPCYRQQRVSKTLAQNNNSNFAWTGATKYHLNGRDSLVNPGVAMATHKDDEDRFFPSSGVLIFGKEGAGANNTALENVMLTNEEEIKTTNPVATEQYGVVASNLQSSNTAPATGAVNSQGALPGMVWQNRDVYLQGPIWAKIPHTDGNFHPSPLMGGFGLKHPPPQILIKNTPVPANPPATFTPAKFASFITQYSTGQVSVEIEWELQKENSKRWNPEIQYTSNYAKSTNVDFAVNNEGVYSEPRPIGTRYLTRNL

SEQ ID NO: 2145 - protein, 737 aa, Artificial Sequence
  Description of Artificial Sequence: Synthetic polypeptide
MAADGYLPDWLEDNLSEGIREWWDLKPGAPKPKANQQKQDDGRGLVLPGYKYLGPFNGLDKGEPVNAADAAALEHDKAYDQQLKAGDNPYLRYNHADAEFQERLQEDTSFGGNLGRAVFQAKKRVLEPLGLVEEGAKTAPGKKRPVEPSPQRSPDSSTGIGKKGQQPAKKRLNFGQTGDSESVPDPQPLGEPPAGPSGLGSGTMAAGGGAPMADNNEGADGVGNASGNWHCDSTWLGDRVITTSTRTWALPTYNNHLYKQISSQSSGSTNDNHYFGYSTPWGYFDFNRFHCHFSPRDWQRLINNNWGFRPKRLNFKLFNIQVKEVTTNDGVTTIANNLTSTVQVFSDSEYQLPYVLGSAHQGCLPPFPADVFMIPQYGYLTLNNGSQAVGRSSFYCLEYFPSQMLRTGNNFTFSYTFEDVPFHSSYAHSQSLDRLMNPLIDQYLYYLSRTQSTGGTAGNRELLFSQGGPANMSAQAKNWLPGPCYRQQRVSKTLSQNNNSNFAWTGATKYHLNGRDSLVNPGVAMATHKDDEERFFPSSGVLIFGKQGAGANNTTLDNVMMTSEEEIKTTNPVATEQYGVVASNLQSSNTAPQTGTVNSQGALPGMVWQNRDVYLQGPIWAKIPHTDGNFHPSPLMGGFGLKHPPPQILIKNTPVPANPPAVFSPAKFASFITQYSTGQVSVEIEWELQKENSKRWNPEIQYTSNYAKSTNVDFAVNSEGVYSEPRPIGTRYLTRNL

(The sequence listing continues in the following parts.)

1. An adeno-associated virus (AAV) viral genome comprising a nucleic acid sequence positioned between two inverted terminal repeats (ITRs), wherein said nucleic acid sequence when expressed inhibits or suppresses the expression of a target gene in a cell, wherein said nucleic acid sequence comprises, in a 5′ to 3′ order:
(i) (a) a first 5′ flanking region, a first encoded sense strand sequence, a first loop region, a first encoded antisense strand sequence, and a first 3′ flanking region; or
(b) a first 5′ flanking region, a first encoded antisense strand sequence, a first loop region, a first encoded sense strand sequence, and a first 3′ flanking region, and
(ii) (a) a second 5′ flanking region, a second encoded sense strand, a second loop region, and a second encoded antisense strand sequence; or
(b) a second 5′ flanking region, a second encoded antisense strand sequence, a second loop region, a second encoded sense strand sequence, and a second 3′ flanking region;
wherein:
at least one of the first or second 5′ flanking region comprises the nucleotide sequence of any one of SEQ ID NOs: 1503-1509, 1692, or 1782;
at least one of the first or second loop region comprises the nucleotide sequence of any one of SEQ ID NOs: 1510-1517, or 1693-1694; and/or
at least one of the first or second 3′ flanking region comprises the nucleotide sequence of any one of SEQ ID NOs: 1518-1522, 1695, or 1783.

2.-112. (canceled)

113. The AAV viral genome of claim 1, wherein:
(i) the first encoded antisense strand sequence is complementary to an mRNA of a first target gene; and
(ii) the second encoded antisense strand sequence is complementary to an mRNA of a second target gene.

114. The AAV viral genome of claim 1, wherein the nucleic acid sequence further comprises one or both of:
(i) (a) a third 5′ flanking region, a third encoded sense strand sequence, a third loop region, and a third encoded antisense strand sequence, and a third 3′ flanking region, or
(b) a third 5′ flanking region, a third encoded antisense strand sequence, a third loop region, a third encoded sense strand sequence, and a third 3′ flanking region;
wherein the third encoded antisense strand sequence is complementary to an mRNA of a third target gene; and/or
(ii) (a) a fourth 5′ flanking region, a fourth encoded sense strand sequence, a fourth loop region, a fourth antisense strand sequence, and a fourth 3′ flanking sequence, or
(b) a fourth 5′ flanking region, a fourth encoded antisense strand sequence, a fourth loop region, a fourth encoded sense strand sequence, and a fourth 3′ flanking sequence;
wherein the fourth encoded antisense strand sequence is complementary to an mRNA of a fourth target gene.

115. The AAV viral genome of claim 114, wherein:
(i) at least one of the first, second, third, and fourth 5′ flanking regions comprises the nucleotide sequence of any one of SEQ ID NOs: 1503-1505, 1507, or 1509;
(ii) at least one of the first, second, third and fourth loop regions comprises the nucleotide sequence of any one of SEQ ID NOs: 1510-1513, or 1517; and/or
(iii) wherein at least one of the first, second, third, and fourth 3′ flanking regions comprises the nucleotide sequence of any one of SEQ ID NOs: 1518-1522.

116. The AAV viral genome of claim 114, wherein:
(i) the first target gene is the same as the second target gene; and/or
(ii) the third target gene is the same the first target gene and the second target gene.

117. The AAV viral genome of claim 114, wherein:
(i) the first target gene is not the same as the second target gene; and/or
(ii) the third target gene is the same as the first target gene or is the same as the second target gene.

118. The AAV viral genome of claim 1, wherein the target gene is a huntingtin (HTT) gene or a SOD1 gene.

119. The AAV viral genome of claim 114, wherein:
(i) each sense strand sequence and antisense strand sequence is, independently, 19 to 24 nucleotides in length, 19 to 21 nucleotides in length, 19 nucleotides in length, 20 nucleotides in length, 21 nucleotides in length, or 22 nucleotides in length;
(ii) one or both of the first encoded sense strand sequence and the first encoded antisense strand sequence comprise a 3′ overhang of at least 1 nucleotide or at least 2 nucleotides;
(iii) one or both of the second encoded sense strand sequence and the second encoded antisense strand sequence comprise a 3′ overhang of at least 1 nucleotide or at least 2 nucleotides;
(iv) one or both of the third encoded sense strand sequence and the third encoded antisense strand sequence comprise a 3′ overhang of at least 1 nucleotide or at least 2 nucleotides; and/or
(v) one or both of the fourth encoded sense strand sequence and the fourth encoded antisense strand sequence comprise a 3′ overhang of at least 1 nucleotide or at least 2 nucleotides.

120. The AAV viral genome of claim 114, which further comprises:
(i) a first promoter, which is present 5′ to the first 5′ flanking region;
(ii) a second promoter, which is present 5′ to the second 5′ flanking region;
(iii) a third promoter, which is present 5′ to the third 5′ flanking region; and/or
(iv) a fourth promoter, which is present 5′ to the fourth 5′ flanking region.

121. The AAV viral genome of claim 120, wherein one, two, three, or all of the first, second, third, and fourth promoter is:
(a) a ubiquitous promoter or a cell-type specific promoter;
(b) a CBA promoter, a CMV promoter, a PGK promoter, an H1 promoter, a T7 promoter, a UBC promoter, a GUSB promoter, an NSE promoter, a synapsin promoter, a MeCP2 promoter, or a GFAP promoter.

122. A recombinant adeno-associated virus (AAV) comprising the AAV viral genome of claim 1, and an AAV capsid protein.

123. The recombinant AAV of claim 122, wherein the AAV capsid protein is an AAV9 capsid protein or a variant thereof or an AAV5 capsid protein or a variant thereof.

124. A cell comprising the AAV viral genome of claim 1, wherein the cell is a mammalian cell, an HEK293 cell, an insect cell, an Sf9 cell, a cell of the central nervous system, a neuron, a medium spiny neuron, a motor neuron, or an astrocyte.

125. A pharmaceutical composition comprising the recombinant AAV of claim 122, and a pharmaceutically acceptable excipient.

126. A method of treating a disease of the central nervous system in a subject, comprising administering to the subject an effective amount of the recombinant AAV of claim 122, thereby treating the disease of the central nervous system in the subject.

127. The method of claim 126, wherein the disease of the central nervous system is Huntington's Disease (HD) or ALS.

128. The method of claim 126, wherein the recombinant AAV is administered intravenously, via intracisternal injection, intravascularly, intraventricularly, or via a combination thereof.

129. A method of inhibiting the expression of a target gene in a cell, comprising administering to the cell an effective amount of the recombinant AAV of claim 122, thereby inhibiting expression of the target gene in the cell, optionally wherein:
(i) the target gene is expressed in a neurologic cell, tissue, or organ; and/or
(ii) the cell is a medium spiny neuron, a cortical neuron, a motor neuron, or an astrocyte.

130. The method of claim 129, wherein the cell is in a subject, and the subject has a disease of the central nervous system.

131. A method of producing a recombinant adeno-associated virus (rAAV) comprising providing a cell with a polynucleotide comprising the AAV viral genome of claim 1, at least one polynucleotide encoding AAV rep genes, and at least one polynucleotide encoding AAV cap genes; and harvesting the rAAV from the cell, optionally wherein the cell is a bacterial cell, a mammalian cell, or an insect cell.
